United States Patent Application Publication US 2014/0057251 A1 - sequence listing, part 149

SEQ ID NO: 295107 - DNA, 11325 bp, Cannabis indica
ttacatattaataatatttgtatttttcattaaaaaaaaataaaattatgatatagtgacgtgcctaaagccaagtcccccctagacttggggagacacaatttatcccacaccttagggtgaattccacagttacctttctcaaacccccaccaaaaattccaaaccaaagctgtcaatcctagagataagacagttagagagcttggtagtttgcatggcgtacaaaggcatcgaaagccccattaattttatcaaagtagctctccctactttcgaaagcacttttgctttccacccttgccgcttagaagtgaggttatctagaatgaaattgaaatgtgcattttttcactttgatcgaaataaagggagccccaaatatttcacattaccttccagtcctataatccccaactcatctcgaatgcccttatttagatcttctaaggtattgttactgaaaaagattgacgtttttagcttattgacctgctacctagaccaatcacaaaatttttcaaggcaaagccagaatcctttagcctcttccagagaggctttcccaaccaaaattaaatcatccgtgaagaaaatatgagacagaataagaccaccccaagaaagacaaattcctcggatactactcttgaagcagtctggacaaaatctcagctgcccaaataaagaggtacagggagagtggatccccttggcgcaaactacacgacagatgaattgtgccaacctggcccccattaaggaacacatttagagaagtggtggagataccttaagaaacccaatttctaaacatgacaggcacactaaagcaagatagaacatgatcaatgaactgtcatctaatcttatcataagctttcaccagatcaattttgatagcaaaaaaatcatcttttcccttcttccttttgaatgagtgaatgatctcttgaataatggcattactatcctagatatttctacccagaacgaaagctgcctgggtagggcaaacaagtcttggcagaaaaggcttaatcctattggcaatgattttcgatatcaccttataagacacattgcaaagagaatcagtctaaaattatgcacccgcttcgggtttcgaatcttcggaataagcactatatttgtagtattcacccctttgtgcatattacaagtggtagaaaaatctgagatggcctcgcaaaaatccttccccactgaatcccagtaatgcataaagaaaatgactgacatcccatctagcccaggaaccttatggtttcccatggcaaacaaagttttctgaatctcgtcaaagttgggtattctaaccagatcctcctgctcttctggggacagtctatcatgaattagattagagcagtttagatccatcctagatccaaagtcagaaaaaaatatccctcgggaatacggtgaattcttttccaatgtcgcttcgtttggaaatccagttgtcattcttatccaagagactctcaattgcattgtgccttcctctaatagtagctgacagaaagaaaaacttggtgcatttatccccttccttgagctaagaaacgcgagctcattgtttccaaaaaaaaaaaaaaatcctgtctaaggcctcattaagagctctacggacctcactttctgctttccagtctcagggagcatttacaagtgattcaacttactttctagctctttaatctttccatcaatattcccataaggtggcttttttgttttctattggaaaagtagaaagcttagagtaaaatcagtagagccttggctaaagttttgccccctacatgaagggataatgaggtttatataggctagagtttgggtctggcatacccatgacccatttagattttatttgtaaaagcaagcccattattgggataaaatacacaaacacatgacatgaggcccactagagatactcagctcgtggggcgacgattccgtaatggcaaagagaccgtctagtgcagggcacgtgttgtacaaagactacgcctggcagacaaaagtgttagaggagctgtcagacaaaaagggtgtatgtagtgcgcgcactatcatgatctgacataggagacaatattcgatcttgtgtcagagagatgggcacgtcattataggggaggcgaatgcctccctcctcatggtagacatacgactcttgatccgtggtaggctttcgggcatcaacctgtgcgacttgcttccatgtatgcccttattttcattaggagatctttgttccttctgtgtcccaaaagactaggcaccttctgggctctggaagactgttaagtttcagaggcaaggcttttagcctttgttgggttggcccattctaagtttagtttggacttttgtaaacaagaaggcttaggcccaatttttaatagtgattaccttttagttgaccctatgtcttttttcagaaacataaataacaaaaactaacatacaaatgagttacatgaaataactaaataaataaaccaattgagaaacaatacaaaaaatacatttacaatagaaaaaaaaaaactaattatcatatactcgtaaaaattgagaaactggttgctagataaacaaagaaaacattacataatggtatatattagaaaaaatcccataaaagtttaaaaatttaaaaaatatcataaaaagtttaataaaaaaactaccatatttttcgcaagatacaaaaaagtttccatgtaacttttaagaaattttacacaaagtattatggaataattatataagacaccaatttttataaaatatttatatttttacgttcaaagaatatttttttttacatttttacgattttccaaaaaataacactaaaataacataaaatcaacaagaaaactacatcaaaataacaacaaaaaataatatacagataacaaaaaatcaacaagattacaacataaaagaccgtattttccgtgaataaaatcaaaaaaatcgtaaaaatatttgaaattccgtgaaaccgtattttgttttttttttttgttgtttttatatttttgtgaaataatcccaagtattatttatacaatcaatttcttttttacaattttacaaatataatttcttcatttttacaattttttactattaaattacaatttgatgaattcctacctaaacaacatgaaaataacttaaaaataatgtaaaaataacaagaaaatacaataacgttaaaggttgtctgtgttttttgttaaagaaggaagtacaacatatttttgtaatgttttggttaaatatgaaataatccagttttaagctaattttcgaatcccataggcctattaggcccaaaaccaaatctggcccagctacaacgaaccctaagattttggacaaggtgaaatatctgcgagtgacccacctctctatataaattgcgtttcgtcttaatttatcggcttctctttctctctctgtcactcgaagcctgtaccaagcattttatctttaacgtcgaaaccctaattcgcaactgcttcgggttttgggcgtattgcatagttagtccatggcagaggaggaagttgcagctgcctcggtcagtcctgcatcgttggatcataaacggaagctcgaagagctggaacccgaagctccggaacaggccgagctgaactccgacgaacaggccaattcaaatgccgagcacgacgcacctgatggcgaggcatccgaagaaacggaactgaagcggccgcggcttgatgacaaacctgatgtttcaggtatcgtgacactgtttccccccactgttctaggtttttaatatttgatttgagctagttagaattggattgtgacacttgcgcaacactcgtgtaatttagttgtggcagtaagtgaaaacgggcacctagaagagaaggtagatgaacctgtgaaggatattgaagaggtgtcggccttggaaggtggcctagaggaaactcaacctcaatcggaggaaggtactcgaaatgaaactgataagcagcatccatctacggacagtcatcagctgtctggtcaaaatgcaaatggagctcaggaaacctcgaaagatgaaactgaagcaccctcttcagaggaccagcagcagcaggagggagaggaggcttctgctgaaccccatcaacttacatctgttgatgagcaacaactttcatctgataacgaaacaattacacgcagaatggaggtccctaataacaaggttggctttgctttctagcttcctagttccttacttgaatgctatgataagtccataaaacttttctgaagtaaacccaaacatctgattttatgataactcatcgtacatccgtggtgtttgactgtttgcaattgcattgacggctagtttacttaaccctcgtaatacatagcataattgaaagtactcattcttcagagttttgaaagtaatctatgtttgtagtgagttctgaaaaaagatcaaaattgttagtctgtaaaaggtgctactcgatacatgaaacagaattttaattcgtaattttaaaatgttccctataaaactgatagtggaaaagtagaggagtaattgcgaatttatgagtaatggcatcacctaaggtagaataggtagtacatttggtggggtgttgttaacaaggtttgaaaaatctttaaccgcaaagtgcaaagaaaatttacttctaggtgttaacagtggtttgaacaaccaccctataacacattactacatgagctcgtgtcgcaatctgaaagagagtgttataacagtgcaagcagcctcgtaggatagaggaatcttataattttcttgtgtatgggtatattttgttttgtcatttctttgcaactattatgaaagattgttgtttatattgttgcaggttggggttcttattggaaaagctggggacactataaggtaccttcaatacaattcaggagcaaaaattcagattactagagatgcggatgctgatccatatgctgcaacaaggcctgtggaggtcattggtactttggacaacataaacaaggctgagaagcttatcaatgcggtcattgcagaggtcatttgttctcttattacttatctattctgaactgctgttctaaactctgccttgtctcccttcccttccactctagctgctgacctgtaactcaaatgcaacttttgtttgatgtttggtatatactcagtagttgtatatttctacaggctgatgcagggggttctccttcccttgtggcaagaggccttgctaattcacaggccgcttcagccccagagcaaattcagatacaagttcctaatgagaaggtacagtgagctacaagtgttggttttaacgggtttcttcaacatttatgtacgaaagcttcatgtttctataacaggttggtttaatcatcggcagaggaggggagaccattaaaggtctccagacaagatcaggagcacgcatccaggtagttgatattgtactcagtacacctgttaatgaattatgtctattttccttttctttactgtatgaatcatgtatgttgatctattttccccttttcagttgataccccaacatcttccagaaggtgatgagtccaaggaaagaactgtacgagtgactggtgataaaaggcaaattgaaattgctagagaaatgataaaggatgtcatgaatcaggttaattatttatcttataatcttctctcaaatagaatgttacttaatgtctgaaatatggtaaatttgaagtactgttctctggtacattgggttattactgcaattgtttgctttgccagtgctgcgatatcatagatgctgttctgattgtgaaaacacataaattatgtttggttcataatgttcaatacttggggatattttgaaaatcttggaggatttctctcatgttcataatgttcatatggctgttacctggatgaattatggtgtatctaatttatttgttccttgacctacataattttttttgacatgtgtttggggtttatataattttatctccattttgtcaactatgcttaaatattcgtcctttacacggtatgaaattattgagtagtgcttcaagttcatgtccttgctgtaactttgtagtatttatgctttattattttcgtaacatgatatttgagtaaagacggcaacatgttgaaattagggtatgccttttacttttttggcatgcaaatacatgtacaggtcgctgtagctcactttaattctatgcttctaaagtcatttgtctcatatacaatttgtcaagggatccaaacagatttggtagtgcagaacttctgtatgatttacatttggaaagcaacatatatggtcatgaaatgatttgcttgaaacaatgtaacattcgcctgtgtcaaccttccttcaatttgaggaaaattgttacataatttatactgtgggagttggaccttgttttctaaacatgatgagagtgtaatattgatgaatcatccatgccaaggtctcttgaatgctgttaggaagataatatattcaatccaagatgtcggttgccttgatttatttatgttgaaggtgccaatttcgaattggatggatttaaaactgcagatgggctattgccttttccatggggccagctttgctttcttggtgtagcaatagacaacctctcttctctggtccactgaagaaaggtatctggcatttaatctcgcgattgcaggatgttaatagttggtaagactgctttgagatctgaaagttaaaaatcgtaattaagtaagactgttatattaacctttagagctgctgataagaactcccaagatttatgcttgaaatgtgtctggaattcctggtgaagaaatttaatcaaactttgcttgggttcaatgcttggaaattatgcttgatgttgaactgaagcatctaggataaataacttgccatttagtttgatgtctgacactagtattgtttactgacagacctcaagtacaggttcctgaaatcacaatgctttcttacttggattggatgatctcatatattttatctttgcatgtgttccttcaattgatcagttatttattaattgtaatatatccaaatcaatgatcactggataagaataacatatctggctcaacttccatatagattttggatagtttcgatggcgaattcaaaatatgccttgttgctgcatgatcatcctgggtttttctccatttctgtataaaatccctttaagtttaatgtatttgtaagtatcagcttcacaatgaaagaattacttgtgctattaaaaatattagaaatattgtttgatagttatgccaacctaaattctatataggattattgaaatcactagattactgggtataagatctgggtaatagatggattgaagacatgttcagatatttggctctatgtaaaagctttattttgtctatttgttttttcaaaagggaaagacagatcagttagtctaagtatttattgcaagtttgctatttgatgatcaattttttcaactcataatttatttttgtagaaatattttttagtaaactatcaatgaaaagaactttgctgtttgtagtttctaactattatttctttacctcatttgtatatttagaactgtacttcgttatttggcattgcatctggtagagattccatttgtgattgatgtatacttgttttaattcaatgatgataacttccgagttggaggagtcacctcaaaattttgaacaccaatgtggttacctggtccgaacagtgctttaaattttgtcgtctgctatttatttgattgatttctaatataatacagaagaattgctcttgttttaacttttatttttttgtttggtcatttggttttgagtagactgtgaggccatcttctctctcaagtggttttaatcaacagggctatcggcctcgtggacctcctggaccacagtggggtcctcgaggtcatatggcccacccatcctcgtttgattatcagcaacgagggccatattcatctcacaacccacagtatccaactcaatatggtggttatcctcaacaaatgggtccaagaggtggttttaattctggctgggagcaaaggcctccccctggcttgcaggggcacgggcataatggcggttatgattactacagtggacaaaaaggccatttatcagattctgcacacactgcttccatttctctacatgctcctggcccatctccaaatgctgcaatcgggccacctttatcacaagcaaactacaattatggacagcctcagggcccagattatgggcaacaggcaccttattctcagtcagcacactcccaacagaactatggtcatggctatgacgatcatgctccagcacagcatccctatggtagttctcagccactgtatcctcaaagtggtgctccagcaggttatggtcagcaacagcagtatggtaaaccatcttatggggtgcaatcccagggtccacctccccaatcttatggtcctcctaggcctagtcagcccggtgatgtgccttttcaaggtacagcttctgcgcaatcgtacggtcagagtgtgccacctcaacagccatatccatatgcttcaagtgggcaggcatatcctgcttacggctctgcccctcctgctgctgctgatgggtacagccagccaccacctgcgtctgcctcaggctatccacagcaaggaggccaactggctgcaagttatggccagtctggttcgcagcaaactggctatgcacaggtggctcctactgcagcgtatgggcagtacccttctgctcagcaaggttatcctgagcagtctgctccaaattctgctggttatgggtatcaaggtcaccaagatcctggatatgggactgctgcacctgcatcaacttatggcacaccaaatgcacaagggggttatggtgctcaacctgctcaggcccagcaagcttatgatcaatcagtccaacagtctggtgcttatggtgtccaaccaagcacttcagttacttatggtaaaacagtatcacctcagcctggttatgctcaatatgattcgactcagatgtatgcagcacctcattaattataaatggttttagttcatattctgtcgagttaggtttgagataattaatcaaattttaaaccaatgttttgttgtaggtttatctgacaattcacaaaccgactcctgcactgtaatgtttgaaattaattatgaaaattcaagattagcttttataaattataatatctctgatttctatagtgtgacaacacctatgctttgagaactttgttgcaggctgaagctctctgctttgcttccacaagggagattaggccgaatcaagtaagtggccgagctcttatcataatggtgaacttttaagtcttaacaatttcaactagaatagggacatttgcggcaagacaaaattgtaaagaaattgatgacgaataaaacaacaaaataaggtttagggataaaggtatagcattagcatttcctgcttacaagtactactggttgttcatgtttgatcaaaaagaaaatctttattaatcagcaagctgtattacctatcccaaggaagctttactcaagctaaccaatgaaaacaagaagaattacatgctcatcgttcctgtacattaacttttctataactaactagattaattggcctgtgaatgggcccgtttcaattgttctcggatattgagaagtacacgtgtggcctatctaaaaatacgaataacaatacaaaaatttaaatattatttcgagtaatgatatttgcaatgcacacaatttgcacacatttatatggtaagtattgtcaaccaatcattttttatttaaacggtcctacatatcaaaagtgactaatatatattatatgtaattagattgaatcgattttaattatattttacaagtgttatacaataccgatccaattcaattagaatccaatagttcacatcaaatcaaatccaattggattggattgcattggtttagaagttgcccatccctagtaataggtttgatgttcagttggttgcaatatcaggcttagcctttagactattctagttgactcagttgtaatttcaaaaaggaaacggctgattggattaattatcaatgccacagttgcagcaattgtctacaaccttacctatgtgcacttcagagagaaaaaccatcgaaaatacatttgttcttgttttctagaggtcgtagagttagcacttattttattagaacctagatttactatcatgtatgttgattataattctataatctaacactctaaatatgaatttcctagtacgatgaaataaacacatataaagtttagaaaactttacattgatgatagcggaatataatgactcattccgttcaaatttctagcccttgattcttttctgtagcagagcattatcaagatctgaacctggatcttctctccttcagtttggttaaccaccgtcttccacactatgattgaatacttgacttgctatgtgtgggcatggtactttatcactaaaagcttgaagattgatgaagaacaataataaggattcgaagttactatgaaaggagtctctcatctactagttgtctgacagaattagaaaattaggtttagattggttgaaggttggatgagaatgagtgcatcatgttccttttacagtatttcaactagagtttaggatttaattatatgaattgaaaaagataaaataatgggcaaaaaatacgttaagaggccgaccacacatgtgggcctcactagttacaattttgccactttatttaaaccatttatcatttctttcaataatgtcatatcttttaatttcaatcttataaattttaaaactatttatttaataattataattaattatcaaataaaatggacctttattttatttattaattagacttaacaaaatctcttaattaacaaataaactccaaatcctcttttcttcacaattaagcccttgattagtaaaaattcataaagaatagtctaattttagaattataattgattaattaaaaccaataaattgagtttgtaagcagtattatctcaactagtgtggggactatgagcctatataatcaagcttccaa

SEQ ID NO: 295108 - DNA, 7470 bp, Cannabis indica
tatatataacaaattatatatactgtgtataaagttttttaatggaatctaaatctgtaatttttctctataattttagcttcaataatatcaaaacgggttacagtgagttgacactaacacgacacgattttttacgggccagattagagttaagaaaattagacacgagttaaaaaatgagtcaacacgtctgacacaatataaaaaggagtcacaaaaaaatatgacacaagatacattttaccacccctacaattatataacactttatcatactgttaaactatagttagcttatagcaatattctgttaggttaggttgaagtctatacattttgaaatgaaagagagagaagaaaactctttatctttaaataatctcagccgccacccaaatgaaccaatcatattactaatgcttttaaataaaaataatgtaagttggtctttttaatattctcaactagtatcctaggcttagctcattcccatattatgtaagtaaagtttattattgtttaatcttgttgttgttgataatatatatcatatatttctagtatacatagcttgaatcgatgaacctgtttttatttatttatattttataataatgcaagtgtgtgtattgtgtggtttttttaaaggcaaaaaaatcatagctatatttttttttcttttttaggaagaaatgacacagaaaacaatggcttttcttttacaagttagagaatggattgattagatttattaaaaaacaatactttgtatggggattctagcccttttttattgtcatacatctagatttgaaatttgggttttgatatttgctctaatttccttttttttccttttgtataatagattaaaaaagaattttacaacaaaataaataaaagggctaaaaccaataagtagtgtactactaccctagtcataatagttgaggaggaacaacaggttggatattaggttgttgttgttttaaaaggttgagcctagatttgagttcatggagcaaataccaaaaatcctgcctccaagaccatgtggggtcatttagagctcttattgagttgaggcacactagtagagtaccaccttcgtgtaaaagtacctacacaataataataatagtaaaagagtgatatattgttattagtaaaattcaatatcgggtcttctattaagtaaataatgtgagaaagcactatctacatacaacgtattacatcgatatggtattgagtaccttaagatgcctaacattaatactctttagatcatgtttggttatgacgtaataattgatatgtgcacctaaatattccattttatttttggtttggtttcaactaacgactttgtcaaccattttgttagaatgattagtactcaaacaacaccttaatggcatgataaaattctaatcaagggaaggctctagatttgagtagcttatgaaagttggtatgtataaaaccaaacaaaacataactggaaatgagattagatttgagataatcattttagatacttaccgttaaccaaagtggaagaaatcccataactgatggaagcgcggccatgacgatacaagataaagcaagggccacattttgtttaacctgcatcgaaatacatggagtcaataacagtttcgaaagcaaataagaagacgtgttactagagtctagagactagcaaggtaccagtgaagttgtttgcctagatttggctatacagaatggtacgccagaaatattgtcccgtaacaatagcacatcagcaacggctatagcagttgcactagcacgctgggctaggacgattcctatagtggcagcagcaagtgctggggcatcgttaattccttcgccaaccattattaaaccaccccctgtgatgtaaaatccaagcctagagtgttaccaacatggtttttcatcagctataaaaattgggatgtgaagatattttagtgaaatagagtgctgaccagatgacttagccgtatctcttgaaatttccttcacatgactaagcttgtcttctggctttaggctgcaataaacttcactgatgcccacagcatttgcaactctccatgcacttgatttgtggtcaccagttaacatcatcacacgaagctttccttgctcttgtagttctgttataacgtctacaactccaggccgaggtctatcttcaaggtgaattagagtgacctgtatacccatgaagaacttcaatttagaaatgtacttcaaatcataagattctaccagaaggaaactgcttctttctaacttgtagtttaggtaatgataatgataagaactaagcattggtattgcagattatgaacgagactgaaatagcattgttgtttgaaacctcaccttttcattgactgaaagtgcagcacgaacaaattcgcttccatacgatgatgcactcacagcgtccttgatctttattgaatcaccttcagatttacaacgtgatgtaataaagtctacagagccaagtgatgctttcaacaatttacaatctcccctttctggctgtaataacttgaaacgaatgtaaagcacttgatgaataaaaataaataaaaccatataaagtgaaacaatcatcatcataataataaatagagtagagtcaaatagataaatgttggcacatctatcaattatactcttatattggatgattgatatgtgttcattgccatatatatttagaccagaaaaatggcacaagtgtcactattttgaaaaaccaacaagaatttgtgtgaatctttatagacttacctcaaggctattaagtgtagcaatgagacctcttccaggaaagtactcaaagctctcaaccgagaccgaaggaaggtctttcccaacactatggtctaccacagctctgaaaataaaagataaaaaaaccaccgttacattatatgcctgcgtgttttcttgctaatgactattataaaatcattaaaggacagaaactactatttctgttcatcttgggtttgacatttttgctgtcaaacatattcttgtgcaagaaatcaaaacaaggatatctcgttatatgctttaattgagtctttgtggattctgggtaagattttgtatatgaagatcttgctcatttagttttctcaaccaatgcaaacccaaaccagcagcgttacagtcaatacgagtagataatgtaaagattgcagacccaaataactagcataaaaagtaaattatatggtctagtgatgctaccttccgataggatgagtggtacccttctccatggcagctgcgactgcaagagcttctttctcacaattcgggatacagcagtttgtaaaatttgagttactgtttccagcctgatgtccataaattggttcgattgctttgaatgctagtttccctgttgtcaacgtcccggttttgtcaaatgcaacggtgtgacacgatgatagagcatctagcacatgtccgcctttcaataatatcccctatgaaaaagaattaaaaacttgtgattcaaaaaatcaagcaaagttcagatattctagactccagccaaaacataccttctttgcacaggaactaattgcagtagcatatgccaacggagctacagctaaagcacacggtgatgctgccaccatgagacccaatgctctatacaccgatcctctacaagctaaattgaataaccaatgtcaaacaaacagaagatgaaaatttccctgaaagtgcaaattaagaaggaaaaaaaaagagcaacatgataggaattcacaagttcttgaaagccaagaactaagaaacaagataagaaagaaaacagatcaagtatttgaatatttcctattctatcttgacaacttctagttggaaaacaaactcaagaagcaattttttattaagcaacaagaagcaattattattttaaattagcaaaaagtagaaatgttatgaattaaagaaaaacaagttttttgagaatgaaaaaaaaaaatcttaaagctgaacataaaaaccaacaaataaatggaccattttcattgtaaaagtacgactttcataaaatttaaaatcccgtaacggggcatgtaaagagaatgtaatagatattattagagttcatgagggaaccatagaaactaacactacctgatgttccaaagaacggccacttgaagagaaatggaccaatgagagcaatagctacagacaagactacaacaaccttgctgtattgctcaccgaattggtcaagccacctttgaagctttggtttatttaagcgtgcttcttcagtcaattgcactatcttgttgagtgttgaatcattccatgtttttgtagcctgaataatgaacaattttaacagaatgaaaaacaacagaaggatatttatgaaaagtatcaccacctcatttctttcagcaccaaagcaccttctttataaacaaacagacgactagcaccataatctttataaatttaataaatagccaagttctcctatcaaacatcatgcttctaaacaatcatccattttcgcaaggtattggcaaatcagtaagtttcttaaattgtggaactaaagattatagagcaaggcattgtataatgaaaaaacaatcagtttaaactatgttttacaggtccaattatcagaagaaaaaaaacagacacgtacaaattggccttcaattatcataaacatacctttacaattatcctaccatccaaatttctagctccaccaggaatcctgtcaccaactttaatctctaaaggtttgacttcaccagtcaagtgttcgatagtaatggttgcattgccttgaaaaacttcacaatctacaggcacagactaatcaaaataccagcttttattaaagatgcatacgttccaagtatcaattatagtgttgataaattaaattttcatataaggtctccgttatatactaattcacaactttaaaaaaaaatgctttgcaacttgcagggaaaataaatgattaaattacatgaaatgaaaagaacataaaaaaagctagatcatattgttaaatgaattcagaaagctacaaatatgtgtgtgcgcgcgcgcgcatgtgcgtgtgttttctttctttttcaatgacattatgtaaaaatcacaatattgatatgtaaactcttgacatttattacaacagaggactaatgttttcagatcatgaatcataatatgatagtctgtcacatccgtaactttctcagccttgaagttgtttcagaccatcatttatgcagcaaaaagccatcactatggtagtccaggcatattgatagatttctagtgttgagagacagtaatgctcgtcatgaactcatgttaatgtcaaaagtttcaaaacagaacatgcagtgcagctaattaatcaacagataaactttcactggttcagagaataagtcccaagaaaaaacaatcacttctattttatactagtttcacctcagaatttgaccattatagcttactattccaacaaacaaaactgacatgaataaaattagcatcacatacctcaccagctccaaccaaaacataggatcccacttctacattatgtacaggaacccttttgtaggccaaatcggctgtgttaggaagtctatcttcagtcatatcaagcaccagagcaaattcgggatgattttccttcaactctttaacatcgatcattgaacggctagtgaagtactcttcagctgtagtcatcccatgagttatataatcaaattttcaatccaaagcaaaaaaaagctttactaaaatgtgattgtgcaggggttaccaatatgagccaaattaaacattgcaagaagtaaccctccttctaaggcattccccataaatactgaagcaaaggccgctagagccattaatacatggatgttaacttttccaccgctaaggtcgataagagcatcaagtgctgcagagacctacatcaaaagttgagcatatcttaatcaattggtactataattttagaaaccaggaaaagaatcaaactcatagtgtttgattatatatcgaccattaaaaattcgccccaaattattgaaattgttgaatttaaggatttttgttcaattccgttcaattttactaatagaggcataacatgacaattgtctgtgtaccaaaaagtatcttccaaattttgatatgtaccgaatagtggctcccgaactttcgtcaacatacagccccgttagtaaaattgaatggaaattcttgaatctaaccaacttaacggtctaaaaagtttaggatacacaatttgggtatatatcaaatttcagtggaggaggctagaagtcctaattagccataattatataaatgcatagtgttttgcacttcaaactacaattgtttttacaaagacagattatctcaaaaatcaaatatactgaacttagtaagcattctgctgtatgaaaaccccagatgatatagcaaattaccacagcttaaatttccatttataacaacattccaatagattaataacagtcaaacgaaaaattacagttgatataaacgttacagatgatacaattatgcaagaccaaataaaaaaatttgtgaactttcaataatatgttagtcaattcaagcatgttatgagttgaactacaaaatcttgctactcaaaattaaaatttttaccccaacgagaggaaaagcaacgagaatgaaagcattctgcaaaggcttcacaaccgtcttgggaagcaagtgaggacacacagcagctgcaagaagcaaaccagtagaaccgcaacacatatacaagtgttccctcaagaaattagccaggtcagtccatttcacagccttagcgaatctaataaccgctttctgagcttccgtcagctcagaactaccaccgccgcaatcgccgcaatggtggtgatgatgatggttaaggtcatgatcacgatcttcctcgtgatgatggtgatccgcggcaacgacagagcaacgaagattagaaaaattgagcttagaagaaggaaaattcttgaatcgtatagaggaaaaacacagtgcttgtcggaatacgataggtttggacgagttgacccggtttctccctttacgactcagtaatagggagttgttgttgttgtagtacttgccaacgccgatcgagtacggaagagtttccatagtgttgtgttagggtttttgaagaattcacatcgaattcatcttcttcgattagctgagatactacaaatccatgagcttgaagattgagctccaagaatcgttagctatggagtttttctcttctctcctttttttttttttaatttattttttatttattaaataataatttcaattatttatttatttatt

SEQ ID NO: 295109 - DNA, 5107 bp, Cannabis indica
tcttaatatatacaatagtaaatagtaataaaatacgaagaaagtaaatattatttatttaatgaaatatttagtgtaaattattggtagttgttgtaaacaaaaataaaaattctactctaaattggtgtacactaaagttgggaatggtctagtaattttagtgtttttttttttttttttattaagattctagttctcattctttacaatcaatatttccagatcaattcacagcaaatatatatatttcgaaatagatacgtgtgaaattgtttaatgataagtagaatacaagtttagatattggtaaccaattagttagtaaaaagaataacaatagaatcttcttttacgactttaaaggttaatagcagtgttataggctgtaagagtaattgatacaagtaaatctatatttactagagacgcataggaaattgtcagaagaaaaaacaaaaaagctgcaaaaaacaacgtcccttggcttctgaccagcccggacgccaactcaatatcttatttttcttttctttttcactgtgatgatgttgtattgttttcacctgcaacccagtacttcttcacagcaaccaatatcttctcggaaacaagtggaccatcctcgtgatccaccattttcgtattccacctcattcctcttacgattttcctcaccttgaataaaacatcctcttggtcacggaatattaccgccccttcaggccgcaggattcgatccatttctaaaagtatatcagtcggatcacacctacattgttgcaccttttatgtcagcaaaaaaagatgtagtagctttggcaaatggctgatgacattcgtatacaagatacatatatctaatatattgagaaatgtaatcaattatgaacaatgacagatgcaaagcaatatcgtctagctagtccccactaaatggtgctatctcaatctcaaatctgtggtaaatgagcactcagaaaagttgattatccaaagaaaaaaatttaggttcaaatttcatagctgaacttgaaatgaatgattatttaaaatatcagaataataagacttacttgctcttgtataagctgaaaacaccatttgcatgaataaggtcatatgtccttggatatgtggaaaaggcttcacacctagtggaaaataatgtattctgttctgagaatatcatcttttatatattaaaggagcaaaatttacggatacaaacatcagcacgtgatgactaaacggtattttatgcttcttctagacattattaaaaagaagcaagcagatttcacatatgtaattttgcaagaagatctctcactaagcaatctaaaatcagccacaggcaaaacatggggcaacttcgaaataataaatttaataagctgagatcaccctatatcaggatagtggaatccaagatcagcaaaacaagcagattttttcacaggtacacgcattttctcttagcaacaaagaaatatgtgttacggttaccctctactagcatgcataattagtttaatataaactttttgagtgtaatagtaaaggattttcttttcctttcgtttttgagaggagggtcatgaagagtttggataaatatctagcatgactaaactaatcaaaattctcattcctggaaaaatatgaaaatcaatccaagctgaaaatatgttgttccagaaattaccagtcatggtatatgccaatcaatccacgctcataaataacgccaagagtatctttctcagctattgtaggcatgacattcatgacccacagtttaggagaatctaaagcggcagcaaaacttcccagatcagcattcatgtccatgatattgcgatatctgccagaatctataagcttgttgattctcttataagcactaacatgtttcttccacaatcggatgtccttctggtatgtctcagcagatactccaggtactgatccactggatattctgaatggtatggccttaagtctctcaggatatggttgccattccccaccagcaaccttatccaattcacttaactcaggataaggtgttatgcatgcctccatcttcttgttcctgcaataagactaaacaataagtgcttgatagcaagaacaaaagctgcaacaatgtttattttttatcataaattatttaacctgtgcacataaacaggttcaatttcaacagttagcataccaaacactatcatctttagtggtttcacacataatagcttgagtagcttgattccggcaactgtcattgttttttcttttcctccatattgcaatttcaccactctcgtgtttttttttcccagcatagaagcttggcatactcttcaatctttctctgttcctcttcaagctcttgtgcaggtcttttcctacgatttaaaacttttactccagttgatgggaggaccagacagaacccaataaccaccaggtctaagaactctgtctacttccatcatgtacatcccacctatagatagactttcaaatggtgatattgtgcatgattaccttataatactacaaagtaagaactgcactcaattcttaaaagcctaagaaaaatagacaaacttaacataaaagtgtccattgtcctcaccatttcgcaccccactggaatcaagcaccgagaacagtgggccatgtcaaaggcgtttgaaggatatggcaactttatagttcccaggacaccaaatcactgctggcacacctctttccagtgcaaactgtacttgtgcttcatgagagtctcttggtgcaaatgacatggaaataacgtcctttttagcaggtatcgcaccccaacttgcaacctgtacagcttcccaaaatcaataaaaaccactaaacatatgtatgtgtgtgtgtgtgtgtgtgtatatatacatgaattactaaataaagttattaaacagaaggacaatgcaaaaatatggcaactagtaaaaccaaactcaaaaacacattctaaacaaaactttaagccatattctacatccaatacttggcatatgaaagaaacataagaacagtatgtagacttttaacttaccccacagccagtatccaatgcagttctcaccatgccactgtccaatgggactacagttgcaagttcactgatataggcatctgctccctcgggaaactgcgtacctccaccagggaacttaaacacatttccctcaaattgaatccagttctgaacagctttctcaacagtcaagcttttataaggtgcattagcaaaaggcacataatcacgactttttggccaaggaaatggtgtcacatatccaacaggtgctggaacaagacaatgcagtttctcttctgcaggtgggcaatgcctttccctgtaagtcatattttctcgtggaaacttcatggctcgattttgatcatgacaaggagtatagtcgatgtactcatcgccacacggcttgaactcactgatttctttagaatcatccatcccaataccattaccatgatgagtctcatagttgagattcgaaagaatgctgcaatctgtttgtctattaaccaaatcagcaattctatctccctttccgaaaccacttcgctgccaggcacccaatatgtagaagaagcaacacacaccagctataatgaaaagcgacatgggacttctgcttttattttctcctaagttcccttttttcgccatgattcacctgatttttttagttttcgcagacaaattatagtttaaacaaaattattaatctcatgctatttttttttcttttccatattcatatattctctaaactaatcaagtcaacacaaaagcaattctaccctttgattgagtagtaatcaaatgtaaactcccacaattaaaagcctttgtttttgtttaagattgtaataggaagagaaagtttaatttttcaatacattacatacaagatagaaaatgtcaattcaaaaagatttgggtcaaatgtagagctttagattcccagatatcataatatgctagaattgaattattattacaaatatttcctttcaaaatgaattattacacagattttaaaatttcaaattaaaatggtttcgaaaaatataaaaagagacaataatttgcatgattaaatgttaaacatttgaaaaaggttattttataaaatataagggaaaaaataatataacaaaaatgaacgattgaagattatcattatacaaaattccatgaaactctcagctaagcccaaaaaatataaccattcaatactttcaaaaagaaaatatatacataaccatttaaatctgggaatcccacatttccccccaaaaacatatatatccgtacagtttgaagattctatttatttatctaggaagaaataaacaaaaatcagaaactacgaaaagaataagattacagatctgaaagattaaattaatcaccacaagaaaaaataaatagaataaaaaagaaattacgaaccttcggaatgatagaccgcaaatgaagaatcgtgtatggaagaaccaagaattagaaaataaaaaactcaatgtatattcttcatcatcattgaaagaaaaagaggtggggctatcataaaattatcattttaattttgaactgatgtgattgaagttattgtaagaataaaacaaatatgggttacgaagaaaacttaagaaaaatgatgaattggcataagagggtgatgttaacaataataatgatgatgatgttgtaattagtgatattattgggtgtagattttgttgaataaataacaataaagatgtcaaaacacggtacggagagtccgagaaaacagagacctcttcatcgtccatgtctctccttaatctcttttttttttttccctggaactctcgcttggttcaactctttttagttttttttgtttttttaattatcatttttttttcgacactatatacctcctaaaatacaagggttattaaaaattgggaaaaaaaacataaaaaatacaaaaaaagaaaaaaattacaaaaaatactatgggccggcccattaaacatttataca

SEQ ID NO: 295110 - DNA, 6294 bp, Cannabis indica
tgcctttactaatccaaattactaaagcggtcattacagagccgatccgacttacatttagtttgcttattgcaatgcctcactattctccttcagcgacatatggtttctcgttaatacactaagtgtcagttcgtacattgattcctcgcttaagaccttacagtcagcgggttacaaatatactctgatacttacgcaattaatgagttattccataaaaagatattgtaccgattcacattccctttaccttgacacgtgtcctccagccgaattttgagtataacaacaagtatatagagtcaacgagttgcaagctcttaaaactactgcacaagatattgtcatcataaatttaaatactcataaatttaagttggtatttgtatttattgaacacggcagaacaacataactatgtgatgtttagtagttagttttgtatttaagacttagtgtaagaaaatatttattcattggtgcttgacttacaagaagctttatttatacaacttttaaaaggttttctcacaattaatcagtattactagtggcaccagtcttatccgataatatctctttttagctttgcttgcagagaaatcttaatttttcaaagcattttcaaggcatataatgtaactggtattctctatctttattttttcatgtattatttaactcaacagtatgaagacacaatttccaccgttttcatttgatgttttgggttattgagatgtttttattttctagtactgttaagatataatatgatatacaatggttaaatttatttcttagttgtagaaactctaggattgctttacacaaatcagtacttggatagagttactgcacaagttattgtcaccataaatttatgtacatgtagctctcccatgagcagcatttaacacatggttgaacaaaaacaaataaaagaaagcctagcatggtgacttgtaaatatatcaactgtttttaaatattaacgcgtctctatcttagagctcacctttagaattgatttcaaaggctttgactcatcgtcttctccattctcaaacgagttaaacttatcaaatgatctgcttctcttccttttcttcataattttgtgtatctcctcgactctgtcattgatactgaccattttcttgggagccttcttttgttgtaatgctgcttttccttcttctgttatctcatccacaacacccgacttgaactcattcttcagctctttgtcaactttagtgccttgaatcgatgagagtttcttgtccgagtcttctgtattgttgttttctaacataagcctggcccttgaagttctacttttacctgaagttccttcaattatttggtcacttttaataccaaatttatcacaggtagcagcatcaaatggtgactgatggcccaaagtgacccttttaatggcttgtaaaactagactattcatcatgaagttgaaaattctgttgcatatgccatgaggttgggtttccttttcatccattttttgtgttctttttcgtaaaataatcatacggcatgttattcaaatgaaaattgaatgaatcaagataactttggataaatttggagcttacttggataccactcttaataaagaagtaaattgaaacttgtaaggaacttctttctttctttgcaaaataaagatagcaaaaaaactaataaaggttcgtgagtcattgcttgatggaatgtagaatgaatcgcttggaggaatgggtacccaaaaaagttgttttttgaatgagaaatctgagtgaccaatagatgacataaaagaaagaagcatgaatgggagttcaacattctgcctcaggatagtttatgctgtccttagtagcccccataaatgttatatttctcattggagtaaaaaaataaaaaaataaatatcaaataatataactaagtgaatgaatcataagaaagtttattattatctgcagcttacaaaattgggtacaaaactttatttgtcatcagcatgtcagaatagtttgcttagagcgatatccgaccgcaaagacgccaataagaacccggatgaaagagggatttctcaaatacccagatatctttaaccagaacctatggagattgataagaatcagtagtgagcacagaaggaacttagaattgaagtatcataaattttattatctgttggaaccaaactaaggatatctattgaggaggatattgttacaaatgagagtaaagcttagtcatgtataagaggatggcggaaattaacgaattatacctccttagatttatctccagaaactacattaccatttgaatcataagcttcaaacttctgtaaaaaaaaatgttgcagagttctcatgaactgaatttactaaaatataaaagcataacacaaagaatgaaacaatccaaccccagccagtttacctgctttgataaaaactcgagtgtaagctgtataaacaccttattggtgtcatttcgatcaacgccaatctataaaacaataataataaaacaaagttgaataaataaataaaagataagcataaaggctttaattaattttaagaaagttacacttcattcttttgtcctcttttgcataatatcctacaatgaaccaaccaagaacatgatagatagcagtaaccagactcgatgagaaactgatgtatcccaacttcactaatactaactggatagtcacaatgtattgaatgattttatttccctttattactatataggagaaaaatagctagcttttgataaatgataatagcaacaaacaatttattaaaaccattaaaacaagcagaaacacctccaatcctattcactcaccactcttaatctacagtgtaaacaggaaattaggactctctccaaccactacaattacaaattcttttctaatttttgaccatcaatataaaaaaatggcatggtatatatatacatattatttatttatttataagtgattttttctttaaatgcaaaagaaaaacttgccagtcgagctcgaagagttcggattttgacaataggttggatcagttcccagtagacctcgttccatatggattctctttgtttaatctcattcttcagtgtctgaaaagacggagaagtatgtctcagaaaaaggtgaagttaaaattacagaagtcattagtgtgctgattactgaaagaaatgaccacggtaaatgagataaacatcctaattttgaatggcagacactatattgaaagaaaaaaagaaaggagaaaagcatactgagtacatcctctctgtaactgcctttctaagtgcatttttgtctccatttgatattagagtattgatctggaaaattgtagataaaacaatataaagccattagctaaaaactcaacaaaactaaaaagagtcaaattaaaggaaagctaaaaaggtaataatcttgtattacatcatcaacaatatttagaggccaacctcttacctaacaaacagcaatcctcatgtcaaaataatcatctcggcagtgaaattccagttcacaagattatgtttcttattatgatggatggtaggtgaaattgatttagagctaaatttaatttataaatcagaatatagttcattggcttcaagaaagtcctcatctatattatgcaattccattagtcatgttatggtccaaatatcagtacatgcaagttacaagtaagagaattataaacttcctgattagaaatagaaatgtttacaaaacttaataagactacacatttactaacgctaggtcaacctaagcatacacataacatacaaaacataacaaggcaaaggaaatataatgatagcaataatccaaacctctctgtataattctaccgcttctttgtagaatttctgcttcgagtatccagtttttcttaatttggcaatggcatatgcatttttcagctgaaaaatgaaaaacaggaacatcttatgtataaggacttcaagccgaatcaaagttggattttaacttatatgatcttcagtccacatgacacgttactaacgaatcccatacttggtcatatgggatcctaacgaatactttaataaacatcttaaaaagggtgcaggcattggaccaagcaaaaaggactaaaaagaataattagaaaatagaacaataatcttttatgtatgtataacacatatatacatgaactgtgaaaaaacatggctgtttgagtggcaagaaaaccccacaagaggaaaggaagaaggaaagtgaatatgccaacaacaataacgcccaaaaaacaattcaaaacagtttctacaatgctctaaaataacatcacctctaaaatcatatcatctttcgttcttttccaaccaggtcttgtaaaccatctgaacagaaaacatcaagagatcagataagagggctctattaggaaatgcagttgttatataagtaggaatgacgagctatctatagtatgatatacgccagatctatttttgcatagtagaaaatcaaaacataaatgaattcaatgaaattttaatagtacaatcacatctccaaaataatacaatttatttttcttaaaaaaattaacatcaaagaactaagcacttttgcctccacttaccttgttataaccacaactatactgaaacgaagatcaataaaaaagcattatccccaaaagggccaaaaccactctaactcacttaaaagataactaacctccgccaaaaagagattgcttcacgaggaccatatggctcataaacaaacccaggactgaacatggctactttaagtccctgcaaagataacagcatatgcatgtatgatgcaattgttactgtaaaatattccagactgcatacatattcacaaagtgaaaatcccaaaccacacttgtgcgtggatttttctttcacaaatgggatccgtagtgaatgattgattaaatttattcaaataaacaaaaaaaaaaaaaaattaagcaggataagattaagcagaagtgttccacgattaaaaattaggtatagacatcacaccgattttcgtccttgtgtaggagcagtttttgcttgcgttgctaccaacctagtgtcgttccaaaaaaatgctaactcagcagcctaaaacaaaaccaaaaacgatgctaaatattttgcagcactgaaacataaattaataaagattcgaaggcagttcaacatcaatatccaattaattgtataaatttcttattttccaaactaaccattgtggatcgaagtgtcattgcgcttcgatatgtccatggaagtgcattctggcccttgaatgaggatgaagacaaatttctgcaattaatttccgcgacgatttctgcagtaaacaattactttttttttcttaattgatatcaacccatgaatacatacaaaaatgagaagatacttcattaatggtctcagatagataagtaccatttgaaagaatacttgaatagcttgttgagcttccaagcctaacaattcaagcaaaaccacttcacaaacattaattccatatgttaagagaagcaaattacaacttaaattaaagttttatcataaaatcgttcctgagtggatgcccagacaaataagatgaatataaaaataagattcttttgagtttataattttacgagaaactaattaaattgattaaacaaaattatatatgtatataagctactcgaactgaaattctcgtactggttcttacatttgattttaggattagaaattatactcacatatatgaggattcccgaatcaatgccgaccgatacaaagtacgaaccgtctgtgagcttcgaaaagccatctctgatcacaaatcttcaaaaccaaaacttggtttattaacagtaacagatcaatgattgatgaagatggcgaagaggtttttgtttgaagggtttaaggaagaagcatcgtgtgacaaaaatgggcctcttacttagtgggcttcatccaagagttggcccaaatttaactttacaggccttgggctctgtatttttcaaactttaattgggagttttataaagggataattaaaggggaaatttacagaaatactgaaatttgggttaatttttacaaaaatattgtcatacggaaaagttgtcaaatatactgtgtttttataaaacactagtaaaacacaaaacagaacaacttaaaacaacagtagaacaacta

SEQ ID NO: 295111 - DNA, 2429 bp, Cannabis indica
aaaactaaaatattaaataaaactaacactacgtggcttggcacgtaacaatcacctagtatatatgaaaaaattgtatacttattgttcatgcttaaattttgattcactttttctgatttgtgtatataagcatggaatacaaggggtttgtttaacactaatcaaatctgtctactttagtttgatcaagtaaataaattaaatttttttcttctttacaaaaaaaatcatcaaatgaatacacaagatttttgttaaaataaaaataagacttgctttcagtattaatctgtagcatcaacaagcttcaactttgaaatatttcatttatttgtatccctcattgatgatcaaaagtgacattgaaatatgttgttatgtagacttaagttttggttatgtaaatttttgtttctatgtatatattccaatttcatcctgctaaattttctagaatattcaactaatcttctgtaattgagtatcaaaatctactatcattattttcctcttgataatttcgttttatgaatgtgatgaatttgagtgacttactttttcttttgagattatagattctatgtattaataacattcaatactttgtctttaaggtagtgttttagttttatgagttctgaaagttctagtaatttcgaaagctaagtaaatgatttaagtatgaatttagataaattaaagctagaaagataattaaatcaatgaacatcaaatttataaacgtcttttgtattggaaacacattctaatcgagtagtgtttgggtctccaagaatcgggtaaagtaacatctactataaaatcatttcaattacattgaccagttctgatttacaaatccaacaacataatctaaaatgattttacacaagatttacctaactcttgaatacaatcaagaacacgatctaatcacacttagatcgaagaagacaagctccacttgcttccgccaagctaaaatccctctagcagatcagtctgaactcacttcagacattgcagatctatactctttcttcaacctccgaagatccaatgaactacgatctgccagtcacaatcaaagaaacactagcagagcaagaatcactagaatattctatcaaaaaaaaaaaagagctagttagaaaaagttatatcagcttaatatataccatacttcgataaaatcgactcaagtaactaactcaacagctcaagccaactggcgccaactaaactaattaaaagacatacattaaaaagctgacctagcagatgataaaagtaactagactaagtagatgcgactaagaccaacttagatgaacaactcaataagccaagacagcaactagaacacaatatacttaaactagaacaagcaacataattttccatatagaaaacatggcacttataatctctcccttggtaattatgatcaacgaccaagcaccatatttagaatgagagacacaaaagaacaaatcacataaacaaatgccaacaatccaaaagataacattaagatagtttatcaactgacaacgttaagttcaacagagagaggaaaaaataaccagacaaaagctaaacccaaaatatgaacaatgtttagtgtatatgtacaaaagatgaaacactatatctctccctcgatgatcataattactcactgttggaattggcgacaagagatgcaaagggaacatgcactaaagtagcatcatcattaggaacagagaaaagaacattagtggaatgcttcccctggacaccagcagttgttgaacccttctgaacatttgtatgaccctgcttcccctggacatcaacataatctggctccccctggacagtagcacaaccagaaaggccttcatcaatactagggttgtacatatatttttgtaaactgcccaaatcaaaacgaaaaaaccgacaaaaaattgaaaaatttgacgaaaaaaattgcccaatctatatattgggcgggttgaaaataaagtaacccgcctagttaaactgacttaacccgaaataacctgaataacacttattaattttcaatttgatattttttaaaatattagcaagttatcctattaaaaaaaatggcaggtttatattaaaaaaaaaatggcaggtttttattaaaagtaaaaaataaaaaaaaaaaaaaaaagacagtttatgatcaaaataaacttgaaaaataataaccctcacattcctggcatggttcatggctgacataccaaatttgtacaccccaaatatgttccaatccttaacaaaactcaatttgtcacactctgagtctgagactttttttttttggaaatgtgccttagtaacttcagttcagttatatatttgctaaataattggtcaatatagaccaagtccttaggaatatg

SEQ ID NO: 295112 - DNA, 3669 bp, Cannabis indica
ctcaagatgatggctatttttttacaatcttgaaccgtatcaaagtggacatggtcactatctgtataggtgcggatcggataggatcacttgcccgcaagagatatggttctgataccatgttgagaatcatgggattttatctcaaaactaattggtgatgagtagagtaacccatgttcttacatatggctcaatatttttattgatctatataggacaatattgtccaagtaagttcttagtatatagttttatgactaatataaggattaaactgaggaagaaagaagtcggtgatacactataaagtaattgataagaatccaaaccaagtgatatataatgcatcttggactcaccaaataaagtgacaatttttatccctttttaattaattttttataaatctttatatatacaaatttatatttgtttataatttagtgaggaaaagccaagataaggccacccaatggcctagagggtcgagcttgatgctgaggaatcagcagacatagtcaaagaagataacattatatatcctaacaaacacaaacacatagtactaaatattgtgtttatttagaaatttatttgtgtactttataatataaaaaaaataatgtgttgaaattagaaggttcaaaattttgcaaggcatggtcggtgctgtcttcttcttcttatgatcttcttctttagtctttatatatgtatatatctctttcattagtattcgcccataaacaaaagtagagatttttgaattatatcaaccaaaaagtacaacaatgagattccaaatccaaagattagctatactcttggttctcttcttttgcatggcttttcttgtgcatgggaaagtggacccaactagtaataataatagtactactgtggcttctgaaaactctctcaatgtggtgagttggtttccctctcttttctttgtatgtatatgtgtagtgtacattataaatgtatatgtatgtgttttgacaatcgatacgtatataaatacaaatgcagggtagagcagagtgtgggaaggaacaaaatgttgagtgcaaaaaaaggtcagatcaagaagatgatgtgtttgaggatgaagattacatctacaccaactcactcccttaaattagattttgcttgtaatattgtacaaatttggtacctacttttgttaaaatgtgtattagattaagtcttttcctactaagttaggcaccagcaaatcttctttagtattgtactaattaataatatgaagacagtcgaattcaagtagtgatacctttcatttgctatacaagcaagccaacattctgcaaacttcaattggtcatttttttactaatttaataaattttgtaagtaaaatatatatgttggatcaagtaaaagatccattatagtaggtatacttgagtttaaagtcaaaagattaaaaatcatatcgcaagttatatacctgaacagctagcctgtgtgtaataaaaactaacagtagtccagttcattaaaaatgattttagtcatgagatttgttcacctttcaaagccaaatagtttaaattaattatttgcataagtttattttcacaacaaaatgcatattatgtctaacttgatcatcttgaagttaatgttgctctaaagttgaccaaagcgtgtaaactaatatcgaattgagaaaaatataaaatattataagctgctgcacagataaggttctaagttctatttatataatatataataattgaaaaaataaataaataagattatatttatgagttgtccgacatgctatatttgaggtatagtgataattaaaaaatgaaacaaataagtatacattattattagtagtagtagtatttgagctggcctatttgaatttgagaatgaccatgtcaatatgagttactgtatccttgaagggttcataaaatagtaatgtgagtgaggaagaagagaagagaagatcatatcttgacagtctgtcgaatctcttaattaaatgtttgggagccaatattcttgaggatgacaccattaagagcctttgaactaattcttatattctctctattatctacttgcattgtttaatcatactactattattatttttaattcttttgctgaaaaagtaatattaataaaattgattttggtgctttacatgtgtccttgtaatgttatatgaatacagcatattagtttaatagggaaaagtatctatttttattgtacaaaacaaaagcaataaaattaatttgtgaaagatataattgctatatctttgctagctgtcagttttcattaatgaatttcgtgtatacgcttttaccacattactgtattaaaattagaataatattgagacacacccagattggagacactttttgagctagttgtgctgttgaaaaaaataagtgtagttgtactgtgagaaaaaataattgtaggagaactgtgaaaaaaaaaattaactaagtatttagtaaattataaattataaaatgacgtgagttgttaaaattttattataataataatattatattttaatttattataatcacaaatatataaaaagttatattaaatatgtaataggaacatgtagtgtattttttttttttttttgaatggagtaatgtctattaatatgcctagctttttttgttccacgagcggcttttatttatttttatatttttcattaccttttaccttatattttttatttttattttggagaattggataaaaatactttagtgatgaatttgctccaaatctacaaaggattcccacttttaaagaattgaaaatgaagaggaaaagtacaagttaagtatgaagccaaattatagttgtcaatttcagcaaaaggcactaccagctgaccctccataaaatattaatgacaaaaaactgataaattggcagcatctatcaattacatttatggaagatcattgtcttataagctaacgttaataaaattaaattggcctcacaagaaaaaaaaaaagaatatcagataatgtttgaatggtaatgtgacaccattgaaaatgctctaatattttcatagtacaacttaaaatatcaattgtatttttttttttagaaaataggtcttttcaatcctaataaaattgtgtaactgataatgcaattagtatttagggcattagctattaaaaaatattagggtaaatttgaaaattcatagtgtaattagagataattacactatttgacatattttgtgtgaccatttaataaaatagaggtaattgaggaatttcaactacactctctaatttttttagccccataaaaattgagtttaattaaggaattatttcataaatatataaaaataacaaatgttttacatttttacggattttactttatttttttttacaaaaatgtagagtgttatttttattgttttcaaaacaacattattttgacgttgtgttgcttttgaggaatttacacaaaatattaattttttctaaactttaaatttatgttgtgacttggaatttttttacatttatactatcctacttaaattttttttctttttttctgttttttatttattaaagtttttataaagattttttt

SEQ ID NO: 295113 - DNA, 3632 bp, Cannabis indica
gttcttcttatatgtaagcttttcacattggaaaatgatacctaaaggggacacacaaacattcgttctcaacacatgcttccatctttctagcggcagcagagatttcaaggtcaaaagtttcagatacacctcaaacaagccgttccttttaagttaacaggcagtagatagctttggtatagtaggcaactattaccagcatgtcatgatgaacaaaaaaagaagaaaaggtcaatctaagcagttccatatatgatgaataataacaatgaagtgaaattctcagcagtggtacatataatcactcaacgtaaacagtgaagtgatacaattaaggaaagttcgacggattataatgtgttattgatactggaattcaaattgattatcagattttagaaatacatacagagcaacactctaaagtgatttcacctttgaacaagttacgtaacagtattccctgcaaaactttctcaggttcctctttcactggctgtcagtcgcgccaagagctaaaaggtaataccagttcagcttcagccaatgtcaacgataaacatacaacgacacaaccaaacacgggtctttaattgaaacatttttccatatgtagctgcaattaactaatccctgaccgagctggtctgcagtgagcagataagagacattttaagctcaatgcaaagggcatcatcgtgttgcaagggccagaggtttccccaactgggtttcatccggtcctcctggcaatgacgagagaactaggtgcataggtgcacctcccacaactcaggacatatgaaccagaacagacttccaagcatagctctggaggaaaactctttggagatgtttcattcctcaagagcatgcatacaaatcttttccagcagcaatggccaatcttcaccaagttgatgtggattcaactccatggcaaccttaaaatcaagcaacgatattgagcactgtggtcttggatcctgcatagcttccaagggtgtgttgctgctgttcatatgcaagtgattactagtccacaagccattaataagtttgctttgaaactgctgcttctgggcagggtgctttcttagttcctgcgcagtagaccttgacccaaccaactcaacacaagatctgattaatcgcttcaagtaaacatccaacatattgttcagcaaactagcacattcaacagaaacaccttctagaccttgtgctgcagcgatatgctccattcgttttctcagtgaatccgtatcagacaacccaccactgtcgtaatagctggaggcttctccaccgttaacaactggtgtggttttgcgggccccacctacaccggctgagcaaaatggaatcccaagaggtgcaattaaaggacttctagaaaagcttaagcagttagacagttccacctcctccccatcatctataacagctcctctggcccgatctatccttggttttttctgtaggccgcacagccactgcttccctttcaatctcaggcagctcagcaactggttgaagatgttgcactggtctctggtagtcacatggagtcacatccccattctccatcccaaccttactgccactatcttctgcaccatttgaagcatgcaagacactatctaccttcccatttggtccaagaggacttggtctatccttgagcttacgatcacgtatcccagaccttccctttcgaggtgacatgggcaaaactccatttgaccaaatgggtacattttgattttgattcggaaaaacaattccaccatgctcgttcacatcttctctgccaggagaactatttgtagcttgtagcccaagttttgagagacctgatatatgaattggaggtggggtgttggcttggcatgcattctttaagattgactttataaaatgattgtgcaaagtgatattctcattaccaagctctctacagcagaacttatcaaattctttcttgctcagtttctgactcaacagcttattcaagtaatgaaagtacctttttgacctctcaactcctatcctcttcactaactgagctttcaagtcggccaagtcaattcttgaatactgctgaggttgcatttctcaaaaaagaggttcatacaccatccacaaaatcgaaagaaaaagaatccaagttccccaattcaaactaaattgcagttatttctgtttccagacaaccccacgacccggcacatgactcattcgaaatcaactcgaaaagttctgcatatatcaataaacagaggtgcaagtcattcagcaaattaaatatcccccaaaaccctaatttctgactggatagcagtcagtcttgaatcagaaagacccccaattcttccatccaacaaaacatacaatgcaaccccaaatctcatcttctaggaaccaaaaccctagagatcaagcccagtagcgaaattcactaaatcccaccaataaaacacataagcgaagcttaaattcacgaaaatcataacaaatcaaaaccacaagtttaaaatcaccatactttggggccagaacaagacgctcttcgcgaaaaagacgaactgcaaaaaattacacaccaccgcgccaattaaaacccgcctatatattcgaacaattcaaaagctcagaacttcaaaacacaataattcaaatttgagggaatgagatctacatgttcaatagatttaagttaataaaggaaaaagtaggaattgcagaagaaaaacaaaatagcctccagtgaagcgccaaagtaaaaaattataaaaaagaaactaactttagagagggaaagaaatagggttataggattgattgaagtctgacctcaacaaagtaaaggaatttcagataaatcgaacaccacccaatcagtaacccagtcggtttggctttcagagcttcgccccctggcttttctatttttcttctttgctgggtctctctctccttgttcttcttcagaagtgtttctctctctaaagagtattgaattgggactgcatttttgtgatgaaagtttctgtaggtttgctgataaaatgaagctctctctctctgctctcgctgaagcttcgatcgctgctataactcttttctctctcttcgtatacctctatcaaggtcttttctttcctttattttttattttttattatctaatttaatttatttatttatttatacttatcaaagtgagaaacatgagtttagtaagttttagtcactttctatctattatctatgtgtttcgttatttgagattaaatatggtttttgtccttactatgacagtaaaataatatctgaatatgtgtaaaaataatttctatttttattttaaaaaagtaactcttattaattatatatatgtaattaattgttttttttttcaataaaatattaattatttataaaaaatttacatgaaaaatataaaataatatttttattatacttttacccacacatgacttggacaatatttttatttttattatttggataaatagtggcataagtacccaaaattttatgtttgtaagcggtataaacccactgtttatttttagcggcataagtacccaatgtttgcaaaa

SEQ ID NO: 295114 - DNA, 2618 bp, Cannabis indica
tataaacaggggatccccgtattatgatagtattttgtattaaagtcttattttaatttaatctaaggttttaattaaaccacacttttcctaaattaatagattagtaataataagtttgtaaaaccacacacgtggcgtccctgagagtcagggcgttacagtcctatttgtacaattttagaaaatacagggtctattttgtcatttaacaaaatagaagatccaattggtaacttttgcaaaatacagggtccaaaatggtatttaccctcataaaaatcataaattgttgtgactaaatgtgttcttagtcacaatatttgaatgaaattgaacaaaagtcttcaaatctaacaatcttaataatttagaaggaatttttaacaaccataaaaatttagaggcataatttagtaaatatcaaaattaagaaagaaattttaacaatcataaaaatttaggggcataatttaataaatatcaaaattcaaggagcaagctcggtggacgttttttcactagaggtttggttgtatttcgtattcctctatccctaaattattttgtaacaatcacgtggtctagctgtttctatttatatgaatgcttttcttcaaaattcaatgatcaaaaaatctaaattaactgttttttggggaaacattattgtcgtaggttggataattggtgcattggacccccctacgatcagtgctagtctagtactgtttggtcatactcacagatgcctttgattttttacttttgacgactgtcaaaacagctacgttgcttttctcttaatgtaacctcacctctttaatactacatattaattgtgtcattgttattattgcccatatttaaatcagagttaaatttagtgagatctaatttcatggaaggaagatccaactatgttagaaccactattactagtagtacttagctttatagagtactactactactactagtagtatatgaataaagattttatatcttgatcacaatgatatatgatgagtaatctttgttgacaaattctggaatagtgaactttctcgtatggaattttgaggttttgttgttttggtcccaaaaaaaaaaattgaacttgggaaaagagaagccataagggtgtgagaggaaggaagggtttctccttttcttgaattttgttgttgggattgttgagattttaattgttgtcatttaattcatattagctagtttgagagagtatgagagttcagagtcacattattgtttgcttttcatgcaataattaaagtaaatctcatgccacctttcactttccataggtgggaaggccaccgccatgtgattgttgaagccattcataaatattgagtttattatttcaaaacaaataaatacatattcagtttatctctttctatcaattgcatctattttttttttcttaataaatgtatatattttcaaagccactcaaatctatatatgtgtgcatggcgtcaattgtcaaaagaaaaaagtataaatgtatgtgactttggagtgagtgttgttgtgtgttataggtttgactaaatttggtagaatattgaaaagatcggagctaattagtagagagaaggctccttttgcatgcagaggagaataattagattagaattgactagctcattggttggtatgtcgtataaaaatcgtattatattaaataataaataatattatgtacgttcaaatagaatattatactatattaattattataattataaattttaatacaatatgaattgtattattatataatacatgacaaatgaacgatatttacttgtattatttaagggtccaggattaaggacctcaatttcgaactaggactcagaccccagattatgaacctggcttcgacaccagctccggaacactagaccctaacccgaatcagacgttgaccctagacacgaatgcgaacacgaatcctgaatcccggatcccagacctggacctagaccctgaccccgaccatgtctcgaaccctagacctaagaaactgaaccccgaaccttgacccagccccagacctcaaacccctaaccaggcaagagtcggagttgaggtcaagtttatagtaatgataatataattttacgcaagctattaatacaagtgattgccaaacatagtattatattaaataatattaatacaatacaatacaattcaacacaatacaacacaacgtactaaacaagccctatagtacaattttctttttaaacatgataatttattgttaaatcttcttatgttttaatttgtatataattttattttcttgtttttttagtggtcataactagtgatggacatccgatccaatccaacctttttttgctcatccgatccaatctaattagtaattagatttggaaaatcatcatccgatccaatccaattagacctcaaaatccaatccaatccaatccaattactaattggattggatcgattttttaattgatatcctattacacacttaaatttcaatattagcttaaaaatataaagaaaaatacgtaaaaaaattaagtataactttttatttaagt

SEQ ID NO: 295115 - DNA, 4177 bp, Cannabis indica
ataaaaaatagtatttattgtgaactaaatttgacataatatatcttgtgctaaatttagtacaattttcaacatgtgtaaaatttaacacaatgttgagaataccatttgagttagttttccttaattgtactaaaatacattacttacacattttttagcactctattgaagatgctcaaagaaatatttttggaaagagaaactatatttgcacctaataagttatagaaaaattttacaatgcatctctttgaaagagaatcaccgatgtatctttatttgttttggtatccgaaataattttttagttaaattttttctcatgtaaggttataattatttaagacattttaaaaaattttaaaaaattcaaaaaactttaacatcccgaaaataagattcaaacattgttgcacaaatgaatattttattttatatatatttaggattaaaatattcttattatatcaacttgtctccttattactatactagtttctattattgactattaagactaaaaggactcaaaacgtatggccttggtcatggcacaccatctacgactattctctcttatctccatcttgttttcgattaccattattataagccacttcttttattcaaattttattttatatctccaaccattatactatgagatattcaattattgcttttctctttgcctggtttttattacccttcgttggagctcagccacggggaaattcccaaaatgaccccaatgcgattcaggggctccatacatcggtaggagtcatcattggagtcatcctcactgtggtcatcttcatatcattattttccttcttcattatacactgctccaatacccatgatgatcaccaacaacaaggccccaaccccatcaggaatatcggaagatctaccgggaataatgggcaaggactcgatgcggcgctgctccacactgctttccctacgcttgagtattcgacggtaaaggggctcaagatcgggaaaggagcgttggaatgcgccgtgtgtttgtgcgaattcgaaaacgatgaaacgctgcgtttaattcccaagtgtgatcacgttttccacgtggactgtattgatatgtggttccagtcgcatactacttgccccgtttgtcgggctaatctcgtacccggacccgatgagtccgtacaccgacccgagatagatattgaggcccaaaacgacgccgtggaacaacccgagattcaagaaagagtagtggccgtggctggaagtagtagtacggaattagaagtttcacaattgaggaagagtttaaatcgtagccgtacacgtggatctagaagattatttcagcggtctgtatcgttgttacaaccgggcgagaacacggagcggtttactctgagattaccggcgagggtgaggaaggagataattgagcggcaattggaacggagcaggagcttattggtgctgcctagagaaaatagcagaggtgggcggttgggtaggaagtcggagcggtggaatttcacggcgagtttttctaatagattatggtcttcgttcaaatcgccaaaggtagacgaaaatgactaattactgtttttttttttttgaattcgacaaattactgttttgcagttaagtaaatgagctcttgtataataatatctagaaaataaattgctcttagtttaaggttatattttatttagtggtaatttttttaaaatattatttagtgataatttaattgtaaatgtatattaaatttaaaattttgatgtatatatttcaaattaattgtttaaataactattttagtatacttttatttttgtatagtattcggcaaaataaattcatattatagaaaaatttatcatataattttttatttaaaaaagtattactagtacttaatataattattgtagaatgtcacctaatgttgtttctaatatctcattagtgcttgtgtgatgtggtatttattttgttgctgagttttacttttgaaaaatgtcattaatgaaaagaaaaaaagggaggatcatatcgagtctcttttaattagcataaaacaatacaatatcaattgctattatttgttaataataaaaatagtacaccaaacaatagagcaaaattctcaaactatttaaagtgatgaaaaatgggacttctgttaaattgtccaatggcaatatgtgactaacagagaagtgatctttagtctttactaaacatgagaatatacaattataacccagttttaaaatactgattactccattatttgcaatttcttgtttatagtattatatctttttacttaaagggtaccataaaaccacaagaatataatattgtgacatagatattacaattggtaataaatttttattgggtctcacacaatttatttaatacattatataaaaaatcgttaattaattgcaacgccttatataaaagataccaatgctagttatgttaacaaaatttttcctaaaaaaatgataaaattagcaaatgcatgcgaacacaaacattagataaaaatttaataacgcaaaattatatataaaagattcgtacctaacccttttaatttgactaaaacaattattaattattaattaagcacaaactaatcaagattaaataataaaagcaaaaggttcaaacatgttgtaataatattttcattgaaacttattatgatataactacaacgtactactcatcatgatcatcaaaggttaaccttctaatcaaaataatatttgcctttgatgaaaaagaaaaaagagaatatagtatatctagtctctgaacattgtaatgataaagaaaataaaagaaaatatcaattgaaatgtttgaaagtaccacttctactactacgtactactccaaccctcttgatctgctagttccttctccaaatcttgggtccacaacactacttccagtactcgaagacggaaatgatggtggttgttggagatcgcgtttgcaattggggcaattgtaaatgctgccattagagagccaatcaagaatacaatggggatggaaaacgtgaccacaattgggtataatattaacaacttcatcgtctgcgaaaacttccaaacaaatggtacattcatcagcctcttctcttccagaccctagttgcatcttaatctccctgtgagtaaccctccggaacctctcaaccatcgcctcagcgcgttgccgcgcctccctagcctgagcctcagcctgagcctgagcccgagcctgagcctcagcctgagcctgagcctgagcctgagcctgaagctctacccccgggccgacattgttgttgttcgcagcagaaccgtggaaatggagattgcctttgatgtattgatcgatcaagatgaagacgacggtgaagaagattattccgagaattattagcactgtggctacgatgtctgaaaatctcgatcggtgtttgggttgaggatttggcgatggcgcttgatgatcatgaggtgatccgatgtaggctaatgccgctgtcgagaggaataggacgaaaagaatggcgatcttttctggtttcgacagccatgaacaataattactgaagatcatcatcttggagagagagagatgggaaattgaagaactgaaggaattgatgaaaagtgagggaattgatggaatgagtgaatgagtctttgtttgagactttgtttatttatatatatagctgatcagtgatacaacagaatggttaccaagatcaagaattagttagttacggtactaactaactctaactgttaataacggactggttatttggacacagaaattaaagaataaagaaagaaatgaaggaaaaaaaggagaagtcgtttagaataatgacgtcagtatttgcagttagtcgagtgtgtgcaacttggtgtctagctaattaaaaaggaacacgtgttaattgccttttaaataattactacttctagggctcgtttggaacgccatattaggtcgtattgtattgtattgtattgtattgtattatattgaattatattttatgcaatatttttatgtgaaattatatgtggttttaacttttatggacacctaaatatataatattttagtataaattaaagtt

SEQ ID NO: 295116 - DNA, 1846 bp, Cannabis indica
agtactaattctgttcctgcaggggagaatttaatcactacacctgaccatattaccaattttaatgagtattttgatcagtatactgtcgagcaggatcatgaattagacactggcactgagaatatcactctccctactgaacctgaagcagaatcccctcaaccgactcttgctactgccttgcaacctacgcaccagatgataactcgggccaaagcaggggtgttcaagcccaaaacctatctcagttcatccaatgctactgctgtctacactgaacctgcatctgtcgaagaagctctcaaacatccagggtggaacaatgcgatgaacacagaagttgtagccttgaagaagaacaaaacctgggtccttgttccaccaactgataaccaaaatctggtgggaaacaagtggatattcagaattaaactcagagctgatggaactgtcgaaaggttgaaagccaggcttgtggcgaaaggttttcatcaacggccagggatagactatggggagacgttcagtcccgtaattaaagcatcaacagtgaggattgttctcactatagctgcctcgagaagttgggacataagacaactagatattaacaatgcgtttctcaatggcactttggaagaagaggtgtttatggctcaacctcaaggctttgaagaacaaggaaaggaaagttgggtctgcaaattgaacaagtcaatctacggcttgaaacaagctccccgagcatggtttgacaaactcaaaaataccttgatcacttggaagtttgagaattctaaagctgacacatccctattcttttacaaaacagagaagtgcataatccttgttctcatatatgttgatgatataattgtgactggaaatgatggcaacaaagtgaatgaattcatctcaagactcaacaatctgtttgcgttgaaagacctcggacagttgcactttttcttggggattgaagttttcagagatgacactggactctatttaactcagacaaggtatattgaagatctgttgaagaaagtgaacttaactcatctcaaatcatgtcctaccccagtgactgcagggaaaccattgtctatcaaagatggagaaccaatgcaaaatccatctgcttatagaagcatcatcggttctcttcaatatttatgccacactagacccgatattgcttattcagttaataaactgagtcagtttctgcaagcaccaacatcagctcattggaacgcattgaaacgagttctcaggtatctacaagggaccaaacgattgggacttcacatcagctgctgcaacaaattgaacattgttgggttctcagatgcggattgggcctgctgccctgatgacaggcgatccgtagcaggctactgtgtctatttaggagaaactttagtgtcctggtcatccaagaaacaagccgtggtgtcccgatcaagtacggaatctgaatatagggcattggctcatgtatctgcagaaatctcttggattgagtcccttctcaaagaactaaaatttcctttgctgcttccctcaatcacctggtgtgataatatcagtgcaagtgcactggcttccaatcccgtcttccacgccagaaccaaacacattgaaatagatgtccactatgttcgagacaaagtcctgcaaaaacaattggaagtaagatacattccatctcatgatcaagtggctgacctgttcactaaaggattggcaaattcaaggttctcatttcttgtcagcaaacttggtgtgagatcatcaccctttcgtttgaggggagatgttgagaaatgaggttactact

SEQ ID NO: 295117 - DNA, 2854 bp, Cannabis indica
tgaaaaagcaacataaaggttgggcaaaaaagatgataagaaggttgaatatgatagatttgacaagggagggaatagaggtaaaactagttcttacagattaagagctcttttattcctaaagttaaggtcacaacaatactaaaaacaacaaaggctgctgttttcaattgaagcaagtcaaaaaaattagacatagccaaccaattataacatttgctatggagacaatactgccctactgcggattctgcttgatcgcctaactggagttgctttagcttctccttttctgctgcttgatcgctttgctgttgttggagtcatcatctcattatttgactcaccatcctgtatttgatacaaatatacacacaaattatatcaacaatcataaattaattgtaacaaatattaaaggtagtggtttaaaatctaagaactatattggaaagatgaaaaaagattagattttgggagaaacttacatctttcttattcccagcatagcttccttgtgaaggggaatcatccgtgacagaaaactcagagtgagcaggttgggattgaatagaaactgaatgagatttatcaccaaagttctctgtagaaaatgaaaaattgctttcttcaacttctgttctcctgtttttgacaccagagttcctaatatctctaaccacaaactcgccaagaaattcaactgatggggcgtggggttgggtatgatctctaagagagacaatttcatcaatgagctcatctttcttactgggaatttcttctttgcatttctctattttccaagattcaaaataaggctttgagggtaaaggattagaatcacctataatgatctcttcttcctttacttgaagaggttcagtgcaagggtttgctctcaaccggaacctcaaaaacaaagttgcgataatcgttgaaagtatcaaacccgcaacaagaattttgaatgagaatttagtttccatttgcttcagattctcatcgtttaacttggtatcagtatccatattctctgacaaaacaacttcctcagtaatgcttccagttacatcctcatcttggcttacttcaatgtcattttgctcttcagagaaagtcagtagctggtaatcttcagtgggttcaagaagatccatagagaactcatccatgttatcttcaacaatggacttattttcaccttcagcaacttccacagcagcatcatcatcttcgttcacttcatcagtactttcaatttcatcaaattcaatatcttcatcaacatctacatttccctcttcctccacattagaatcaactgcattcttaaaccagatagcttcaaccatgttttcttcctctaaccctctatcaaaatcactcttctttaattctataggatccccattttgtgaaattgtatgattctgcatattgcagtaaccactcaaagtgctctcatcaaacctcaaactagacataggcgtcgaagaattcatggaagatataaacatggtagagagaactaaaacagctaacaaaaataaagatttgaatagacctttaaagttgcaacctttatcttcctcttcctctttttcctccacaatttcgtcttcatctctttcctcggattcaccaatagctccctcaactacatcatcttctttcttttgaattattgaagatgatggtgaagaagaagaagaactgccaccggagtcggaagcagcctcttcctcatggctggcattcagagaatcaagcgaaccacttctactagttaacccctcttctttggcctctccatcttcaatttctctcccataaaagatcacacggcaatgtcgcctattaggcttgtagcggagaaattgaggcctcggagaaagataattggttaaaggatcataaggcggagaagaagccagatcagcagatactacaagagcatcttcattctcctcctcctcaccaccaccattcgattgtgacaaagactcatcagagttatcaagaattgatatcttttcgaatttagtctcaaacgaagaagatggttcggaagcctcgttcctgtctcctaagatcttctttctaggaaaatttgccttggaagctgctgaaatagttgtggacatgtaatgctttggcattggttttggattgttctgcaaattgggacttgtttgctgatgatactttggttcattttcatctacatctatttaagaaaagaaaaaaaaacatattgttagttgtttccattagacagagtgtattttatgagactaaaaaaatctcgtttggttgcaagttatctatataaactttagccaaaccaaataagaacagaaaaaagtagagtgggtggaaagaaaagttaccttttgagggcttgatggacggtgaagaagaaagtcggtgatgaaaatcgttcatttcgtcttttaaccttttttcgcagatcagaaatgaaattgcttaatgtttttttgaaaaagtttgggagtcagaattgagcgaaatacttttgggatgaactttgaaacgcaaagctgaccgttgggggctaaataattatttgaattttcatattttatgaccgttggggggattgcctacctacatcaccaacggtataatttgacattaagaatctcagatatttgggcatttcagaaaaataaaaaataaatagaatcttcagatccagtgaagtgaggcccatgaatacttttttatggctcaacattttttgattgggtcgagaagaaaagaggagaaaagaagataaaagaggaaattacactctatatcctttttatattattctcttttattttta

SEQ ID NO: 295118 - DNA, 5998 bp, Cannabis indica
tttttttatttttaaatatcggagtgtaatagaatttttcaaaaaataattatcaagttttttaacagaaaatcttcattttatctaaatattatatttgattttctaattgaaaatttttgtagcacttgtatgttattagttttgttgtaggggtgtttctttgttttagatttgattaacttacacactactacaaaaattaaaaaactaggtggtctatttggtttatataattagacaataataagtgggaaaatattgtgtccgtattaatattccacatgctttttaatgaaaacctataattctaataatgaatgagagagaaagagaggagtgagagagcttaagaagtttaaatatgaacccaaaaaaaaaagttaatgataaaaactgaattggtagaacatggggagatagtgagaatgagttatgagggttaccaaataaagattggcattgtctaacagaactatggcatttagtaattaatagatttaaaaatgaatgaaatattcaaactaatttatgtatatattgaagaaaagaagatgaaggtggaaattaaatttgtatttatcacatgacgtaatagcatcattattgtcaaccgtctcaattactattgcatttatgtgattttaatagtctctcaatctaatgtagtcccccaatatatttttatttattaatcaatgttatacttgagctacccaacccaacctccctaattatcctcattttgttcttaccaaataaacccatttcaacccataaatagagacttcgttacacatgacccacattaaaatgtccaccatattagttgggcatttgggtaaactactttgtaaaatctaacatatgaaatatgtttgtgtaaactgatcaccctaacccaccacatccttgtcactaacccatatttattatataatatgagtgtagattcaaaactcttatatggatataaatatcttccatgggaaccataaattataaactagaagaaggtatggccaccctttttttctggctaataatattaaaatctgaaattaaagtaaatattaatgtatctgtgattttaatttttaaacagttttctgaaaaaaaagaaaaagaaaaacaatctccatacattatcatgctaaatgtcaactaagtagtaatgtagtattcgtctgaattttcttttgtgggcctagaaatgactataatgggcccccaagttctattattcgattactttttatctgttttgaccgaactgaactgggttgtttttcaggttcagaaaatccactttctgattcggacactacccattttttatttatttatttttatatatacataaaagatgaaccaaaaaaactatatttatatttttaatattggcagcatgtaataataataatacgttgtcgtttaacgttgagcaaacgaccataagaaatataaaaaaagaaaaaaaaatctgaaaataaaataaattaatatccttgagagaaaatattaagcagttactgttagaacataacggtttacattttgcccatgccaaaaccccattttgccccttcctctattttctatgattagagaacgaaaaaagaaaagaaaaatactactaaaaaaagtgctattttcactccattttccttgtctacttttttcacaatcacaaacgagttctttgtggatcacaaatccaaatacataactcaaaatcaaccaaaatttctagcattaaaaaaaaatggagagcaaatagcaccacttccaaaagaaaaaaaagaactagttaacataatacaaatactcctaaaaaaaaagaagagaagaaaaagaagaagaagaagaaaaagaagaagaagatgttttataatagtagtagtaataatgatgatgggtttaagcttagctgttcctaggcttagaggtaggagtagtagtagtggtgttgtcatggaggaaatcaagcaaaactgtgcttttgcattttgggcatttgggatcatcttctgagagcatgacatacatgaggcatcttgggcaacccacaagcaccatggatgttgcttctgggctgttcgagtatctcacgctcatctcatcttgattcagctcagacgacacgcacgaactctgcggcgacgtcggtgataccgtcgccgatcgccttggcgactccaccagcagcgggtttgcccgtggcggcgataggttcagctttaaatctagctttggacgacttccgtttcggcggctcatatttatgtatgtgtaatttgattaattggactaattgtattaacctgtaacaaaataattagtaaacaaaagaatataaactaaactgatattattattattattataattataaatattatatacctgaagttgggtaaaaagggtggtaagagagagaaagtagaaacaaactagaatgaaattataaagagaggaagaaaaagtgaagatggtaatataagaagaagggaagggatgattatatatataaggaggagttgaggaaggagggagatgggttttctttaaagcataattaagagagagagaagagaggaggatttaagaggagagagagaattgaagtgttgggggtggtagaagaagatgtaaattgaggccaggaaatgtatttatggttggaaaaaatcccaagaaatatagagcaggaagtggaaatttggagtaaatattcatacataccatatattttgtaattacaacaaacagagagactcattcattgctttattagagagaggagtcggtgtttttaagttttgatgatagagagagatttagagagaaaaaataaataagtaaaatataaaaaatatgtaccatattatagcagagaaattaaaaaaaaaaaaaaaaaaggggttccaaacggcttttaaagctgatacaccactattattatttttaatattgtaattattattaatattttttattttattaattatagagagtcaagacttaagagcattcatctccacctacaaattcaatacataacaccaaaaaatttaatggaaaccatgaaaaagggaagcgtaacagctaaaccaatatttaaaattgccaacaacatctaaaatttaaatactaaagaacaccgagcaattaatttgggtaccatgcacccacttaaaaatttaaggaacaaaaaaaaaaaagttacatatgcaaacattgatattattatattatttgtgaactattttattatttacatactaaaacttcaaaatcaaaaatgggttcagttccgttttggagaaaaagttggtaaaatatggatggagttcttgtggttcccataatatcgtgacccaactccttgtgattttagctaccaaataattttcaatattgttattaaaaagtgtttttaatttgagtctctctgtgttacaaaaaaaaaaaaaaaaaaaaaaattaagaagtctctctttcaatatatatgtgtatagataaatataatatataataattaacttcttcaatgatctggagcacttttatcgtacctatgctttaaaatttattaggtttggcaaatattgttaatgcacaacatgtattctttggcctccatatacatttatatgaaaataataattaaggacgagcctgttctctcaaaaacagcccaagtagttattgtcttttattagtggttataattaggatgaagagtatctaattttatacaaaggactgtttggtataatatgtattcttatagtatgaggatgatgatgatttataaggtttttctcttctcaaattttgaaaaattattactacatatgaaaatgggcattacttaatacagtaattttaaattctttttagaaagtagtgtctatacattcacaacaattataatacaataaattttatatattaataattgggtaaatattaaataatgtgttttgtgtgattggattaatttatgacaaataaattatacatatatattagtaattttacattttttttcttcaaaataatatatcatatttttgtgttcaatttttatacataactaatcatagtttattttaataattgggtaaatatttgatataattaaatttatcaaaaaaaaaaaattcctaataaagcatataagtttaatgttgtattttccactttaatattccaattaataaaattaattattttgaattacctctaaataagtacataagtttgttaattatagtatgtcaattaatcaatggttatttagtttgatccagtcaagcggagggggtgccaaacatctctataggccgatggttgagtagcagagaaagaggctctagagatcatcaggtttcggtgtgttgggtggttacgtcaagacttgacttttttgatgttttgtgtggagaagttgctgcttgttgcttggctttaaagacgacaacttagaagggatgcaattttgtaattattaaaagtgattttagggtagtgattaactctcttaatggggtagattccaaatgggagattgaaaacttttcgagtcattgtcgaagcacctcttctgtttttgtgagttgtgttttttctaatattgattagatttgtaattttatgacctataatatggctaagtagacttttaccttgctataattgtttggatgttacagccttaccggctaacttagtttgtaataactatgagatctaacttacttatatgatatcaatctaagaaagagaaaatggttttttagaagcactatatgtatatttgagttccacaagcaaaattgtcccacaggcaccccactaatccatggccaccggcaaaatgtgctacttgtgatatgtatatttcgaaattagtcgtattttaatttatttatctgtaataaaggatgaatgaatgagactattgtaattattattattattattattttagaaaatgaatgagataattactttataaatctcaatatatttatttatttatttatttatactgtacttttcttgaaacagaaaacactagcttgctggcgttgcttgaagacttaaaaagtttcaggggtttccctgcaaaatctgtcaacaatattgtcagtgttcacaaaatgatcacaactctgaaacctcggaggctaaaagaatagaagaaaaagaagaagaagaagaagaagaagaagatagagaataatagaattgttttatgtataataactatatagtatgtctgtaatcttacatatataattaaaacatcttaacatacaaaataataataaaaacaatgggtatgtcactatgtctacactccaggacacctcataaaggtattttagtagagtccctatcaatttgggcatattataaagctttttagttaatttttttcacaattgctttgtaatttttaaattttttttttttgagtaatttacaatgttgaaagaaaaatttatatatttttgttgcatgcatataattattttttttacacgcgtagtaactatttaaatttaatttttcggcatggtaaattatttaatttttttttaaaattttacaagtaatcttaaatagctacaacatacgcggtcattgaacaaaaattaatttttttcttctaaataacaaaaacaaatgagatctaccaaaatgatccacatgaggtctactacaaaaatttaaaaagtaaattgtatttacggagcaagtaatatatatatatatatataaatatatatatatttatatatatataatgtggtgttactttattttttttatcaggacaaaataaaattatagtgataataactataaaatgccatacaatcctaaaaatctaggctatatattttaggctaattagtaatttttctccctgaactttgacatgtactaaattgtgcccccgaacttttttggccgttaaaaa

SEQ ID NO: 295119 - DNA, 4582 bp, Cannabis indica
cttgcccttataatttaatataaaaaatcacgaataatttgattcctgaatcttgggtaaagaatatatattttgattttatgcaattaaattgagaggtgaatgctcgactaatcacgtgttctttttcatagaattaattaaaggaataaaaatatgaaattgtaacatgattatatattcttttttgtattttttggtgaacaaatatatgtttctctttatagtcaattttcttgtttcttgattgtaggtgggtcttgaggggagttctgtcgggcagtggtggctggatatgattggcaaaacattggatgaaggatcaacatttgaacgtgttggttctaggcagttggcaggcttgcttattgctgcatggttggtattttctatcaaaaaatcttctgtaaattgttattgttattatgtttttcaatgtctcagatgcagacttaattttgcgtcatgtctcattaactctgtaatgatcttcaacttcttaattactgtatgtctagtgaactgtggtgagttttagttagtttctctttaactggataaatgaaaagatgagacaaagatctaaaatctgtttgggttaaaaaaagagaaaaaacaaagaagcaaaattgattgagtgtgaacaataagtgtgtggataaatgaaaagatgagagaaagagaaaaaaaaatgccaaatagtaaacctatatttaagtattttttttgttatcctctttcaatgcttttccatttagcctactttatgtttttatggtctgtttgcctgttaagattttcatcaatgattattgaatttcatcttttagggtaagaattgatattagagcttatgttggagatgttgatgcagcagcagttccatgtggtttcgggcgtgctatcggtaataaggtaggatctgtctgttcatttgaatgagatgattgtgatacatatgttgttataacatttattcatctaaagacttgatggtttcctaaaaggttgctctatctatggtttctgattggcttatagatctatatatgttcatgtatgctgatgcatacactcatcactcaaattaccttttgtctaaatagaaattgatgactcttgttttagggagctgttggtttgaggattagagtgtatgaccgaataatgtgttttgttaactgtcactttgctgcacatcttgaagcggttaatcgtcgcaatgcagactttgatcatgtataccggacaatgtccttcagtcgaccaacgaatctcttcaatgctgcttctggtacaatactgtacctattcctgttttgttcacttgccttctcaatgtatttattttggcttgtttatagatctggattgccattggtcctttctgttgcagctagtgcttcatcggctgctcaggttcttcgcagtacaactgtatgtatatcatcgctgtagtatgctaaatcggtctgagttgttattattattatttttcaaagttaaatagtttcggttcatttgatgaagcattgctgtcttcagattggtgttgcctactctgctgaagggatgcctgaattatctgaggcagacatggtcatatttcttggtgatcttaattatcgattagatggtatatcttatgacgaagctagagattttgtgtcacaaagatgttttgattggcttagagaaagagatcaacttcgagcagaaatggaagctggaaatgtctttcaaggaatgcgtgaggcagttattaggtttcctcccacatacaagtttgaaagacaccaagttggtttagcaggtaactttttctacgtgagttgtattgtgtttgaatcgaattaaatgccaattgaactgttcgaaagagtgggtaggtcggttcctgctgtagagcttttcactgaggctgataaaaggcttcctgaaataatggacttgtttgtgtatttttgtagggtatgattcaggtgaaaagaagcgaatcccagcttggtgtgatagaataatataccgtgatagccgttcatcctctgcctcagaatgcagtttgaagtgccctgtagtttcctcaatactgcagtaagtgattcgaatatgaaacattgattttttttttctcaattacaaacaataaagtttaaacacaaatggtttttgtcttttttttttaccaaaaaaaaaaaagaaaggggtatgttatcttataattctttatttgggtctaagggcatccaggggcgccttagatcctcctatataagttttttttttctggtttacgaggatgcatttccttattctgtatttattagaattgtcattgtcaaggacatatttattggttgcatgtacttttcttaaaggtcatcagttttcattctggctaagtctctagctgtttaattcacatttaatctgctcactttttgattttcaaactttaaatcattacacatcacatatgaagggagggaataatatagttgagaaaaaagaatgctcaataattttgttaaaatctcacgtgtactggactaacacgtatgtcttttctagtcctgtctatgatacactgacaccatggttttataattaaatacctgccgttgcctgattgataggtatgatggttgcatggatgtgaccgacagtgatcataagcctgtccgctgcatatttgctgttgatatcgcaagagtcgatgaatcagttaggagacaggaacttggagagattcttggagcaaataagaaagtcaaagttatgcttgataaactgtgcaagatccccgaaacgatcatcagcacaaacaacataattcttcaaaacaaggacacatccatcttgcgtattaccaataaatgtggagaaagagatgcattatttgtaatactttgtgaagggcagtctactgttagtgaggatgggcttgcatcagatcattgtcctagaggttccttcggctttccccgatggcttgaggtatagcttgttttgattttaaaaaagaacattggttatatttttacaggttcttatcttattttgttgggaggtcaacataatgtccatatttgaaatttctttcaaatccatccacaccactggggctgagaaatatttgtaaaaaaagtttagaaaggggtaaatttttaatttaactaacattagagaggaagagattgaggatttgtgtaatttttaatgcaatactaagatggccgatagtaaattacaactttctttctgtttatgccttgaacataataatacatatacataaaatgtaaatgttttaaatttgaagctgtagtgtatatcactactggaggaatatgcttgccacaaatttgctaatatgttatttattttgcgtgggattcaggttatgcctgctaccggcattatcaaacctgatcatattgcagaggtctctgttcaccatgaagacttccaaacacaggaagagttcgtggatggcgtccatcagaacagttggtgtgaagatgccagagacaaggaagttatattggtggttaagattagggggagttacacgactgagtcaagagatcaccaggttcgtgtgcgtcactgcttttcatcacgaaagcaacaaaacggacacgagaccgaatccaaaaaactccaaggaacagtcctccaccgatcggatttgcaacatcttagtagttcctatgacgtggtcgaccacttgaaagacatggttgacaacctacaaagcatgcacagtccgtaaatgaatctgacgaagaacagaaagaccggctggccaagtgccattttttaagcatctgataagctttagtcgccagttgcttatgaagctaactctttattatttgttgagtaaaatgttctctcttttttcctttttctccctttctattctaatctcttgggctgattgattttcagtattaatttaattgtacaggaaagacaaaattagtaaagcttgcagatgatatgattgtttgtacgtttataatctattgtgctatcaatgaatgaagatagtttgttcttgaatttaacttttattaaaaaaagaaaataaggtttaggacttctgaaattgatttattacataattgggtattaaagaaggttattacctgcaaattatttttaaatgatgagttgctttttatcattttgaccaaatatgtttgtatcttaagattctctgaaagcacctaaataataaatattcgtccaatttcgagacgtgttgaaggagactactagacagaacaatgttattctggtagttgactacaactaaaaaatctcatgaatcacgtcatgaaatttgcaattttttttttaatttttttaaaaatgattcattccttctctaaaagaagcatttctttgatagaatttattgggaagaaaatattagattaggtagtgaatatgaagattggattcacgtaaaatttggttaaaatattctctaattcaaaaatttaaattattcttcttttcatccaaagatcatgaaatttcacgggggcttagccaagactgttgtgcatca

SEQ ID NO: 295120 - DNA, 2835 bp, Cannabis indica
tagtaatttaagatattttgtaaataattatttaaaacatttacctttaaaaagatatttatattttgtaaatagtaatttgaaatattttgtaaattttttaaaaaatttaaaatatttaaattgtaaagcatatggtctctgggacacaaaaatccctttatttgatcttgcaacttcaagacctaaaaatactacaactagcccaaatcttttaatttaaatccagtgttcaatataatctttagggcctttagttcctgtaagttgttgttggtcaggataacatcatctatataaactaaaaggaaataaaactaccaataaaatattacatgaacaaagaatggtcagtaggagagtgacaaaaatcttcttcaaataggcacttaaaatttagcaaactattatcttgaagcttgtttcaagccatacaatgattttcataactggcaaattggatttggtggtaactcccccttgggtcaatcccttgaggtagagacataaatgttggaattgattaaatacttaaggtttatcaaataagattagtatagactaatcaatcagacttgtacaaactaacaatgtaagttaaaagattaaaacacattaagaggatgtgtactttaaagttgtatttgtataatgcgttagaaactattcaagatcttaaaacttagttttgagtaaacttatcgcctgaaaagttctgggtcattcaaaagtgtcaaatgcaattttcgaaggaaaatgcacaatattgggcaacatgtcgtgtggaacattttcgaaaatatgcaaaataaccatcaacaatgtcccgagagatatgttgcctaaggtgaaagtgacatgtcgcccagtgataggcaacatgttgcctggtgttatagattttccaacgcgtaagtatacatatcgtttacaagtaataaatttacaagagtgagatcgaccccacaaggaatgtagttaattaccaagcaattaaattcctaattctatttagtggcaataaaattaagaaaaaatatttaatttctactaaaaaaacaaaaaataaataattaagatgaaattaataatgattaaagcttagagtgattatttcagttgcatctactttatttagtttaatatactttaattcttaattttaattttcatgtgatagtggatttactaaagaaacttatattcaagctaggacatataaatctcaatctgtatacaaatttgctactcttgttcaaaatttaaatacataagaggtattaagcataaaaatcctaaatgctacataaaccaaatgagtactctcattctatatcgaaatatatgtctattttactagagcataaacaatactcacttctcaaattttctactaaaatcataaaacagttaattggtgagcaggtaattaaaagtaattaagtacagatgaaatagatacacataaaaattgagaaagaactaaatcatattaaaactaaaataaagtgtcaaacaatctccattgatacccttataaacaatctagctactcatattcattataaataattgacaacaattaactaagaacataagaaaaaagtagaaggaaataacttgtcgaaaaatattgataaaaatctccaaagcctctttctgcttcaatttttgtccttaatgattgttgttttacaaagtgtcaaaagggtccattataaaaccctaatctttgtcatttaaaacaggcgggccgcgacactaccttgtagtcttgcggtgcttgaagcacgatttttgacagcgagtttcctgctgcgttgactgataatattttggccataactattttaatattgctcaaaattggatgattcaagatgttttggaaagttgaaagagagatctaaaacttttattcacaatatttttcctcaaagtgaattcatcatagttaaaaatttgcttgaagcttcagacttgatttttgatcacaaacagagcgtgttgatcatcaaaaacttagaatatttcaccacttatatcctagaactctaaattccatgataattcatcatattcatctaatttaacatgtttcttctcattttcaattcacattatgaattttaccatttaaacctgaaacaaatagaaaacaatcgtaattctacacaaaattaaataactaaacacgacacaacataactgaatcaagttaatcaaataaagaattgagtaacaatgtttcaaataagtcaagtaacatggtttttataaattttttaataatatgctctaatccaaaatttcatctcaattacatcattaactcacatcaattctttcgtttagctcataaaaccacaatcaatacttaactaacattcaaaacaatttatacatactaaatacaaccatcaaccattaatcgaatttattccttttgcattgctcactattctctactaatacacataaatgcataatcaagaatcaaaaggtctttgtaggcttgtaatgaaaggcttagatacgggtggatgaaatagtcatttaagctcaatgtaccataagcatataaaaccaatcttgatattcacatcctaatttaacacaccccaagtttccttttatttctaaggattgagaaaatttaacactagagagatttttttttcaaaaactatcattcctccaaacttatacctttaacaataagagaaatattgttgttgttataaatattaataattatatggatgtccaaatcttttatttattaccatgaattgtaatgaacattcctcttttccttagtttccctttttctta

SEQ ID NO: 295121 - DNA, 2676 bp, Cannabis indica
tttttttcctttttgtatttttctgtttttttccctaaacataaagcacctaacataacatcatatcataccgaaatgcatatcaaaatggtgacaaaaagaataaaataattgaacaattataaccaattgaataataaaataaatacccaaaaaaaaaaaaaaaattcccaagctttatcgttagtcttcggtaaaaataataaaccatttttgattgttttatagtttatttatagttaattgatagttgttatctagttttagttgtctattttttgattttataattttaaaattttataagagttttttgtaaataaaattttgaagtcgtaaaattataaatataacatacaacaatattttctccaatacggaatggtgttaaattgcgtaaaactgagatttgtgatgaaaggctcattgttgcaattgaaaatgggtcagatacttcacaggactgataaacggaggcccatcattataaattgagtaaacttggactattgagtccaaagggaatttcattttcagcaattacaattacaagtagcaaaaacaatatgaaaaagagaaaaaaaatcatgaaaacagaaaattgcactccaaaatcaacaaaaagaacaccaagagtacagattttgtttataattctataattcacagtcatcctccgctttgttaaggaacatagtcaaacttgcaagaaccatgacctgccacagaaaggtgaagaaaaaaaaaaacaaaaaatcttaacaaaattttccaatcttaaattgatttgatacctaagaaaattttaaatcaaccacttggaatcgtcattataatgtcaaacatattaggttgcaaatttatttctaccttgtgtagtgaaatacagggtgcatttttctctgatcatatataggggatagatactatttgcacaatattaatttattaaatgtattggataggttaacaaactgtgaattaataatgacttacttggatcaagagaagtaaccatggcggcagccctgaagtaacaagttcctctttggtgcttaaacttctgataatagtcgttgaatacataagaggcatggtccttgacagtgttgggtaagtaacatggttgatttgcttgtattttactgcaatcagcaccaccctgattgcaagcccaatcaatagccttttgtaactcatcatctggggtctgtggatctgctatgcaccattccaccaactccatccccggctgcccatctttcgttttcatcacccaagcaaagatttatttcacattaagaaagtacaatagtgcatttgtgtgagtgtcaaaagtaccagatatttatgtaaaaagtaaagatttgatattaaactatatctagggtcatgatgagtttacctgatctttgaggggtcagtgtgaaaatgagcagagttaatagtacaatccttagtaatgcggatgacattgttcttcagagagttttaagtttcaatcaactatttccaaattcagagttcagcaccgacaattagccaactttgtaatattgtggtgaagcaaaattcaaggacaagttttgtgctttataaataaaagatgaggctacagctaatttttatacgttacttaaatcataaggcaaaattttgactcacttttggaactttgtctaagatgccaaatttaaatacctcattaatgtacacaaacaaaatctcaaatttgtttccttttattaaaattagtagcagcttaaccgatattttaattaatttatatatatatttaccgtattcattcatgatttggaatataaactacaaagttatgaggatatcaaaattcattgaaaaatgataattaatgtgattattagagttgttccgttgtaacatgcttggaaagaaaacagaggcaaagtgaactgaaggattcttttgatctctcttctgtcttaattattctattgtgtgcccacgtgaaactatactatgcattaatcatacgtactaaggccggtacaaaactagggaaattatatatacagcaaacaagaacccgaccaaatcaaggaaagaatccataaattaaagataagaaacaagtgaagtcaattaattgtaataaaacctctacatgttcggaaagtcaaatgtaattaaggctccaaatttcttgaaaggataaattttgtgcaaaatatggaagcacccacatgtgtgcatgttacatttcgttagtgcaaattaattaaacctacgatattgaaatttgcatcatcatgtaaatataagtttaacattcttcacaattattttcttcaagaaagtaaagattaatggcttgaatcattcatgcatgcatgcaatttccctagtcgaattgcaattatattgaataaagaactgttgccatttctggtttttgctctttaattcaagatttcaagacattcagccgcattgcaccttagcacttcaagtaagtaatatcctattatttccataaaaaaaatatcctattatatttctctaatgcgtctaatttagtttataattataaacagagacggacacagttataagtgtgtaaaaaaaaaaatagttataaaaaaataagtgtaaaaaaaattaaataatcttctatttagttaaataattatacaa

SEQ ID NO: 295122 - DNA, 8731 bp, Cannabis indica
ttgacaagttaacacacacacatacaaatgtacatatatataaatatgtatttgaaaataatttaattaatactattatttatatatcaatatatatatttgaaaacaacttaattagtagtatatatatacaaaaaaggtataaaacgtatacctgtgtgggaagtctcattttccatttgtgatttatcaacaattttgctgctcgatgcaagggtgtgcgatctctctcggcctatatattcaaacgtatatggtcataaacatataacatataatagaggtgtatgacatacataaatatatacatttgcgtcggtttatattgtacatacctgtccagcttcgatgagagccaacatggcccatgcagtgtttaccaagtgtggtttacctccttctaaaatttgtgtacacctacatatgaatatggtgagtgttttgcagtatatggtctttgttattttcaattgtttttacactattaatagaaacataatatgcaactacattgaagtggtattagatacctcaatcatctaacaacattattaatagtggcacatcaataaataatagccttgattttaaacctaaagttgaaatcaataatgttggttatgaaatcgacgctaattcaattgatatatctatataataatggtattatataataaattaataaatattttatgtagcatacatacatatatatatatatatattataagtgtaccttgttttggcatgaaagataactttctccccaacccccagtcgacaggagttgcttggagagcaagaaacgagaagcttttcttatggaatgagctgtatggtaggagtgcccagcagccaccaacccttttagggcgcaacaagtggcgtaggtgtagcacactccccatgacccataccatgacccatcgtcttcttgtctactcactatgaactcagctgcctttcttatacattcttcaatctctttctttctatattctttgtatttctttgtgaatgactttagccctttgattactgctgctgtacattccacatactggtaatcgattatgatgtctccaaatgtttcagctggatttatcatctgcacacacacacacacacacgatgtcatgttaatctaaaataatctttcgatgattgaaatccatgttttaaaattccttacaactccaaacttaaaataagaacataaaaaacaataagaaaagtgaaaatatcaaacataaagaaaataagaatgcaaggtttatactggatcggaccaatgtaatgttctatatattttatggttagagctctgacatgaggtcaattagtgttagatgataggatagttaattacattagttaattatatgatagtttttcatcataactaatttctctttcatgtaactaactttccaatcttaatttgtgtatataaacatcaataatcaatacaaatacttagtcaagaatcaatacaaacactaattttattcagcttagttatttttctctttgtctctcatcactttcaacctgttatcagatgcctaaatcagtcctctcgttcctccatggtcgattcaagctcaatccacaaaggtccaacctccaactcgttgccaaagtcaaatactctttagttcaatcattcgttatccataaaacttgatgaaaataattttttccatggtatcatcgagtctatgcaattatcaaaggaaattgtctactaaaatttcttgatccagcaactccttcacctatatttcgcactactgaagatgaactcaccaattgcatctctgaggaatttattgaatacaatgttcatggcaatcttctagttttctggattctctcttcgatgattactaaaattctaacacgaatcgttggttgtaatacagttgctcagatttggtcatgccttgaacaattttattccgatgagaatcaagccaagattattcagttttgcactcaacttcacaaaacaaaactcactggtaatcttaatgattatcttctcaagatcaagcatatcataaactctttagccccgatcagccatgttctctctgcacaagatcacatcgaggccatcttcaatggtttcacttgagattatttcatgttcatcacatcgctatcaacacgaaaggatgcttactatgttgctgaagttgaatatctactaatggctcaagaagtgcgaaataaaatcagtgagtctgagctagatatctcaaaactagaggtcaatgttccagctcaagtaaagtatcccatgccaaggcctagtttttcctctttagctcctccttttcctcaaacatctaatggttgtcaagggtttcaccacactccttgagttggttatcctctgtttgggtcgacttatccaagtcctctatacaaaaactacggattacttcctatccaccttatttaatatttgctccatcttctcaaccctctcgtggtggttatcatggtactaccccatgtgattgagactcctaaaactcaatgtttttatcgatttgaaaaatcctttactgggcctgagtccttccagtctttcaatggtggctctattaatgctgttgaaatgtagatgatgcttactactcccgagactttatctgattcctgctggtacccaaattctagcgcaactcatcatctagcccctgatctggccaatctatctattgctcaagactttccaagttcatatcgaatttacatgggtaatggttcaagtttttgcatccaacaaattggtttatcactcttatttcaccttttacctctcaagcattttatcttaaaacatcttcttcatgtacttgcaattattaaaaatcaaatcaatatttcccaatttgttaaagataacaatatcttttttagattctatcctaaccattattgtgttaaagattgggttaatatgaagacattgttggttgggagagttgaaaatagtctctactagtttgataagtctattcctaaatctcagtcaagcctcactcctcctgctagttcatctgagttctctacacctcttaccagtgactataattttcaatgtttcaattccaattccaatgtacctatgtccaactttactttgtggcacaacagattaggccacctagccaaatctactgttatatctgtaattgaatattgtaatattttcaataccaataaaattttttttgagctatgtactgcatggtgtcttggtaagcaccataagttaccttttcccaattcaataacatattttacacatcaccataacagttgttagatactgatctctggagtagaatcgtttaatgtctatagatattacataagctttattgatacttactagaggtatgcatggatatattgtaatgatcgcatattaaaaattagaagattattagggcttattgtcaaaagtagaattttaatacttattttttataattatggaaatatagttgaattctaggtgtattaattatgattatatatgaaattttatgtttttcatatttttatgcctgataatagtagaatgcagcatttggaccatagagtcacttaaataaattataatatcttagtttagtaaggtagtatagttacacatttagaatatcagaaggatctgaggttatatgtttggaccatattacccctaggttttaagtttacttcatgttgaaaaaagagagcaaattggtaattttaccttagttttatcataagtaaaagtgagtggatttggttttaatgtttttattattaaataagggtcaaagtatgatgcaagcggctggcctcattgcttgggacctggtgtatttgtcaaagaaggaaggaggaattgggttcaaaaagatacctgaatggaataaagctgctctctttaagtatgtgtgggaaatagctaataaagagaacaacttgtgagtacgatgggtgcacaatgtgtatctcaagtagaatgatttgtgggaatacaagttcccacaaaatggcagctggtattggaagtagatagttgctgcgaaagatcaaatcaaaagcatggttgatgttcagcccttcacttaggtaaggtatgttatagcagatggctataaaatgctttgtccaatacaacacaaggttaactaggatcaggaggtatggggaaggcttaacacacctaaacatagcttcacattctggttggcaatacagaataggctgagaacaaaagcaagattgagagtgtgcaatatagtgcaggatgaccaatgtgttctctgcaatttacagtaggaaaacagtgagcatctatttttcaaatgttcaatctttgctgtttgtgtacaggaagtaaaaagctggcagcaatggggagcacaatgcatgactttgaagcagcttgtgaggtggattgaaagagccaaaatgtccaagtttagaaagaaggtatactcagctattgtagcatgcttgctttacaacatttggagggttaggaatgattaaatttagaacatgaagatggttaaagcagaagaaatcatacagagaactaaagaggttgttaagaatatagtaacaaccctttggccgaaaaaggaagacactagttggttttcgagatcgtaaagagatagagggaaaatgaatgtaaattgagatgtatataatttttgtaaaggagtatttaggtcctctcttacgaggatgctatttgattgtataaaacagtgtagtgagcaatacaacaccttcattcataaaaaaaaataaataatgagctaaaataatagaattatttcattgattacacttagtaaaaaatcacaaattaaaaagaaaaacctatctccttctctctctttcttgttcgaccctaaggagacccaaaaaaccagtccttttttttgttaattctgggtattttagcttgattgaaggtgttttggaaagttaagaactaaggtaagccctaattactttgttctttgctgtttttagaattttaaggatggctcaagcgtgcaaagttgggtttgagatgttgttcaagttagcagtatttcagagttgtttctgaagttatatttgacttgattaggttgttttgtgactgttactatgattattgctgtgtttgagctaagtttgagcataaaaacttaggtcattaatggtaatttttgatttcttgccttgatgatggattcagttagtatatgttgtgtatggcctaattaggtgttttggagcatttggtgagatttgggatagaattttaggagagatgaggttctttatgtttctgttataaaaatggcagactatttttgctgaaatggtctaccgttttcagaagtctaggacccgaaaaaatggcctaccatttatagggagcgacctgctatattttatggtattttcccaagaatctcatttgtcggtattttctcgatatttagtgtattgccatgctatctattgataggtaaacttctagttttaggtttaagtccctgaaaagtgatctagtgtatcatttatcggttttatatatgttgtgacttagggacctataaatcgtcgagtactagtttccattaaagttgatcgggacacttgaattcaaaatcaaggtaagatttattataatattatcatgtgtttacatgtttagagtgcatgttttatgtttgctatttgataagtattggtagtattagtgcatatagagtttcactgaatgccgaagggtatatgtttggtatagaatggattcatgctatcacattggtaccgctaaagtaccaagcataggctaatattatgatcaatcatattatcgtacgaacgttctaaactcattacgtgtgggacgcaggataggattgtaattgggtgtatgggcaccaagttataatccagtttatgataatgttatgattatgctttacttactgagtctgtcaattcacaattgttgtttatatgtgtaggtaaaaggaaaagctaaggttgaacagtagtgaatacaaggcgatgaagattgcaaaaattagggttgttagacctggagtgtacgatcttcgtgacaacagcctttcttttaatagtcgccaggtgacaacttttgtaactaagtattttgtaaaacagttgtaactttaaaaatgggatcccgaattatgtaaagtatttatttattcaagtttaaagtttaattaagaaaaattcaattattcatgttttttttataaatcctttgattagaaaaagagtgcacagtattaagaaaatatcataacacgcctaaactaatagggtattatagtttggtgtcagagctgccagattgtcttccgaagatcatcatgatatgtacaatcatcattagagttatgctcgactcacagtttagtaagcctcttatgctttagtagtttttttattagtatgtgataagaaaatcctgataggaagcatgttagtagcctgataattgaataggtgcatgtttcttttttctcaagcaagcagtaattagaatttaatcttgatcgcaatctgaccaggctagctcatggttttactggctattctaatagaacaaatgccaagtagaacatgagaagctagggtaattcggtcggatctagtggcagtcatggagtccagtttccctctaatatttatggtcggggcagaggacaaagaggtagggcacactatcggggtgatgttaacccaccacaggctgcccaggattgggaaaataggttggctgaaatgcaacccagaattaatgaacaggatgaagaaatttgtcatctcagacaacatagtggtcctggaatgcctgctcatgaggtgaaaatggctcctacccctgttatgcaagtggggccagttactgttgttaatcgaatgcaaccattatacgaaatgttccataagtaagcacctccagtctttgtgggaggtccggacgttatgaaagttgagcaatggctaacagttattagaagaataccgaattttatgggagtcactagaaacgacagagtgacctatgctactttccagttccaggacgacgccttggtttggtggcacatggtgtctctcacccgggatgtcaccaattacctgggaagaatctcaagagttttctaatgtaaagtattacaatgaagcaattcatagtgtaaagagagaagaatttatgcagttgacccaaaaagagaatatgacaattatatagtatacgacacagtttgatagattggctaggttggccttgggaatagttccaactaaatttagtaagaaagaaaaatatttggataggttgaaatccaagatcaagcacgatttaattattgcaacagatgatgccactacctatgctaatatggtagggaaagcactacaagctgagggcatagtggagtgtattcaagagccccgaaggactcttactgttagtggggcgactagtcctcctacctctagttatggtaggggttgtagtgactcgacctctgatcaaaaaagaaaggctccatctaggtccggtggctcgaactagaacaagaggttccaagggaactaaggccatggttaccgacagggtgggtctcagaactgatacacttacctagaattccctaattataataagcatcatctggacgagaggtcaaaggtgtttccaatgtggtgtaactagacattataaaagagatgacccacaactaaagaaagaagagcagaagatagaggcaaagcatgtttgctcttactcaggctgatgttgaagctagtcctttagttgtcataagtcaacttttagtttacaactcttattactttgtattgtttgactcagagccacacgttcctatgtggtagcttgaataattaataaactgggtaggccgtgagatagctatgaaacagggtttggaaccctactgcctagcgaagaattagttatctccaaaaggtggattaggtctgtgccaattagggttgaggatagggagttgagccctgacctagtggaattgggttttgtagattttgatattatacttagaatggattttttgtccaagtacgccgttaacaatgattgcaagtgaaagatggtgattttctaacctaaaggtgaataacattcgtgtttgcggtatcagtttaaggttcccaagttccagggatctctgtaataaaagccacaaattttttaaaagaaggctgcttagggtttcttgcagtggtgttagataccggtcggcctgaatcagttcggcctgaaggtatcaaagtagttcaagagtttctggatatgtttccataaaaacttctaggattaccaccacagcgggaaatagattttgtgattgacttagcacttggagcagaactagtttccaaggcaccctatagaatggctcctgctgaactcaaagaataaaagataaaactttaggatatgcttgacttggggttttcctgactcagtgtgtcaccttgaagagctgcagtattgtttattaagaagaaagatggatcacttcgcatgtgtattgcctttagagaattaaacaagttgacaataaaaaaaaaatacccactgccaaggatcgatgatttgttcgatcagctt

SEQ ID NO: 295123 - DNA, 3212 bp, Cannabis indica
aagttaaaaaaatagtatatggattgattttttttttttaagtaaccatcaacgggtaatatatttaattatatatttattataatgctatttattcataataaccataatttatttcatttaacatgctagaaataaagtcttttgggagcaaaaacttcttattgttgaagtcacttttaattgtattgctaatagtgtttgtgcaatagataatgagtgggtgaaagctttaaataaaagctttgtaagtaattttatgttgtaagtgttgtaactttatttgatgatttgttagaatatattatgatgacattaaatatggaatatacatatataaataatttatagcaaaaacaatatataaacatatatttattttaatttgttgttatatatatataaatataattataggtaagtggatggtatcaagaatacgaaggaattacatttgcaacatttagaggagctggtcatgcagtgccttgctttaaaccaaacaactccttagcacttttcacatcatttctcaaaggacaatctctaccctccactcgatcatgatcatgcaaaatcatccatatttatataatcatctttatgttttgtaacttcataattattaaataatattaaaaaactttaaattataaataatcattaaccatcgaaaataggtcaaattcaacgggcatttgaccatcgagatataaatcaatctcgaaagtctagcccgttgagtttttcttagtagtatatataattatgtacgttatagtactatatgttataaaataaagtacaattggtaataaattatatatataatataagagattatacgtaatatcaaataattaatcattattgattatatctatatcttaatcacaagtataaatatgtactttaggtttttttttttggtgaaaacaattattaaggaagatcttattatgagtttcatctttattattataattattaattctatctagaattcaaagaacttattatattgtataaaaattacaaactctatatttataagtggtccctaattttgttttaatcacaaaaaaatgtcacaaattaacttttgggtaataacataaacttaataatcttttttagtcacattttttttttctaatgcaaaagtattttttttttgtaaataagctgattgtatttattggaatattagaggacgatgatattagtgatactgacagttagttaaggttgttattagtctgttatttattactgttgtaattaattgtcagggtgtaaaattcagttgagtttgttatcttgtattctcttctgtactcaaatcaatataaattcaagtattgcctcaatagttcacattgagcagtaatcattttttctcatttccattcagttcactttcatcctttctctccttcttttcctttcttcttgccctgttctggttttcttcatggtatcagagcctcaatggccaacaatagcgatcaagatccatcaaatcgtcaagctcctactgctgctccagctcaagaagccgctcttcctaataacaactgccattaaacctcagattagatcgatcaaattacacattatggagatccttagttcttcctgctactcgcgcatacaacctcgatggatatattctgggaaccaatccacaacctcctcgacatcttgcaggtaatgtttccaatcctgcattcttcacatggctgagatttgatcagtttctaatgcattggttaatgaactctgccaccgaggctatgctgggtcatgtcatcaactctcaaaactctgctaaaatatggactatttttgaacaattgtttgctacaagattgagagccagattgctcagatcaaggcttgttgcaatccaccaagaaaggttccttatccattgatgaatatatcctgaaaatgaagcaattcagtgacactcttgctgcttctggtcaatctctctccgatgatgatctaattatgtacattattggaggattaggtgctgaatatgaggcagtcgttgtcaatctcacttcaagatccgagaatctgactctccaagaagtacaacttatgctccaaagtcaagaaatgaggatcaaccagcaaactacagaatcgctcaccaatgtttaacctaatcttgctaacatgtcactgaacaacaacaatcgaggttctcacagttatggtggccgtggttatcgtggatcaagcagaggtgaaagagcaggcaacaccaactatggtggcagaggtaaaggatcaaatagacccatatgtcaactttgtggcagaacaggtcacacggttgtgaaatgttttcacaagtttgatattaactttacaggaccaccagctgaaaatggagcttcaatttccaccaccccaactgaaaatcgccaagctcacatctcacaaaccaccacaagtcaagatttgtcaacttcttggtacattgacagtggtgccgcgcaccatatgacaaacaattcagacaatctcacctcctcttcagattacaaggacaaagccaaagtgattgttgtcataagccttttgaaaatctagcttgatcatacaataaggcttagaattcttcctttcgtaatatcgcacaaaatcttgaaaaatcatgatgttatgggcaataaacctaccttgcacaaaccatccctgattaggagatgttagtgaaggtagaaactggctcagtttggaacatatcatcttataagtagcaactttgtacagtacattacaacatgctattggcctgaaattgctaacattttttgggttaaggaactttcaaaatcagtgtcaaggttgtggtattgagctcctttagaagcatgcctaaatgcaagaaatctagtacttccatacaaacatcctctagcactaaatcccaattatctgttggaatatgttttaccagtatctagatttactaccatgtatgttgtttaacatcctaaatatgaatttctaaaataatgtaaataaacacatataaaatttgagaaatcttacagtggttacagcggaattaaatgactcattccgcttagatctctaacccttgtatcctttctgtagcagagtatcactaagatttgagcccgaaactccttctcttgaatttggattcttcacagtcttacacacta

SEQ ID NO: 295124 - DNA, 5788 bp, Cannabis indica
taaatatataatattttaagataaattaaaatttaacgaaatatcgtataaaaatataatatatatatatatataatataataccactttcaaatttttattcgtgatttgtgaataggaaagttgattaaatttaaatgaagtatctatattatgtaatataatttttttctaagcatagcgtaataatattttacaattaattaatagtttataataaaggtctcggattcaaatccataatttctgttttctaatccctctctcaccactaaactagccttgagttcattatgtattatatttggaaagctctcatcagctattatggccaaacttgcttgctttttatttgattgaaataaaaccttggacaatattcatgaataacgtgtccatatataaacaaaatatatataggtaaggtaggtctcacattttgctacccacaccacagctgtctttaatttatattttcaatttttaaattgttatttatttatttcagcaaatgattttcctatattttctcaaattttgaccatagcgcagtaaattacagttactttctattgggtgaaaatggtaaatgatagtttattttattcacatcgattttagttaaaatattataaataaaacactaataagacaattgacaacgtccgtggtattgaatattgattatatttaaattaattaattactaatattttattgaaatatgctcttctggttttcttgtctacaatcccataaataattgagtaaccaaaaaaaaatcattttattaaagaaaagaaaaaagccccacctttaatgcgtgtatcaacttctctttgatgattagtctataaaaatcaaagcttgacctcaacacaagtaatttttctgctgttcaagaactgggtcacgcttttatcctcaaaatcaagcttcatttctcttaccttattctatctcggtattaaaggttgttctttctcctgggtcgtgttccaattcgtttggattggattattataattgggtttcttttctctggttcagttatcaggtaatttgctactttttttcttttggaaaattagccctctttgattgttattaagaattgggtttgtttagatttcgttgttgatggtttgtggattaaattcttcttggcttgattattgaaaagcttagaattttaattcatgtcttatattttttcaatggtcgggggatgcaagctttagaattcatcaaaatttaactttaatttgaaaatagccatttgttttttagagatctaatttatgttctgtgcaaacagtttgagcgaattatcattctgatgttcaaaagtttttcttttggggggtgggaattcttgtaggtgtaaaagatgacgattggcaatattgaaccaaagagggaaaagaggtcacgaaagagtaagccagtgattgatgaaaaggcccctttgttacccaaaagacatgagggagaaggtggatttgatgagttcaatggggcttcattctctggagccgttttcaatttatccaccacaattattggtgcaggaatcatggctttgcctgctaccatgaaagtattgggtcttattcttggggtttctctcatcatatttatggcatttttgactgaggcttcaattgaaatgatgcttcgattcagcaaagctgggaagtcagtatcttatggaggtcttatgaaagatgcctttggaaaatacggaaaggtgttggtgcaagtatgtgttataataaacaacgttggcatgcttactgtgtacatgattattatgggtaagaaagattgtttggtattttattatctatctgctactcttttgttgtttacatattatattatctctcacaaaatgacagctttagttaggcctattatgaatggaatcctcaaattagtctaaccatgttggattgtttatctgaaggtgatgtactttctggaactacttcaagtggtgttcaccaccctggtgtcctcgaaagctggtttggagtacactggtggaacgggcgattttttgttctacttgtcacaacgcttgccatattttcaccgttggcatcctttaagcgaatcggttagtcttatttcttgaccgggaagaaccttttgatcagattatttacttgtctttgatgtcccatgttcatagagtagttactggtttctcagaataaatatattgtttcttttatatggttgcagattctttgagtttcacatctgcattatcagttggacttgcagttgcatttcttgttattactattggaatttcaatttttaagttggctaccggaggagttaagatgcctcgaatgttgcctgatgtcactgatttgacatcagttttcaagctattcacagctgtccctgttctggtggttgcatatatatgccactacaatggtagggcactcttttacattttgcttatagtttgcaatctgtccctgtatattttttaggttgaggaatataacataaataaactttatacttcctattttgagttacaatcattatccttgaaaagcttaaagatcctttggagacaaccctttcaccccaaataagaataataggatcattatggcctttctagagaagtttcagccaaacttgatcctgcattgtttggttaagccgcaatattcatgcagctggacaccaaaccagcgtgaagctaatgtttgatattaacatgtggtcgccagttggaagtttttaaccaatgtgagaagcaatgtaaaactaattttcctttgaatctcatttccagttcacagcatagacaatgaacttgaagattctagacagatgcaaccagttgttcgatctgcacttggtttgtgcaccactgtgtatgtgatgacgagtgttttttggcttccttctatttggtgatgacactcttgatgatgtgcttgccaacttcgacaccagtcttggcatgccatacggttccattcttaatgatgctgttcgtgttagctacgctgcccatctaatgcttgtatttccaattgtcttttacccactgcggctcaacttggatggcctccttttcccctcatcaaggcctttggtgcaggataacaagagattcacactggtcactactgtgctcattgctcttattttcatggctgcaaactttatacctagcatctgggatgctttccaattcagtggagcaactgctgctgtctgccttggattcatctttccagctgctgttactctcaggttagtattctacttaatgtccagctcctccttattgtcgatgatttagggaacaaaatctagaagagaatccccttatgcctgtgactgtgaatgtgttaaaataaaaaacaccctcctatcataaccaactaacgatcgctaggtgcttatttatcgtgaaagtgaacatttttaaggctcttctctcttgtaacttctgttattctttggcgatttagggatcgttacaacatagcaactaagaaggacaaggcgttgtctgtatttatgattgtccttgcggtgttctcgaacctgatggccatttacagtgatgcctattccttgttcaaaagaagttcacctcgatagtgattgattgctagtctcactccctctcaaatgaaacctgcggggaaatgttgtggagctttcaatgaagacatttgctgtctaaatcaagttgagttggactagaaaattgaagttttctaagaaggttgaatgagtcaaaataaagatagactatactatgttgtacaatgtaaaaaggtgttatttttgtggcagaagtgtaagaaaaggtgtgtgcacaatgcagtgcaaatttgtcttaccatttttcaatgttttttaaattatgattgcactgtactcgaaatacaatggattttattgcgtgaacaatttcatataaggtgaaatacaaatatgtaatatgtaatcttagatttgtcacattttttctttttctagttacccttttgatgcatctggcaaaatttgcttctattttatccatttttttggtcagatcttctatccttaattgaagttcaaaaagacgtttcaggatttttaataatgtgggatgttttatatttttgaataccacacccacacattgattaatgaacaacaaatggcaaggaatttcattgttaatagaagctcatagattacaaaagtctaatgaaaataagagatacaagatatacaaattcaacctggttttaccccaagaacacacatttgccaaaactgggttatatttgatccaccaacataaatcattagaagttggcaatgcaggttttatgggtgaccaatattagtaacaaaaggtaccagccttgggtattcccttcttctccctaaagcacaggtatcaagcacatgcccgagggtaagacgaatgttcagcagagccacttctcgggcgggtattcaagattcatttgatccgaggggtgcaggtgttgaagctgtcccaaacgcttttaattttgttttttcaacaaaacgctcagcattggactaaacatgcctaggatgaaaccaaacacctttataataaccatgctctgcacttttagtgcagttttatactaatcatcccagaagtttcaattgttaggaataaggaagctatggcaagctaaaaaaatctgacagaaagccactatttttcagcatccccagatatgaagagcaaagataacaagccaagcttgtgtgcaaactttataaatatatacttactttgcctcctgaacagaacttgggcaaagctctgcaggatatttgacaagctcacaaagacaacgaacccacctattcttagcagggctctcaaatattatagactgaaatgtcgcatcaggagggattgcatcagatcctcatcttaaatcaaatggacacccagaatcccaataacagctctgaacaatgtcatcctgtaaatcagagattcatgtttacatttaaccagaaaaattataagaacaaaatggtggtttcatttacaaataaataaaaagtttttgcttgaaagaacatgtaaagatgaacaatgtcctaccccatgctcctcaaggacatattttataaagattggtctggctccatattttaagtatagtctgccagctcacgagatgaaagttcaagcacatcattccttaaagcacgaacacatcgtagtagttccaatgccgtatgtctaatttgactttccacagaaccaaggaagatgggaccaacagcatctatctcagatgcacgaaattcaataggttcccccgatcgatggaaagaagatcttttgaatccctcgttaacctgtcccacgcgctttgcattttgagtgtcatagtctaacatatcatcaattagacgggctctccaaaaacgcattagttccaacaaccgcccaagtgacatttgaattagacgagggaactcatcaggtagccgcagaataaagtttgccatccctctctccaaatcgacggtgaggaagatatcttaaaatccaggtaagtacttgcactgcttcctcacgaacaatgggatcgatacttgttagatattagatgtatattagctgtaaaagaattagatatttagtagatatttagtctcctaactttgtatataaatatgtattattctatgaaatcaacacacaattcgaatcactactttctacatggtatcagagcattgt

SEQ ID NO: 295125 - DNA, 7922 bp, Cannabis indica
tgaaatatgttggtgataccttgtacagagatgcactattgatacttttttctaatataaattgaagagcactcgtggtcaaccggttattgacttctgtaacctttataactatactggctgtgttaaaaaaaatgtgcattctgcaatctttcttacatatactaataaaactaagacatcagtagtttcatttgtgtgctgagagcatttaactttttccatttgggtgtacattatattataggacattaattactcaacacatgtatctttttctgcagactgatttggcacaccacagtccttttactactgctctaaggaattttggcagtaatcttcacgagaatgaaaaaggttttatttgttcaattggaaaatttgtgcatctcatttagttgcatctccattgtaactgcatctatcaaatccaactcattttgttactatgattgcaggaatagatatcagagtttataaggatgagaagttactgaattcttcgcaactagagagtgaatatcgggattggctccttcaaatgcacaaccagtatgatgaagaagttgaccacggcgaagatgaagctgtacttgttcttagtccatgctcaggaaaggggaagaaaactggcatctcatctgatggtaggaatgaaaaagaaaaaagaaattctggattagtaaaattgaatgggtgaagtaattggttttcctttaattgttttctgtctgactttcattctgattctatttggtgcctttgctttttttttttttcatttccaattgatttcttcaattttctcattgttaaattaaagtttcaaggcttaacaaaatcattaagaggaaggagaaaatatgggaagctggacaaaggattaaaatttttaagggagcatgtgctggtgtttataaaagtaatgtctacgcaacaatagaatattttttatttagaggtctccaaggggatgcaggtggtacgtatttgtccttggtactattttgttatgtcaaattgaactagttattcttcatgcaagagtttggatgaaatttaacccttgtttctttccatgccttttccaataggagatggtcagattatttgcaggtatattttatacgtttcgagtagttaaggttctttatttagtagttttttgtgtctcctcaaattaagttttaacaataaatattttgtttacgatggaccaaaaaggccacttggtacaccagaaagggatgggtgtgttctttccgaatgtgatgggatgatgagtgttaatatgaatagctccttgtctttacctgttagtctgattgatgtcgaaaaggttccaacatacttctctatctctattttttttccctatggtaaaatgataactgaattttccttactttgctcaacatgttatccatttattgcagtgcttacctgttgaagatactgaatggaataaccagatggataagtggcttcagaaatctccgtctacaattgacttgctaagtccaaaagaatgtgaaggattagaggttggggtagaggttagagtttatatttattagtttaatttgaagtaacaaagtgagatttgactaaactggactaaactgttaagtgttgattgaattcatttctaaagaccacaaactagatgttgcttgaaagtgctataaggttggcttttcatcttgtcttttggggaagcgggttcaaattatcagatgctatcaaattcatggtagtgtctctgtttccaggaattgcttgccaatgtaactgctggaaaagttcctcctaaggaagtggtagcagttgttcgtcctgccaattatgtacgtaaaggtgattcaagagtgctggatcagagatatatttttaagtgtaatatagacatgtcgatggaagtaaagttcattggtgaagagaaagatcctcataaagatgaacatgtttattcaaagcgtgtatcaccttcttcaaatcatggagtacatggtatctatgtctttccgctaaggtgcaagcagaagctcccacatttgtttcaaaaagcaggggtctacaaattttcattttctcttgtaagtattgcacaaaagttcatttatacttttgtttctataattatatatttgtatacatattttttttatgatgtaatatgatgcatctatatttttttcagattgatttaagttgtgagaagcttgtcaaaagtgtcaaagtcgaggcatcttctcagatcaagaattgggcacttttaagagataagcggaaccaatcatttagtgtgaggtaacttttttcagaaaaaatggctgtttttttggtcttctattgaataaaaactagttgtcttttgtaaaatttatgttctcacttttcttattcaacattttccttctcctaaaaaataaagaactatatattagcttatttgtttaaaaaccttgttgtgcagtgttggttcaactttgagacctttctccattgcatgttacgatatctatggcaatagagcttcttttcaatctaatcctgaagttgtggtcaagctccaagcaaacaaagacttagaatttcatgttaaaaatattgagagtggcctttcaatttcaaagcgaacactaaaaattgaggtatgggtttacatatgaagatgttccactcttgttcaactaagaactaaattgcattaggcatgtttgcacttactatatttgtcaacattttgaatgtaataggacttactgattgaaagtagtgacttggataagctccgacctgattacaaagccactctcctagtatctagctcaaatgggaaattctctgtttccattccttgccatggtgtgtagtacttgtgcaaaaacaatgacgtaaaattcaattttatgtgtttttctatttattgatatatattaatatattaatatctttatctttattccatttatctattgtttttgtctttgtggtttcagttactccaggttgcttacaacttgttaaagcccaacaagcatttttggctaatcaacttttaccaggttgcactgtcgaggagtttgaattagaggtgtgttaatttttatcactctgcgcatatcagttcaagaacttttacagaatagatttttagtaaactgattgaaacctggtgactgcaacagtgatcagatggttttaattgttaacaaggtgtcttatattttcctctctccagatgttggatgaatatggtaatcatgttgtagaaggctttgaagttcaggttgatgtagacggatttcagatgcttgatcaactaggcccgaggcgtaaggtcaatatcttaatccttgcacattttttttaatgattgtttactacgaagcataccatagtttaataatccaagtcatttttagtacttcaattcttaaaaatggaatgtatttggttgtgataaaaatttgttaaatataggtggactctcatggatgtgttgaccttagtggcctcttgaaagtaacagctggttatggagagaatggtaaatcttgggttttcagtcaattaagcaagagcttgagaataatgaattatattgtactgtacaagttacattatgttattctatatttgtgccctgtgcagtatctctctctgtatcatcaaagaataaagtgtttttcaaacaacagtttcacattgagagaagggaactaagaattgtgtcgaaggtcagtgacttttcgattgtctttctgctgcaaatgatgcaagtcctcttttttcccaccattttcttataaaaacatatgttattaggtacctgagattcttacgactggttccatactggaagatgtcatttttgaaattgtgaactctgagggcattgttgatgaagctatcaacgatgaacagaaaactggccaatcacatatgctcgcaattaaggctgattggtttgatatggagtcgactacacgatatacttttaagcatgggcggtgcattgttccggctattcctctatctaaaactgaggggaacttttgtttcttagctttccactctcgccattcaaaccttagtgtgaatgttaaggtcagaacaactttgtgaaagctatatgtgatgtttttattttgttgcttaaagtagttttcaaccttcattcatatactgaatgataaattctatttgcaggttcatgtaattaaacctgcgataccaacacccaagttggagtataatactatttcatctactcctccattgcttcttcaggactcgtgttcagttaatcaagttggagtaaactattacatgttaatggagaataagaaaaaggtacatggcgtgcaaatattttgtcatttttaatttacttccaaagtatgtgtagtctatgtctttggcttggattcaccagtaagtttcacaagctttagcaaggatagatcttcccttcgtggacacattttgtgttgggttttatgtgtttcttttggtcactgcaggctcttgaagagaagatatgtaaagctggtttgacaatccaatcagtggaagaaaagtatgctaagttaaataaaaggaaggaagaaattgagcaagctataaaagaattgcaaggttttgacttgctagcacacctaaagctattccttgttatcagttgggtttatcattgtgtaggagtgtgatgtagctaatagctataccttaacgcactttgttttttcttttgtgtggttaaattctgatatggcgatggataagacaccctctttcttattgcaaggcctgtaccttgtttttctagttgcaggtcatgtttttccttaattaaaattgtgtcagttgaagtatacttaacagtatcctgtatttgttgtgaaatatctagattctactgaacaacatcaattggggatgttaaatcacttgtccacgaaagaagaggtgatcgaggaaatagaaaagataagtaactctgctgctgcagttcttgtcaatatttctagaggagttccatttcgggagccagataatcatttaatgaaaggcataataggggtggttgctctacttggtagtgttcaatgtggccagcttagcaggtcaagcatcttatgactatctatatttccaatcaaaatactatcttgtcatttgatgatcggcttttttattcagttttgaattgtggttttgtctacatttaggatattatcggaatacttgggtatagatcaaatgcttgctgttgtcgctagatcttttgaagctgctgctcaatttgaaacatacacacaaactggtgaagttgatcgcaacaatgctcttcatgctgaagcagccattcttgggaaatccataaatggtcggtttactgtgatatgctttgacaatataaagtaagcttgttgtttttgttgttgacttcaattaattctggcaacattgtctattttgtctaaaatacaattaaaataatgactggatagaaagttaagaggatttgtgttaaactttatctattattccccatattgttacagtccatacagaggtggttctgatgatcaccatcaaaggaagctggctataccacttccttgttttattgatggaaccatccccaaaggttttctgggatttgctgtaaatatgattgatttagatgaagatcagttgtccattaaaaacagctcaggccatggtcttagagagacggtattctatcgcctgcttggtcaactacaagtttaccaaaccagagaagatatgctcgctgcctgggcttgtataaaacatggcgctgtatcgctagacggtggaatcttaaaagaaaatggtgtactgtctttcggattcaggtatgcttctttattctttcttctccatttctactcacttctcatacgatttctctgttaaaatggtttgttctatgattgtacttagtgatccccaagtatgttttcaagttgtaacaacaaatgatgaaatgcccctttcacaagaaaatttaaagctgcttgaagaccagaaatcagagctaaaaagcataaatgatatgataaaacaaaatatcaaacatcacgggctagctttaaactctttcaagaagacaaagaaagagttaaagaagatgatggacgaattagaaacttgtataggatccaacacacaatagtttctacaatatgatgaaaaatcaagtcataatatttttattttttgaaaggaatcaagtcaaacttccactttttgtgtgtagattgtatagagtaagtatttaggcacttcttatagttcatctaattttgtaaaagctagattgatagcttaattagttcatctttgtacagctattaatgtatctatgaagtagccttttttacaacttggagagcgaactccaactatggttctcttcaattattttcatcttcaaaaagaaaagaaataattttaaaaattaattctctaacagtgtttggagatcaaagtagacagttgtaaattgtaaacttgaactatattcatatattcataaaaaaaaaaaaaaaaaacttgtactatagaattcatgtaactctcactggtttaattaaaattagtaggaaattccatggtacgggcatgaatggacgtttctgtttttggcatatggagaaaattatgataatttatttatttatttatttttgaaatataataatgtacattatagttattatataaatacaaatagtctgtacatgtataaaaataaattcaaatactagtatatgtccaattgactattattatttttgacactgcaccagacatagtaaaaattcttattgtgaagaataaacccgctgctaggggttgggtaatggtaagctgattcgcttctgggatgatatttggccgtgctactctcctcggagatgcatgccataatttttatcaattcataaggttgacctcaaagtgatagactacattcaatataaaggagaaaaaagggttctccgttcctctaattgatcgggattgttattgacgttagatcttatctgactagattactagtgaacaggtaaccgtaatgacgcgcagaaagcacattctttctagcatgcaatgtctttagtattgacatcttttccgggaaaactaaagcagcttgtctcgatacgcgagaacagttgagaacaaagtggcgaatgggtgcgtaacgcgtgggaatctactgaacaattcaggccaaaatccttgaagaaagctaaaaagcgttgtttgatgagtggatttttttcaaaaatttgtgggatgcatgctataactgtaagggtaaatattacttttgaccttatgttttgtaaaaattactgatcgtactcatattttattaaataataattcgaatcctgtattatttaaaatgatgtaaaataatatcacaagtttaatatattttttgcatcaattcgtgctgaatattgattttaagttaattatgtatataaatatacctaattacggggatgtttatccaattcaatatgtaatatttttcttatagtacatctaatcctaggaatggcaatgatgcgaattggggacgacttttaaattaccatcccatctctgtaggttaagtatataactatacttactccaataaccatcggtgatagtgcaggtattaactaatataaaattagaaaaaattacagttacctgtaaccgttaatagaattgggtgattctacaatgcacccccttaaaatggatgtattgatgcaccctttacttgtttcggcatcaagaaaaattttttagtctaatttttttcatattcatgtacgttatagctatttgagatatcctacaaaattttaagaaat

SEQ ID NO: 295126 - DNA, 1560 bp, Cannabis indica
tctaataccatgttagaatttgaggaataagatgaatgaggttccatcccaaaaccaattggcaatgggaggagtagcccattcctcttatatattctattatctttccacacattggcaatgtgagactctctaacaacattacagtaaaatatcaaagatcacactcatcaacacacgtataaccaataaagaaaacttaacctccaacataaatatttatatttaatacgttaaaaagattaaagttaccaaatcatggtttatctcaaaagttggcacgcatggacttataatatttactgtatatgattctaggtagtccttaactagttctatagtatagttatatacttgtatgtggctgtttccataatacttattagagtggtttagcagatctagtagagctcgatcaatgaaattaaatgctatgttaatttctcaccattcctctgccactagaagtggagctcgatgatgtccatgaagctgcagaatctgaagcactcttcacaaactttacattttccattcaaatagtaagaaaaagaaaatggaaaactcagtaaatgtatgaaggcaaataaaaaaacaattattacgatagtataataaatttctatttagaagaatgaaggtagcattttcaaaaataaataaataaatacataaataataaaaaagaaaaaataattatgaagctagctagagcgtataaagtggacatttgtcacaaccttaagagcagattttgagcgtgacttctccatcagaagtaattacaataagggtttagggtgtatatgggctactcaagtattaatggagtgatcaagatgatgagtcttatggttatatatagtgatgaagttaattgtaatgtgtgggtaggagattggtaactgtcttgaatggccatggtttcaccaacatgtgcttacaaattttgcatgcaccaaactttctgattaaacttccctctcaaaattcatttcatttgtcaaactcaacttcatcagcatctctaagttccttcaaatctcctctttgcttttttaattctttcatgacagatttctggctctgcttcacatcagatcaatatgcattaattttattaatgcatttatatcgaaacatataattctcttttaaacaaattatgtatatatatatttatatgaatatttgtcaaatttattaaaccactaaacttaaagaagagactttatcaaataccatgctagaaaaaacaaaacaattcatcagtaattaattccttcagtctctcaaaaaagggaaaaacaaactaattcgttggatagtttttattatttgtctcttctttaagtgctcaacacaatagtatatagtgtttggtattttaaagtaccctataacaatgctcaaggaaatttttctatccatttatttaattcgttggaactaggacttttctttttttaaaaaaaggatgacttaatattttatttgtacatttttttcatataaatattatatcatttaaatattacattattattattatcattatta

SEQ ID NO: 295127 - DNA, 9448 bp, Cannabis indica
ttttcatatattttttttttatagaacacattataaatgtaaaaagaagatctttgaacataaaatcataaaacatatgtgatatcataacagcgaagtctaatatagagtaaaaaatggtctttaagtgaccctctctggtgagtgatagtcgagtaaggactgcttcgtatgttggaacttgtaatcttggtttgcctaatgatgacgggtgaaaggcctattaatgtggatgagttagtgaatatgactagcaagcttggagttgatcatgaggaggaatgggaagagaatgaagatgcagcgttagcctttggagcaaaatctttggttgggaagttaatttctcatcggaacatcaaagagactttgttcactactatcttcaatagaatgtggaggatgcaaagagtgtggtggggaagcagccttgggtttttaaggggggacttctgatcctggagaaatggccattgtccggtaattggggggatgcacggttagacaaggtgttgtgttgggtcaaagtcaaaggactgccgatcaaactcttcacgaagaaaaatgtgactcgattaggtgaaatggcaggggaagtggtagagattcgttggggagatgagaatcgcatgttttcaaatggttatgtgagaatgaggatcgggtttccgttaaatacgagtatctttgtggggagatttatcccatgtggggggaagaagcattggattcatttcaaatttgaacatttacctatgctttgcttcaactgtggaatttggggacatgaacaaaaggattgtgctggtgggatgcggcgggaaactgatgatgctgggaatttagttccgaagtacggatcatggctgaaagatgatgacccctgtcccaatgggtttgtctctgctggaatagtgaactcagcctctcctatcgataatggacgacattgggggcaagaacgaagctcggggaatgaaggtgtcgtacatggtggtccggccaaccatggtggagagtgtacagctgagggtggggaacaaacggttattcgaggtgtggaggagggagttacaaaaatcttggagggggcggttaatgtacagatggatattatggggcatacactccacgtggaacccaaggaagtcaaggccacaactgttgggccaagtttgaaagcaagtattgggcgtgaaattaaaggcccggagtgtggtattgggccgactatgagtaatacacacccttgtatggatcctactgttgcatctgggtcagttcactcaactttgcctgatgttacgattgctgaacatgataagaaaaagaggaagaatggagaagcgactgttgctattgattctgaggaaattcaacgattgaggagtaaaggaaaacaagttcaacaagcatcggtgggagtggatggcaatgagaattttgcaattggggtatcaactggggagacaagaggactggcttccacatcaggtcagcgtaagagggtgtccattaaaactagagctaggcttgcgaagagcaatgggaactctcgggggcattcgaaatcggttttggaggaatcgaaggcccaagttggtgttccaggaggtgttttttcggtggtagagtctcatactgggggaaatcatggtggtttgggtcttggggagaaggaggtgcagttgttggttcctgaggtgggtatttctaacgtgttggatttaccatctcatcttactaaacttgaagcggcgagccttacgcagcaaggctgccgagcacaatgaaactcctaagttggaatgtccaaggaattgggaacccttggacattacgtgctctacagtcctatgtaagagattttgatcctagtattgtgtttttagctgaaagtaagcttagtagatctcaggcacagcgatggagtgccactctgcaattcggggagaacttttggtctgttgatcgggtgggattaagtggtggtctgttactaatgtggaaagaagaggttactgttcgggtggactcatcatcaccatgccatattcatgctatgatagctggtaaggactttctcccttgggcattgacttgtttttatggtaatcctgatgcttcacaaaggaaattttcttgggagctacttaggaatattaggaggcaagttcatggagcttggctgtgtattggggattttaacgaaattgttagtttggcggaaaaggttgggggtaggattaacagtgcgggtgcgatggaagagtttcgggaggttactgatgattgtaggttgattgattttagttctagtaagacggatcttacttggtgtaatgaacatgagtccaatcctatcatggaaagtttggatatggggctttgtaatgaagagtggttacaatgttttgttggggcggatatcaaagttttagattggtgggcctcggatcatcggcctttagtggttgaaatgccgctggataatgatagtcagggggaggagcaaggtaagaagaagggaagattctattttgaggaagcatggacgtgtgaggaggatcaatgtaaggacattatagaggagcagtggagggatgatatggcagtaggatcggggagagactttaaaatgaaaacagaaaaggttggtactgctcttgatagttggaataggaggaaaaagaagatgcttaaccagaaaattaaaaagttgaagacaacattgaatgctttgtcttcgttgtttgatcctagggcttgggtggaagttaaaaaaattgagagacaattgaatagggtgttggagaaagatgagaaatattagcgtcaacatagtagagccatgtggttgaagtggggggatttgaacactaaatacttccatcgtaaggcttcggataggaggaaaaagaatacaattaacgcttgatggatagtatgggcatttggcgaactgagacgagtatggtacagaagataattgaggagtattttaggaatatctttcactcttctcctgcagaactggacatttttatggaggttgttttgggagttcaaccgaaagtgagtgaggcgatgaatgaattattgatgggaacttttattgaagaagaggtggttagggccatcaaagatatgaatcctaccaaagcccctggcaccgatgggcttcctgccttgttttatcaaaaattttggggtaagcttaaacaggatgtggttgggatgtgtttaaaggttttgaataatggtgctgatttggcttgtttgaatgagactattattgcacttataccgaaagtggataggcctagtagagtagaggagtttcggcccattagcttgtgtaatgttatatacaagattgtgtcgaagtgtttggtgaaccgattgagaggtgtgatggggtcggtcctctcagatactcagagtgcatttgtcaaggataggctaatccatgacaatgcaattgttgcttatgaagggctccattgtatgcgtaagaacagattccagaatggtgataagatggctttaaaacttgacatggcgaaagcttatgatagagttgaatggccctttcttcaagaggttatgctaaggctggggttcaaccgcatatgggtagataaagtcatgaggtgtgtaacttccacgagtctttcttttttgatcaatggtgaagttaaagggaaattgataccggagcatggtttgcgtcaaggtgatccgttatctcctttcttattcctcttttgtgtcgaagcattcttgaatttgatccaaaaagaggagagggaaggtaggctaagaggacttcggtttggccgccaaggtctttcggtatcccagtttttttttttcgcggatgatagtttggttttcctggatgctagtatgatgagttgtcaacagtttcaacaagttttgagcaaatatttggctgcctcgggtcagcttattaattatcataagtctaaagtttgttttggtcgaaatgtggctaatgagactcggagccaccttgctgagtttatgggggtgcggttagttgataaccatagaaaatacttgggattaccttcatttgtgggccgtaacaagaaggagttcttagatgagattaaaaataaggtgtgggcaaaaatgaaagggtggaagcaatccatgttctcgatggccgagaaagaggtgctaattaaagctattgtgcaagcgatcccaacatatactgtgtcgtgtttcaaattgccaaaaaagactatttcaagtcttcatcgtatggcggcacggttttggtggggttcatccgacaagaagatccactggtgtaagtggcggtatttgtgtaaaccgaaggataagggaggactggggtttcgagacttgggaatgtttaaccaagcgctactcgccaagcaaatttggagatgcatacgacatcccaataatctatgtagccgggtcttaaaagcatcttactttccgcgtaaaggtgtgttggaggcaagttgcggggtcaatgcatcctttgtttggcgtagtttagtgtggggtaaaaagctgatattgaagggctatcgatggcgtgttggtaatggaatcggtcaaggttttagaggatccgtggttaccaagacttgtcactttcaagatatatgataaacctccattacctgccaatctttatgttgctgatcttaaacgtgcagatggtcgatgggatgaggagtttataagaaatgtgttcaacaagacggatgcaaacttgattctggccataccttattcggattgagatttggatgacaaaattatgtggcactacagtaagaatggggaatatactgtgaagagtggatataggatggctagttcattggattctgaacaacaccattcagatgatcatgctattgttgagtggtggaggaagctatggagattgaaggtacccccaaagattaaacactttgtttggaagcttgctcacaactggctatcatctaatgctgttttggctaaacgtggggttccatcagggttgtgtgtgttcgatgctctagtcaagctactgaatccattggtcatgccttgtgggagtgtatggcaagtaaaaagttttggcgtgtgagtggttttctgcaagatttgaaacggtttgagggggaggatcacttgtcattccttatgcgcctggccagggagtgggataaggaaaaatttgagttctttctggtactattgtggcagatatggaatgttaggaactctgtggttcatggtggctgtagtcctaattcgggggacatggttgagtggtgtggtagttatctagctgaatttagaggggataggggtggcagtaaatcgagggagccgaggtcagttcagagatggacgcctccttgtgcgagtcaagtgaagattaatgtcgatgcgggggttaaacagggtggtacatgttcgggtttaggctgtgttgtccaggacttggctggagcggttcggtatgttgcagcaactatagtgcagtaggagcttcctcctttgcagctggagttgatggcgattcacaggggtattcaaatgggtatacatcagaggtatgatcagtttagcattgaatctgattgtctacaggcggtccaattaatccaaaaaaaggaggacggatatcgagacatagatggcttgctgaatcaaattagatctctaatttttcatggtaattttgttagtatctcatttgtatttcgcgaggccaaccgagttgctcatgaattagccaattatgctttggttcacaaggctagtgccatatggattggggtcattcctccttgtgctcatcaagctgtgttgcttgatgtgccgaatcctgtgtaatgatgtttgttaagcaagaactgtttcaaaaaaaaacataaaatcattaaaattttacaaaaaaaaatagtactttacctaattatttcaattttaaaattattgtcattataatttgtagaaataaatttaagaaaatgagtgacaatgttaaaaaaaataaaaaataaaaattttaggtgttttatttaaaaatccttaaaagaaaatttgatccttcactcactgtcccctgaccggcgtcgccaccgccacggcgagtcccaaccttgtttctcgtggttcctcctccaatcacttctccgctgaattattaggtaaaatcagtgtcctttcatctctaagtttggtttttgttcatgtttattcttatgcattcgatcacttcacttcacttgtgtgtttctcaaatgagagtgttgtttgcattatggtttgtaattagttgttcttggtgtgattcactgtgatacgtatctgattttgtttatttctggtctcttctttgtaattgcttcttcttggttgctcactatgtgtttgttaaaatgcctcaaaagttattagcttgtgattactttgtgtttatgtttgattaaatatatattctaaagattgtttgaattatctctcatcaatctttgattttgatctcatctgtctgtaatatgataaaaccatgaccaaggatgagtatgagaatttttattcatttcagatatgtatattggtttatatatagatgtgatggtccattttaaaacaatgttacagtgtgctcaacttttcttactaatttttccatgtagtatcatcctggaatggaagtttgctagaaggaattaagcaaactgatcaaatcgaaatcagtactcttgtcgaaaaagatagtctgtttgtttctggagggtttcaaggagaacttatttccaaggtgaattttattctgggtcttttgtttttactgatttgaatgtactgattggttggttacttgtagtcttaccatgtattgatttaagattctgcattgaatgactttttgcactgctgcagtgttaagactatgtatttgtggtctttgttgtttgaaaactttctcgtttcgtcgaaatgtctttcgagtactcaaatgttataatcgattctgaaggaatgtttgaacactaaactttttttccacaagagcttattaggtatcactactttcagtcaatctgatttttattcagttttcttactggcgtgtccttcattcttcttctaagaactattgaatttctttttaaagctttaaaaccagtaaagaagacccttgctgcttgttttttattggaatgcaacatcttgatcatcctagatttagctactgcaccaagacctttgtaaggagagttctaagacaaatttgatttggtgtgataatatggcagatattttatgatacatgtactttttagaaattggttggggtccaaatgagaatggtttatgatacaatttcggtttaaattgtttttgaaaatgatatgtatttgttgaacactccttcctccatttctctctcaaaattgagattttgcagattgttggagagctcattttccaaatatgctactcaaaacccgatctatttgctcatacttaccaaaactcacacagctcttaacatcccatacaaaccctagattcaaccttcaagcaaaacctatttcgagtctgaaagtggtatggcgtaaggatgttaaactagaccatgccattgagaaggacaaacacttcaagctctgttcccgggttgtgagggaggtccttaacgaaccaggtcaagtaattccgcttcggtacctcgagaaacgacgcgaaagattacgccttaacatcaaagctagaaccttcctcaccaattaccctggtttatttgatgtttattatgataggatcaaacccaagaccgcaccagttcagtttctccgtgttagtaataagctaaaactatttctcgaagaagaggaaaggattatcacaaaaaatgagcctttgattgtgtctaaattgtgcaaattgttgatgatgtccaaagatagggttcttagtgcagataaattggttcatgtgaagagagaatttggtttcccgaatgattttttggtcaatttggtgcccaaatattcacagtattttaggttagtagggtctccaggtgaagggaaatcgtttctggaattggtttcatggaaccccgagtttgcaaaatcggtaattgagcagagatcagaggaggaatcaagggtgaccggaatcaggcctcggcctaatttctattacaagcttccatcggggtttttcttgagaaaggaaatgagggaatgggttagggactggatggagctagattatgtatcgccttacgatgaaatctcacatttgggtcaagcatcacaggaaatggagaagaggacggttggggttttccacgagctgttgtcattgtccatacacaagagaattccagtaccaatacttgggaagtttggcgatgagtaccgattttcaaatgctttctcgagcgtgttcacaaggcactctgggattttctatatgtctttgaaaggtgggataaagacggcagtgctgagggaggcttacaagggtgatgaattgatcgaccgagatccattgcttgagataaaggataaatttgtggagctattggaagaagggcggcaagagagagcagaacagttgagattgcaaagagaggagattgagaaggatatggaagtgacggctataaggattgaagagtagaagaagaaagctgactttttgaaaccgaaacagatcagtaagtggtgtgcagtatgttcattaacaatgtggttgaatttgagatttttaatgaaagatggctgtgctactacaccaaagtttcaagctttgctaaatctctagttggatatatagtcatttaaatagaatatcttgctatacctcataattctctttgtaccttatgctgatatactacttttttgttcttacaattttttatagtttgaaacaaactgttctacctttagctgaatcgagcacccggcgcctgacattttgagatgtcctttaggagctgaagccattaaggttgaactcgagaagctttcctttggaaactctttggtaagttttgatatttctcaggatttgaatggataatccttacctgttacagctctgacctggattgtatgatatccatttcttctatttggttttgattgaatggttatagagatttacggggatgagacaatagtggggttagacttagaatgtgggaaatggttgaatcattgaaatattatctttccttttttaaaggaaaattttcattaatctcatgcatttgtccatgaatttatgctatatatatatactaggtgaatgtacgtgtcgagccacgtattgctagttttatttaagattttagtctttttaagattttgaatgtattttatttttaaagattacaaattttttgtttgaa

SEQ ID NO: 295128 - DNA, 735 bp, Cannabis indica
aaaaaaaaaaattaaacctatgattagaccaggccataaaatttgaactataaaaatattttgaattaaaacattataaaattttacagtcatatcagttatgctaacaataatacaacatcgaaaatccctttccaagcgaaaaacaaaatctgggtatcgttaaaaatccaattttgaagattatataatcgtatttctccattcccatatagtgattctcataaattggagcttgtttctttgatatgagactagataagttattgaatttatgtcaaaccaacacaaatgtaaaaaatcgtacgtctaaacaagagacaaatacgctgaatgaagcagaaagattgaaatgatacgtaaagatatatatgaaataaaattagagagggagaattagaaagggttaccatccatttcaacgatgggattggtcactttaattttctggaaattctccatgttgggcttatgaagaagtagccaccgaaaagagaagtgtgagagttactatgtgatggtgtgtaactatatatatatatattatatatttatataaattacaatttacaatgtgagaattgaggattgagaattgagaagaaagtcaacgtaagagtcagaactgagatcacacattacagagctacaaatggaccaaatccgtcggtgggtccctcgaagtaccaccactaaccttgttcaaaccaaactataacattttaagagaattta

SEQ ID NO: 295129 - DNA, 3993 bp, Cannabis indica
aaaaaaataaaaaaaaaaaaaaagaaaagaagaagaagaaatgttagaatttatttatattaagaaaaaattataagttccagatttcacagattcaaactcgaaattcaaatatgtcagattgccactggaatcctatctgaactatgtttggggccatcagattcttaacccaaattttcagcattttgcaaaaatttaattattttattcaagccaggctgagttgtcgagcgggagggttttccaggtcttttgtgcagccccataatgtgtgatacccaattgacattaaacttagttacaaatgactatactagtccactccacgtatgatttttaacattgataactttgtcaaacctcaaaataatagagctatcagtttaatggagtataattttccaacattgataactctgtcaaagctcaaacaaatagaaatagggtcatgtctagtacggttttggagccattgtagttatttatttcttttattctaagaaaaccattcataataaatacaaaaagttatacaaagaaaatatcaaagcacaaaggacatgtctctgtcaaggtttcattcattacaatccacacattcagtaccgctgaccaccaagcacatttcactacattcacaaaataaattcatgcacaaatgcatgagattcccatacatgatgaaaacacctaggcacaatctaatttgccttaaaaggaaagataatatttcaatgacagaataatttctaactcagcaacttatcttggttggtataggggaagcagtggtggagtaattttggaatctatggatgaggcactccgccctcgattgccttcctaaggcaatggctcaaaaagcaatgttttcaagctggtggaagtgatgttcttggaagaaattctcatgtcataggcttctgagcaccagatcgaggaatagccaagatggccactaccccactagcaaatgctgcaagtgcggctacagcaaaggctggagagtttccacctccaaatagctgatcccatggtccactcccaatggacaccacaacttgtgggatcactattgccagattcaagactcccattgacaacccttggccaagtcccaaagcttcaatacgtgctgacaccaaggcatatggaacactatatgtgatagctaatgggaatccaagaactgtaaaaatcgtcactgcagctattacaatcccaatgggaggtaaatcatgacgatccataaacccaatctctttggcaacataagtaacaacaagaattgctatgaaacaaagagccataacaatgtttgaaattccccaaatgaaaccagaaccccatttcctacaaagtttctccaaaagcactgatgttattcccaatacaactgagttcaacattagaccaagggcacccattctaaccccagtactgtagttctgccccttgtttggctcacccccataaatctctctacccatccaatcagtatcgaatagcagaaatggaaaccaaccaatccaggtaagagctgtaacagtaaggattatccatacaggcccagagaaatatctaaacgtaccaaaaagctcccaaagaaaagcttcctcagtaggatttgatgatacggtaggcctttcttctgcaaggagcacggttgtgtcacctgaagtaccaagtggtatttcctgaactgcagttatactgagaattgtagtaattgtaatgcacacaatgtcgagaaagaaagctgatttgagatttgcacaatttacagtgcaagcagaggtaagtgtaaaaggaaaaatcttgaaccaaccgctatacgaaccagtagcgaaaccaagaatgttaccaacagccatgaacagagagaaatatgcattagctactcgagtccttcgatgatccttaccagtaagatcagcgagcaaagctctacaaggaccctgagtcatgttattagcaacgtcaagaatccaaaacccaaacacgaaagtcaccacagctctgggcctaacttcgccacgatcgcctaacaaccacccgatatcagcggaatgaccgattatcagaacagcaacgatgatcgataccgctccggccaatatgaagggcctccgacgaccgaaacggcttgaactacgatcgctcatgtgacccactaatggctgcaccagcaatcccgataacggtccacaaagccatatgacgctagcccaggcgtggggaattcccaattcttgtacgtaaggagtcagaagagaaagctgcaaagcccagccgaattgaattccacaggccaccgatgccacccgaagcaacttccgcaacggaacccttgccctcgctggcggtgccgccctgagtcggcgtcgctcagcttcagggttcgccataaccaaccgaaacctcctcctccttcttcttcttcttctctctctctctctttgatctaactttccttctttcttaacaagattttctctcgttttccgggaaaaaggtggcggcttagttaagaagtcgcgtttgtgtaattttacggtgcggaaagtggaaagtggagatggtggacactgctctgacagtgaagtgtgaggtgtgattaccaaactaaccttttactttaatgaaatttacgatcaagtcctatcgtagcagcgtgtaaactaagcaaaatatataacagtcgtatttttatagaagaaggggttcctttcccaatcaaccgtatagtatcacaccctttaaatttaaattgttgttttgtgaaagcttgttcagaatacagactcattctacgaaacagaaaatagctgaataagtagtactttcctgttttataaaattttgattttgtttggtgtagcagtagcaggtgggggtcgtggggtcgtaggatcttaagtcaaagtatacaatgctaagggcacgctaagtggcatttattagaacaatttattattgattctctcgcagaatttaatatgaaaaagttactaaacactagtaacagctatatcgatacggtgataatatattctaagttaattaagatttttgctcttgaactttaacatgtattaaattatgttcctgaacttttaagattgttaaaaatactcttgaactattgagattgttgaatttaagtatttgtttttcaattttagtaaaaaagtttaacatggatgaaagttcaagagacataatttagtacatatcaaagttcaaggagcatgattttgtagatattaaagtctaaagagtatgatttagtacataaacaattacttaaatagtaaaattgaataaaattagacaaatgtcctgaaatccaacaatctcaatagttcatggggcatttttaacaactttaaaaatttaagaacatgatttaatacatatcaaaattcaagaaggcaaaaattctaattaacttatattttatgattttccaagaaattaatattacattttagcacttctcttttagctgtggtggtagtgtagtagtagagactagagatgtttaagtttaactcggatactttctttcaagtattgcaagtagtaagtgtaacatgtctaaaattagtacaattgtgcttgatgtgatgtaatataagttgtttaaatctgtatttttaagtatatactttgtaacgtttagttttgtaatataatgtataactattaaaaaaaattgggaataaaaaactctcaccaaaaacaaaaatagaatgaaaaaaaaaattcactattgactgaagtaattacaattatactacatatattttttttataaggaagaatcacttgtctaattgttgttttttaatatactagcaaaaagttagttgcaaggcacgtatactaaattttatgttagcttttttctatattaattgaaagtgatacaattaaaaattaaagaaaaaatattattagttattaggtgagattattattatgtgt

SEQ ID NO: 295130 - DNA, 2960 bp, Cannabis indica
gtgttgatttattgtttttcataatatttataaaaggaataaaatatataataccttttatataatgaaatgtattttaggtattaaaaagtaaaaagaacatttactttattattttaaaaaaagggacattaattatctatagaattaaaaataagatcatttacttacatttctcaacaaaatatatttcaatatgtattttcaagcatctgacaaattataataaaaagttaaaagtgcactccacaaatatttttcattattattccttctctatctaccattagattatataacaaataacaaacaaaaggcagtacataaagaccaagaacaaaaactctacttgccaaaacgaatgctagtacatcaattttcagccatataaaagtaatatttgatatatattataataaaaagtaggaaataatctaaaaatccatggcgagtattgggctttggtgtccttggtctctgcaacgtccactgagccacttcacatttgtatcgaagaataacaatggttggtcacctcatcttcttcttcttctttttctttacttttaatcaaaatctctgctctctcttttttcttcataaaagggtctcccaaacttggtaaacaacaatgggttgttcgatgctgcaagaacaacgagcaacaacaatggtatccttccatttttcttagcatttgtgagaaataggcttctttctctctctaatattaactgttaattttggtgcagtttccaaaataggagggaaattttggtgggcatgaccatgagtgttgttgggttttcatttaattcaattttgtcagatgcattagcagaaaccggtatcaatgccttccttcctttaaagttgccattttttctttactattatttcttattctaagtgggtattgggtaattctttcagaagtggcagaagattttcgtatctacactgatgatgtaaacaagttcaagatatctgtaccaaaaggtgagctgaaaatgtctgcctttttgtttctgttcaacttgttctgtatataatttcaaattttcaatcacttgctttttgtagggtggctagtggctgcaggtgagcctgatggattcaaatctgtcactgctttttacccagaagggaacactagctccaacggtataagatcatagttgtatttctgatctctatgtgttcgatagaatgactcaattgggtttggtttcctttttcactgctaccagtgagcgttgtgatcacagggctcggtcctgatttcaccaagatagaatcattcggcaaagttgatgagtttgctgagactctggtaagcattctcaaattctaccaagttgttgttgttgttgtgacatttcttttgttctattcttctcctgtcttaaattcaatttcgtaatcattacaaacaggtgagtggattggacaggagttggcaaagaccaccaggagtggcagccaagcttatcaatagtaaatcttccaatggtaaaagactttaatccagcacatagttgtatgttcttgactttaatccaatgttacatagctgcatttggctcagtcgtaacagatgtatgttcgaaagaagcagtttaatggcttgggacatagttgtaaaatatcaaaaagttgattcggatcagaattttgaatgttaaagtgaaaaaagcaaatgtacaggagacgattttttattcaaaaattatgaatgagtagttttgttctttgctttttgtaagagtgctgcttgtagctctcttgtgttttggtggtcgtatgtttgcttgttgattaatgaagttcattttcttcttaatcaaaagaaaagaaaaaaaaaaattaatcgagcattggtttacaaaactctggtattgtactaatgttgcagtatattttgtactgtaatcatatcaggtttctattacatcgagtactccttgcaaagaccaggggagactcgcagatacttgttctcagcgcttggaatggcatctaatggttggaacaataggctatacacaatcactggacaggtattaatacattcccaagattttttagggtgaaaattcatcttagcgtatgatcaccttgtgttaaggtcttaaatttattgaaaaactgctgagaagaaaacgattcatgatatgaaaagtttataaaacacgaatacaaacacgactcacataaattttgtgtcgtgttgtatgctaagcagttgctttttgcgtcatcgtgtagtgttagtgtcacgttgagttcttaaatttattttatgaagttgacataaacacgacaaacacgacgtgtgccacgaaaagttgataaaaacacaaatacaaccccaacacaaacttgagtccgcataaatttctgtcgtgtcaaacctgtaaaattccgtttagtattcgcgtcaaacccgcatattgtaactaaaagtttcccgcccttaaagtttttgatgtcttgaaaccaaccaatttcattggatataacatttttggatgtagtttgaggaagcagatttggacaactatggctcacagatacagcaggtgaggacttaagtaataaatcttcactcaaattataatgaaagtagctattaatccacttctcaactggttttgcaggcagtcaaatcgtttaggtttatctgacaactgatagtgtaaccagccaaatagatggatacataacaatcccaagtttcaacttgtttggtgttaaaatgatgttataatctcaattctcaatcattaattatttgtgttctattttggagtgcatcaatgtaccccattattatttttgatatgataattttaaaaaaattcaaagcaaaatttaaatactattttacatgcgtataaattaagcgtacaacaaactgtttaaacattatttttaacgtattaaattattctaaattt

SEQ ID NO: 295131 - DNA, 6987 bp, Cannabis indica
tttttcttaattaatattttgaactctgaatcaaatttggaccttgggacctgaatctcagccccaactctggaccccgaccaaacccagactcggccagaccccaaccccgaccccagacctataacctaactcaggacccgaaccttagacattagagcaagacccgactaaacccttaccacggacccaaacccaatactcgacataggacttggactccagcccacattgacaccatgaccccaccctggacccgaccccaacctggaacttggacggctagacctaaatccggacccctgacctgatccgtgcccgttttaaataaaatcaaaacatgaaggaaaataaaaaaatttagaacacactacttttttttaaaaaaaataaattgaagaataaaagtagttatagaacacatttttatttttaaaaaataaaaattttgcattaatatttgtgattaaataattaaaaagagcaaaaatgttaccaaatacctctaaaattgtttccaaatgttaaacgagacaaaggcagggatctcattcttcattcgaatgggacccttctaaaaaaatgaaactcttaaaaaggccactcagtccattaccatggttggctttgttccactcttgaacggcccacttctgatttacatgtcgcgcattcaccatcttgtaatttgattttaagaagctcctctcttgcttctttgttcctctcacagaaaactttctaaaaagaattatgaggaaaacttaagaagaaggtatcaaaaaataaaataaggaaaaagaacgaaaggtgggaaaaaagggaaaatggtaaaagaaaattctagcctcacctgaatcctattcttcaaatttctttttataagaaaaagaatcagattccccaataactacacaatatctaagaaaatggcgacaaaggaggttgatagtgaaaattgaagcttgacataagtttttgccacaaatcttggttacatttaatactatatgacattattattgtcgcacacaaacgaaaaggttatttggtgcgaaatgcaagtgtaaagaacacataacaaagcagcaatcggcatgttattgagaaacatatatttttataatcagatgtttacatcccaggatccaatttaaaaaaaaagaacaaaaacaatcccacaaacacaatttgtgggaaaagcaaaatggtgaaaattttcaagaataggaaaataattttaattgggtaattatggctagatcaattcttttctacattcacaatggcacaagaaaacttttaggatgggggaagagaaaggcctcaaagaatatgctaacatgcgatccgaaaaagcaaactaactgaagctatgggaaactattcatattgtgcccgtcgtaacgtaaattgcaacttgcaacaaaagccacaccacatggtaacagagacaatcggtccgcaaaatcacctcttcttcagccctttccaggaaacctgtcagtcaaccaatcaacacttatatcgcatcaaaatgagaaagtgagtggataacataaaataatcatccctcaaaagagaatcaatgagataaattgcatcacaagatcccatgacatcacagcagtatttacaacttttgttcccttgaaattccaattatagtattctagttatgtataaatatgtacaagggtatcttctacatgatatatcattgctcatacagagaaaaaaaagtctcacctaagtaagggatccatatggctggaccgaaaatcttcacaggaacctagtgatttggtgtcagcactgcaaaagtaaaagaagcaagtaagaactaatatgtatgagaaaattactaagctggctgaaaacagaaatctatccacaaattcccatataaataatctagggaacacagacgtatgacctactgccttagcaagcaacaagtcagaagaaatgaaaagatgttgaagcacttgatagtatataaaaaacagaactgaacaaatagttagcaatcatcaaatcaagcaaaatcaattagtgaaacatcataatagggtcagtatttagtgtgtgtgtgcgtgtgtcagaaatataagtctgtttaagagatttatttcattttggttagttgtggaaaaggttacaccagaaacactggaagagcatgggagttagaaatggcactttagaacaattaatcaccagagacaaaattggattttcacactggcccaaccaattccttttaggctgacgggattccttcattattcgtaccccactcttcgtcagcctcgttaccattaacgagtactgcaccatctgtagaatcagcatccaccaccacagcctcctcttgactcccatcttctccattctgttcctcaactgtatgttcatcattctgttcctcaacaatctgttcaccattctgctcagtaacctagtaatataagagatcaatgttagaaataaataaatgtgttattcctgtttcatttttttttcaagcaacccaataatagagaaatcagcactaaacaaacacatgcaaaagttggtatgtcataaccatttcatttataggaaggatattgaagaagatcaagtaactgaattgagtgtactaatcatctagaaaataatctataccataccataatccaagtaaaagaaagtggccgcagaaaaaataaatagagcaactaatatgaaagttaggccctgagtacctcgtaacttgcatctccgttttcaagaagttcctcttcttcaacttgcaagttcctgaaggcctccacaagggtcatgtgtgacttatcagcatggtgtaagtattcctctgcacctgggtaaacacccctacaaaacaatcagaaaggaaaattattaaatgtgtgactttagtgtatcctagaaatgggaaaacataaattgaatcacttgtacacattagcaagcacaaacaaaataatagctgcagcagaaagctaccttgtctgtgcagctttagactcaacagaaagagcaacttgccaatcctcaaacaaattaggatactcttcaggatcagccaacgactcagcagctttaggattaacctgcggaaattgtgttagaagttgcacatgagaaacatggtcatgcaaagtgtaaacataacaaaggtgagcataaaagttaccttgtttagatcttttctccaaatagctacaatctctgacaccttacttggaagataagatcgagccattagagcagcctcaggtatccgcttactgtgacaatgtaaacaaaaaggataagaacatcaatacccaaaatcatatgatttatattttcccatttctaggatacactaaagttacctttccaccaacagctcaaggcattcttccaaacgacccaacatgaataaacaaaggaatgcaacattgttctttccttgctctttggcaagaacagcaagttctgatatcccttcagcatctcctaaagaagaatagagcagaagcaaaccgcttaagtccacagcatgctttaaacaatcttcggccatctctaactgtaataaaaaaagcactgaataagaaagtgaacttcagaaagatataaagatatgactagcattaaatatggtccataccctcccagtagacattgctagctctcctaattgcttccatttagactcactttgaacttcagatgcaatttcctgaaaaagaccattgagaaagaaattatcaaggcagaaagcagcaaaaaatcatcttcataatttagtaagcagcattcatgatgctagttaaatatccttgctaacataaacacacggatttacctttgcaatatcaagtctactaagctgaatggctaagtcaaatctgtaatcagggtcagttgccacttcaagtgcttcttctaccataccacgtgattccaagaaatgtgccacactacaatcaagaaaatttccatggttagtattcaatagaaaatgatttgcagcaattgttatgattttctggttctaaaaacgattaggggtaagctaggagttcaatttgaaatatacagattttttctttgggagaaatttccaaggattgaacatcattgaaaacatagatttatgaaccttgcatcatacaaacagaagcattggaaacagttttgaaaagactagaaaacaaagccctaccattccacaagactaacagcaaattccgaaagaattatttaaatatataaataatatattatatatatatatatatatctcacaggcaaaaggttctgatatacctattatggtgctctttgggaattgaaggcaagagttgattggctctttcaaagtctccccgcattacaagagttttgtactcaattaggctaaggagtaatgtgtaccccataacactgcacaggaaaggaagcagtataaatcacaaagcaatgaagataaatatcacagcttttaagaacaaaagtagaaccacacttacttgaactctttgtcgatcagataaaccctgctttgactagcaagataacccaacaagtacataggtctatctaaatgaaacatggtggttacctgaaatcatagagccacgatacattcagctttgaacattcatggactatatatgaacagactagactgcctgtaagaaattttcaagacataggatagatgatgcaatacctcaccaccaacacagtaattgagtctccaggaggagttgttgtaaatgaaacaatccccaacccatagaccagtcctaacacgttcattcatttcatgaagaagctcgaaagcatcttcaacaccttggtcgtcaatgggtcttccactatccaaataagaagaaaccacgtcacgctgccaaaaaaagatcaattgagcaaatcgcacatgcatatgtaactagtgaagaaaaagaaacacacgcttgttacaagattaagaaactatctaattcttcttacattatacttcaggatgtagaacgacgtatcacttgcaatggctaccaaatcaccactatcagcccaatagaggttctaaaagttcaaaagtagaaataaaaataatattaaacaagagtaaataaaatgttacatataaatatacacaaaaaagaagtatgtagtgctcactttcacattgacatcaattcgccgaatcaacctgcattcagtccaatcataaaaacaaataaaatcatttgagcacattgccaataaatttccaccaaaaatgcgctcagcagaaaaggttggccgaatactcttcttttcctgaaacataccaagtccgttaaaatgaatccctaggatccaataaagaaattttagcattcactaaatgacaataagacttagtcacataaagctcataaacaactcaagatgcaagtacagatatatgacaggaagaaaaataaatagaaggaaaaagataactaatgtaaggagaaaaaagtgctcttaaaaagttcacccctcattcatacaaactagggcaattagaagaataacgttaacagaaataaggttagtaaacaaacctggaaggttttactgaaaagcttaatctttgaggtactctctcggacagcatattctccatcagtggaccaaacgaactccaaagctgaaccaaaagatcgatttctccatgccaaggcagtataaataatgtactcaccatctccgcatacaacaacaaacctcccatttggattgtgttttagactctgacagaattatacaattggagtaagatgccaaacaatacgcacatgtaaaagggaaccaaaaagtctacagcatagtttatatcttatgatttcattttcagacaaaggaaaaaactgttaatttgaatactgcattaaaggagggggagaaaaactaaattatctttcaaaattggtaagagactattcttacttatagcttagttaaacatctaaaatggacatgcaagaacttatctctacttattttgataaaatttgttagagaagaaaacaatcataaagaaagataaatctagaatatccttaaaaatgtaactcatttttctgccattaaaataaaagttcaagtatataactaacctgtgggtaaagatcgcaggtacccaactccttaacagccaaaggtaatctctctccatcagtaacctagaaagcaaaacagccaaaaactctataatgtaaaatgtcaactaatgagtcaacaaactcagttgtctatttagtttgatgctgcagagataaagagtgtccaaatgagttcaaacctcaaaatctgctcccacactcctaatgttcacagtctgaatttcattatgcttagcccaaataatttttccactgttgtccatactagcaacaggcacttcacggccaagtttgaccataatagtcccttcatcataaccaatcacaaccctattgaaggtaaatgagaaaaacaagaaagaaaaattattaaagcatacattcagcagacatgtaacaaccggcatatattactctaacccaaagcctgaatgatggaattaaaaataaatgagggaaacaaaaaccaataaacttcaatactcaccgacgtgagcctttcatgtatccaatggcccaaactctctcgaggccatagtttaatgtgttctcaagcctgtgattcaataaaagtatattttaggatatcgaatttgacagtcaactgaagaagtaaaggcacaaatatagtcaatctaaaaaggatatacatatattttacagcaagagggaaacattttattgcccacaaataaagtttgaaatgtgactcatctaatcaatttgggctcgtttggaacgccgtattaggtcgtattgtattgtattgtattatattgaattggattatatatcatatttttatataatactatgttaaactttaatt

SEQ ID NO: 295132 - DNA, 2249 bp, Cannabis indica
ataacatattaaataaaatataaaaaatcaaatgaaaatatcaaagtatataatatattttacaaaaagtagtattgaatcaaaaataatattttatatatgtttaatattattgtaaattttattaaaaaattgttgaataatatttaaatatccttaataaatatatataaaacatggaatgaagttgcattgacattaaaaatagatagaagtacatttttgtgaagctaattacatgagaaacaaattaggtgcataattttgtccccaattatatataacaacaccaacaaaggagaaatacataaatatattattaatctttttgttaaaagactaatattaatgtagttttagacaaatttgttgatatatttttgtataacaccactgacaataattttgtatgccttttcagtgggatggtaagcatcccaaaatacataattagtttcatccacacatgtagtgtcgaatttgttgcatgtcaatgctgcctcaataagcccagtgccacaacacccttttctcgaaattgtaaatcctaaaatacacaaaaacaatatttagaataattaagtataataatgattattaatttattaataattaattatatttctcaccatatcgagttgggttctgaatgatatctaggagtggatagtaaatatcaacgtagacaagtcttgtatcagggctaacataatttttggtaagtgaatccaacatagcagagactttagaattgaacattatggctactttgttctcttcttcataacaatttctttctatgcctcctcctagggttcgttgagatggtacacatccaattggaggtgctccaagaatcccaattcttcttgttcccaatccatacaattcctttcaattttaaataattaaattaattatatttataagtcatctcacacatttatatatatatatatatgaaaaattcggtgcactcttatctatttgagtataaagaacaaaaaaaaaatttttaatatgatcttatatattttagttatttaagtatatttttaaaattttgtaaaacttcaaaaaaatttaacatgccaaaaataggattaaaagagtctgttgcatgcgtgtgaaatagatggtttaaatattgaattttatattgtatattagtacaaatttctcaaaattttaaatgatatctttaataattataccataccgactataaaaataactaaaaaatttgaaatagttaggggttgcaccaacatagtgggcacctatgtatattatacttgttatcttctcattagataacaaccctatctagctgtttagctagtaaattaaatgatcatgatcttgcacaatatataattttttctatttaattccttacaaaatagttacatttatatatatggatgattatttagtaaaatataggattcttaattttgtaccttgacgaagtcagaagcataactgatcataagatcagtgtaagcagaagtatcgtattgcaatcttctaacacccgcagtaaaatatgtattggcaatatcgttactgcttagtgccacaaaagccacactgttagccaggatcacctttgtttgttcttctccagctattcttttcaacttctctatgtactctttgaacttctccaattggtcgcttagaggtgggacattctgtttttatatcatatacaataattaagatctagagatatatatagaaagaaaattaatagtaaacaattaatacttaaaaacggtatatatctaccgcaagtttagaagtcaatggatcatatcctactccaccaacagcaaagcacacaccagttagcagatcttttggtgttaaatttggatcagcatacggtggtaatagttctttgattcccaattcatccactgagatgaaattgaaaataagttaatgattttgttgtcaaaggacagagcattaagaacttgtaatatataaatcaacaaaatatgtttttggaatggaccaaataggcaaatgaacaaccaataaaagacagagtattaagaaaatcactgtatagaaagtgattataaagcaaacaaacaaaagagagggatgtacggcagaatctttaattatacgaatactaaaaattgttccgaaaaacatgaaattgagacctatgaaattagagcaatgaaataagaaaatagggaaacagctaaaaaaaaaaaaaacaaaccttt

SEQ ID NO: 295133 - DNA, 4455 bp, Cannabis indica
ggacccgtagttggtgttgggatgaagtgtattaaaaataatattataactttacacaatcaattaatacaagtcaatatcaaatattgtattgtattaaataatactaatacaatacaacacaatccaacacaatacaacataccaaacaagcccatagtacatatatttgttcaagcaaaaacggtgaaactcaaacattcttcagctgctattgagcactttgataataaaaactgaacttacaaaattgaaaatgaaacttctttaaattaatagggattaaccaatttctgtacatgattaggatccgcttctgcccttaaatccatacctagtgtctaagaactaacataaaatgttactaatcaaataagaaaattgctttaaaaaataaacataatgtaaccaaaaggagatatttaaacaatttttatcattttgtatgtgagactctacaagggtcataattaaggaggaaaaatctaatttattattattgttattatcatttcatgtagtatggataatccaactaaaaggattaagtcattcaatccctctcctttcacccgtatccttattccccatcacctacctctccctctttcttaggtgaacagaaccgaagatcactccagtctccatcaatataaaacataattcatgtatatatataaatatatatagatcatagatatggagagagagagtactactaattttaagagtaaattctaaacattgcttaaactttggatcatcttgggaggttggagcatgcaatcagaatgttttatgcttcttctatcgtcataatagatttgtcataaaatgcaccaaactataattgattaaacacatggagtaaaagaaaataacattgcaaaatgcaatcttccagagtacatgtggcgttgggaaaactagagatttacaatcaacctgaatcattacatttcatttcatctacaccatacaaagataatagttcccctttaccaataaaaactacaaaggaaaatattttgtagttatacacttactacataaagctttactccctcctagccttctcaatgcttgatttactaaggatgagaaccccaactacaataagcatagcccctgcaaaccactgttaaatcatacagcccttgtgaataaatttaccatacataaatttgcccaaaagaatctcaaatttggcgaaaaagataaaatcaaaccaacaaccatttgctatccacaaaaggatatgagagataatcaatgaatggtcactctatgcacaataaatgttaggggttgtggtaatcaacaacaatgggagattcacaaaatcaagggataaaaactcaagaacagtggaaatcaataaacaaagtcagcacaaaggcttgcacaagttgtcgaattttgtccaaaacctttattcaaattgctacaagagttgcttgaggtctctacaaaatggaataaggagtgtgatacaacaagtcgaggaaattcaacaagtcaaactgtattgatgaaagcttgtaagaacgaggtggtataaaaccccagaaattctattagaaaaagcttgtaaataagttaagccctgatattaaatcctacaaataggattaaacatttttaaaactcaatgtgaagccaaaatgcaagctttaagtgtcgcctacagtataatcgtacaaacttgcgtgacatgtcgcacgcaaccccttctaggtgacgcgtcacctctaagcctattgcacttttccaaaatgaacctaaacactttcaaatcttctcccaactttttgggtaagcttagaaacatgtaccactttagacccatttttttttaatgcctacaacaaaaaagtcaaaagttcaaatcgtttaagtgttttgcaccgctttgcgtaaatcacttaaccttatatttaacaaatcattaataacaaatcctcaagctccacaattttatacgatttagcactcttgctaacaattgaataattaatgtatattcacaagaactaacaaattgaactgcgattgcaaaagaggaagatgattacaagataggtcaaaacaaaacataactacacacatacacatgtacaaaaagggaatcaagattcaagaaaaaagctgtttcattttgcctcatctttaacataagaagtttgagacccttccatcaacttgagtcacaaaccaaacacacgtgtacccacttggcttactttcaaataggctaccaaaagagtggcttcacttaagaatgtttaattagaaatattttcctgattatttggttacacagctataagaagcacccggggaagcactctcctgaagtgagtccaataggtaatatcaatacctttgtgaacttgagtttcactcacatgccctctatcccaaccctttccccaaattcctaggcaactcaataatcaaaacaaacaccccctcaagggaatctgatgtccttaccaacccatcattatggaaactataagaagcttgcaaagcctattatttcatatccatctgaatggtgtgtaaaaaaaacgcatctcatcccatttaaccaatatcggtcaacaccaacatgataggccacctctgtacataaaacataggaagagaactaatgacatggatcgctaaatctattcagtttagtcacctaatgttcctattttctgttatgttctaattctgattgtaaagattactaacgtagctgtaatataaataggacaggagcaacttctggggattgttggataatttgtagagggaaattgggagagacaggctctcaaaacaaaaaccagaggtgttcttgtttcgattttcaaagcaaatcagaatcaaacagtgactattcttcctatctttctttgtgcgtaaccacctcagaaccagcaaaaatcccccctgtatagtgatagcactccggcactcagtaatgcaggaaacaaagcataatgaattaatgataacatttaccatttaaacatgacaatagtcagacttttaaattaacctataaagttttctcttcattttatttccatagaactactggaactactcatttatctattcttcctaatgatattaaaagaacagaaaattacttcagctaaacattagaatatagatcatagaaccttttttttttttttgcaaaaataaagataaagaattggagaaggtatcaattggtttttacctgaaatgataatggttcttggaacaaaaaatatccagctagaccagaagtgaggaagttagtagcgaaattggtcaccgtagcttgaagagatgatagagctttaaggctatttacataacatccccacattgtcacattgaacagtattattaaaccatacctaattatctgtattaacattaccgaacaacaaattacaaactaccaaaacaagtaatttatgcaatgttgacaaagtaaagatgtatgttataaatccccaattgataacttatatatcttaaaattggaaacaagtttaatcgatttgggtataattctgacatgttgggaaggcgaacctgagtggtaaaaagctttgcggatatggcagctagagctgcgttgagtcccgctgatactgcccaggcgtaccctgctttgttgatacacctcatcctcaatccttaccaatctacaaaacgccgtcgtactcgattcggatctcaccaggagaatcccacctctctctctttctctttctctcttataatataagaaaatgaacttgcatcacgtatgtctttaatattttagttatttaagacatgttctcaaattttaaaaaaaattaacatataaaaattaaataattataattataactataaaaattattttaaatactgttataataatagtatcccaacttaaaaaaagttgtaattgtcgaaggtgtttgagctctaaatatgaatttagatacaatacgaatacgatacgacaaagtaaattaagacaacatgacacgtgactaataaatttaagcacgacacgatatttacaaattgacactatacgaaaagtataaagataaacacgtcatgacaagtccaaaaaaacgtaatcacaaatagactaacccaacaatatatcacattaaaagtttttataataataatacatatggatttattaataaatatttaaattttaatcattttaattaatattttatatgattatgtgtaaatattattaaaaaattatataaaataatttaaactataaaaaatatagaataattagcttttttagtccctgtacttatgacactatactatgatgccccttaatttataagtgtagttaaaaataccccctaaaatatatcagttggaatagtataatccttctatctaattttgttaaaattgactaaagttgac

SEQ ID NO: 295134 - DNA, 4974 bp, Cannabis indica
cacaaaatctaacagaaaataaatacaagtattaatggatgaatgtttctctctattgcatttaatgtctgagttacacaattaattttccaaccccttctcacatcagaaatgggtatttgtaagctctaatgacttgaggtacatggtggttcgaaggagagaaagtgtcactttcatgctacacgttgtaggtgctggagttggccttgtacctcgtacctttgtcgggtgttaggtggtcctcggtcgcagaggtgtggctacagtgtacttttggtcgggtcctcagaccttataggtgcattgtctccactactcgcactttcttgctttcaaagtttgtagggggcatggttgtacgcttctcctttacacaccttgtcctttgatttcccctttaacgacatcctcttttatgtgcattcaaatttcaccttcacttattttcacacaagcaacacactttgcattgcacaatctctccacactaatggacttgcatgtgtacatccatgcatgcgcatgctcgcatgctcgccacaccatggactcgcatgcgagcccctcgtcttgcatccttacagccacatgctcgcatgcgagcccctcgtcttgcagccttgcagatgcacgcacacacgtgcatgctcgtatgcaagccactcattttgcatccttgcagctgcacgcacacacgagcacgctcgcatgcgagaccccaatgggctcgcatgtcttgcaccctgcagctgcacacacatgcatgtacacactctcatgcacacattcgagtgcacatacttgcatgcacgacttcaccttcttacgtcctctcttttgtcgttccctcattcgtgaatgatcaccatggggttagtcattgaattgctaagatgcatctcggggactgcgagtatcgacgatgagtttgtgaaatacatgccaggtaggataagctctttggatgcgctttcgttagtcccttggaaattagctaactaaccccttaagttagcagcgctaagttttgggattaacacttgccctctcggtctacaagaattctttcaagtgttcttgtcgactgagtgagttggggaatatgcctcgctgaagtgtgggtctaatcttcttaatgttcttctaggaggtgcccgctttgtattggcggtatatgttggtgtactggcagattctcctcaccttgtctaatcccatttttttagtgaccttagtcaccatgtggtcgagggacatttgtacctaattttggctaagcgactctgagggtcacccttaggccaaacgactttcgtaactgatgttggttgagaaaatctgaggatcactctttggccaagcgactttccctggtgtggtaagcaagtattcatttgagggagtattactctttgagtagtctcttcttcttattacttcttcatccttttactcggatgtgaggaggcttattgtacttgacagcgtctcgtcttgacttgtgaatgtttgcttatgtttaaaaggtatccctctcgttttagtattagaccatgaacgtcttaaagacctcttttggatgggcgacttttgcgagaaaaatgtatttcttttgtcaaataaggatagctagtccttgccgaattagaaatatttatttattattatttttttacttttctcctttgttattattttttgaaagaagggaggtattggtttgactcccagatgaggtgcgattgactaattccactgtgatattcatatattctaaagaataattcgaatgccatctaagtggccttttgtttcattacattggagtgtggaggtggaaacacacaaggaaacttaaactagtggagtttcctcacgagccgccttccttgacttcaaaactcaatggctaaatgatacttcagactcaccttttcaacaataatacttcttcaaatgtgttgcgttccatgcccttagtattactatatcatccatgcgggccaatttgtaggtccctggcgggatgactttggcattccaatagagaccttcccagttggctcccaacattcctgcccttacatccctagtatttgggaggactttcctcagcaccaagtgtccggtcttgaaggcaagcacgcggactcttgagttatagtatcgtgctgccctttgctgatataccgccaatttcatttgggtcgcatcccttctttgctccaagagattcaaattctctgccatttccttttcatttacctcttcattgaaattcttcacaagaaatgagttgagtttcatctctataagaagtacacaacctcgcacccgtaagccagggagaaaggagtttcacttgtggtggagtggggcgttgtcctatacgcccagagtacattcagcacttcatccacccatcttcccttgatcttttctagtttgtttttaggttcttcttgattattttgtttgctaccttgacttgcccattagcctggggatatactactgtcgggaatcccctctcgatgcctctctcgaagcaatgggaacttagaaaatccccttcaaattgggttccattgtcagtgatgattttgtaaggcaccccaaatctacatatcaagaatttattgatgaaggatactacttgcttagcggtgatgttgaccaaggcctccccttctacccattcggtataatagtctatcgccaccacaacatatttcgccccgactctacctactagtaaagccccaattagatcgactccccacatgacaaacgaccaagggctagtcatgcttgtgagtttagccagaggcacctgctatagctggcatgtctttgatatttttcacacttttttgcaaacatcgttgcatctctctccaaactaggctagtagtatccttgtttcaatactttcctcgacatcgaataacctcctgcgtggttcccacattctcctttgtgtatttctgataatacttgttgtgcttcactttcccatatacaacgcaagagtatgtggagaaacctctcttgtacagaactccatctatcaagacatatctagcggctttgcactggattctttgagcctccttcttgtccaagggaaacttcccctcttggatgtattcaatgtatggtgtcatcaggagggttcttcactccctacttacatttgatcacactcaatggttggctaggctaagaactctactgacacagactctagaatgtcaacctcggtcgatgcaagcttagctaggttgttagcgttggcattactttcctttgggatttgtttaaccgtgaagtactgcagttattccaggtagctcttaaccttggccaagtatgccactatccttggcccttttgcttggtactctcctcgtacctagaaaaccaccaattgcgagtcactgaaaatccacaaccgtgtaactttccattccttggtgagtctcaacccaaccaacattgtttcatactcatcttcattgttggaagccttggaccttatcccacaatacattttggtccctctaggggctgtcatcaccactccagctcctactccattgccattcgaggctccgtctacatgcaactcccaagtggcctctctctctccactttctcccaactctccattggtctcctgctcttgatccttcctatctggataataggtgaactttgcctgaaatccaccatcacttgctcgttgattactcttggggtataagtgatgttgaattggctcagctctatcgaccacttgagtaggtgccctgaggttttgggcttgtgcaaaacttgtctcaaaggatgattgctcagcaccacgattgcatgcgcgcaaaagtatgacttcaactttcgtgacgctacaatgagcgcgtaggccaacttctcaatttttgggtaacgagtttcatcgtccatgaaacgcttgctgatgtagtacacaggctgctgttgctttccttctcctcttacgagggtggcgctcaaggcgtgttgggagaccgccaaatatatgtacaacttctctcccctttctagtttggccaacaaaggaggatttccaagatggtccttcaagctcgtgaaagctttctcgcaattctcatcccaagcaaacttcttatttcctttgagggtgttgaataatgggagacatttatcggtggaccgcaaaacctattcaacgcggctactctcctggttaggcaatgtacctctttcctattctttgcgattccatgtctattaatgctttaatctttccagggttcgcctctatgcctctctcattttccggaggacacgctaaatacacacttcaacaaatttaacttcatccaatgcttatggagagtagtgaacatttcatccaaatctttgattaaatattctcctgctttcttagtctttaccaacatgtcgtcgacgtagatcttcatgttgcaaccgatttggtggaaaacattgttgacaagtctttggtacgttgtatccgtaattttgagactgaaaggcatgacccgatagcaatataataaggggttaatatatatagtctgtaaagtcctttttgacgatttagatgctaaaatattttttatttatggtgagatttttttgcactaataaaccgattttctcacctttatatttgtttttaatgctcttttctatcttaggaaagaatcttctttcagctatccattttctatgtttgaaaacttcttgtaagagaagaaattctcttatggaaaattggctttttatagaaactatgacttttgttatttctctttattgcattcgattgtgtcttgatatgttcagatcaagcacactatttttggcaggtatcaagaccatatacatgatcagacaccattttggcaagtttctttttctggtctggtttgctgcagcaga

SEQ ID NO: 295135 - DNA, 512 bp, Cannabis indica
tttttactgagagcaatattccatctgctcttcagtctattgtcatagcggatattgctatctaatgaattactttatttcaaaaaaaaaaaaagttgacaaatatttgtagaaaattggtaattttccatagttacatgaaaatatgatattttttattttctacaaaaatacatcgatggttcttgatgacacacatacacattacaatttgatgaatagaacaagtagagttcaaaaaaagaaaagtatgtaaaacagataaatcaaaattcacaaaaaaattgttatcatttacataatttagtggttccacacctcaagttcaaattcccttcctcaatctaaaaataaatctcaagaaattcaatacaaaatggaaagcaatttgatgctacttcgattattttcagtgattgactaaaaacttgatttttgaacatttttaatgccacctcattggttttcaatggttcaaagcttgattttaagagtggttttttttttttttt

SEQ ID NO: 295136 - DNA, 1478 bp, Cannabis indica
aaaataaaaattattaaaatagggtatcatccaggattgaccattaaccagatgaatcctaagtgtcatatatctgacacaatcccacaaaattcggagaattttcccctttaccaattcgtaaaaaggtattcagctaaaggtacaaccgcctttgggattgccacaaccactattttaacacaatctttccgagacaccaaactacgacttgtgcaacttgtctattggaaatacttatacatgatcacattattttctcatgtaaataattatttaacataaataataatttttctataatatgttatctaaaatctttgaattatgtgtgaattttagaatacttaaagtgattgtagcacatcgaaatatgattcttttcgctcaataatctaacccttatttttttctatcacagaatattatcaatcaatgaagacgaatattcaattgaacacgaacaagaatattttcaggatcttatgcaatgctcaattaatgtactaaatagaatggtgcaggctattctttgaataagatattcaaaaattataagggaagagagagattgtaagtggcggctatacgatatttttagagagattttgattgcaaaatcaagtgtaaagaatagctctctaatactaggaatctaggttattttctaactaattaattaattaaaataaataagaaataaaaaagacaattccttggtcactaagtatgccacagctgtccctaagcttatgagttttggctatggacttgtactctttatttagctagggaaatttacatggtataataacttttgctattttttttataaaaatactgccaggtggtattttttacatttttactgtattttttttataagtttcatactgcagtatactgtgttaagttttcactggtgttctagtggtgttttactggtgttctactgttgttttgagttgttctgctttgtgttttactagtgttttataaaaacacagtatttttgaaaagatttccgtgtgacagtatttttgtaaaagttaacccaaattctagtatttttgtaagttttcctttaaggaaatttattggacctaaaatatattttttttttttttatgaattagggaaatttattacaccaacaaacaatttttttttatttttaccacaattaattatttatggtatgtaaaaactaatttaaaataataattactaataattattaaataagacataatttaaatatttttatcaacttgacaacaaatgccaaaattaatagaataccctttttttatttctcttctcttcttctctattttcacttagcattaaaattcacatatacttttttttttgagtgaaaatgtaaacttcattactttagatcatccaaaaccaacgaagaaactacaaaaggtaaagaaaaacaattaaaaatacgatcagcctcaagaagagag

SEQ ID NO: 295137 - DNA, 1259 bp, Cannabis indica
ctagaattacttagcaatttttcatttagacaaaatcctaggcatcatcacaccgaggatatgatttagaccgtgtttggaccgtttgagctttcaagcttatcctttatgcatattttgtccctagatttcctccttgagcctaatattgacactttcatttcttagccactatataacctagctagttattacttcatcttttcacctctacccaagatgcttgatccttacaagattttcatgtttgttgtccatttgggagttgtgaggagtggtgtaagtgagtgtcatttgggtgactatttctcattttcctcttcctttttttttatcaacattggggacaatgttgttctttgagtttagggggaggtgtttctcacttttattgttctcttgctatctagctagtctttgttacttgtattatttatcttcttttcttaaaaaaataaatcagacaaaagcgaaaagtttgtacttgtaaattgcatacccttttgaaaaaaaaggtgttaaaaataagtttggggtgttagtaaaaaaatattattatcgcaagcatatctatatttgtgtgtaaattttcaattgttaggagttaaagctaatggcaagagttgtattttgtgtctggggtctttaaaaaagattagttgtgcattgcatgaatcctataaagatcaaagtgtttagggtgtcttaaaccaaaattatttccttatcctaccctcaccctagcctatcattacaatcttgacaaagtcctattgatccttggaatggtgtgtgttaatattagtggagaggaagttgttaggtaacctatggaggcatcatttgaacttgaggatcaagggttagtttaagtgttgtttgatcaaaattgtttaggaaaagctatgcttgcataaaagggggagtgcttgatacttattttgtgcagaagcatttaagcttaaagattttggtttaaagcttgagtaagatccacattcagtgttttttttttcgtttgcaaaaatattatttatgagagctattttccctaggtcttttctaggtctatttgcatcctatttcgtcgcgttttctttattcagttcaatttattcgtggtttctttctcttttgttgggtgttgtgcctgtcttattttgtggtcttgtcctcatcactcgagggcgagtaatgtcgtaagtttggggggtatttgataatttttgagtaaagagttatttgatatcactttaagc

SEQ ID NO: 295138 - DNA, 4088 bp, Cannabis indica
gagggaaggttagagatgggctttacatgcttggagatgagtctgcttcacaacccaaacaagccttactgtgtgaacttttttcactttccaattcttccaatttcaattctgatgtaaccaactcatgtacttcagatgatattaataataagactcctcattctccttatatgtctagcaatccatctatattccatactgcagttagtaaaaatattaacacatggcattgtaaacttggtcatcctaatgaccaagtcttgaccaagctattacaacatcttcctcatactggcactctaaaagatcttcatttttgtaatgcttgtcaacaaggcaaaagccactcccttccctttccattatcaaatacccgtgccactcaaccccttgctttaatacatactgatttgtgggggccctctcatgctctttccaaagatggttacaagtattatgtccattttttggatgattatagcaggtacacgtggatatttcctctaactctcaaaggacaagcctttgaagtttttattaaatggaaagctttagttgaaaaacagttcaatctaccaatcaaagttgttcaggcagactggggtggtgagtataggccattcaaaaggtttctacttgatcaagggattcactttcaaagtccatgtcctcatactcatgagcagaatggccgtgctgagaggaagcatcgtcatattaatgaaactggtcttaccctattggcaaatgcaggtcttgacttgtcatattggtggcatgcctttagtgcagctgttttcactattaatcgcctccccacaagagttctggactttgtcactccttatgaaactctatttcatagcaagcctgattacaacattctcaagccatttgggtgtgcttgctttccacacctcaggccctacaacaagcataagcttaacttcagaactcaacaatgtgttttccttgggtattcttctcatcataaagggtacctatgtgaaactactgaaggaaggatttatattgctagaaatgtggtgtttaatgaggatttttatcctcacaaagctgcctctgcctccacatcagcagcaacttcgcaggtattatcacctaatcccacaccttttacttgcaattcatccttttatccttcagttagtacatttgctaactctacttttcatactggtaccactgctgcacctgaggacatccatactgggtctgtacctgctgtgtcgaggtttgccaatgctgaaaatcaggatatacctgctggttcattaactggtttgtcccattctgatgctcatagacagcagcatgttatttcacctactcctggtactattgctgcatcacacaacattatacatccgagtgatacttgtctaccaaacattgacacacatgctactgctacaccattacccgaaataacaacatgtgctgtccctttcactgagccaaaccagccagctgttcacacatcaagttccccacccaataatacattacccgaaacactaccatgtgttgtccctgtcacaacaccaaatcagccacctgtccaaacattagcctctccacccaccaatccattacccaacatatcacaaggtgttgttcctgtcactgagccaaaccagtccactatctcgacatcactttctccactacaccaaacattaactcctactaatacatctccatcactcccttctctccttactgaaaatcccaaaaccagagttcatcccatgactaccaggtctcaaaatggcattcacaaacctaaagcatacttagccactaaacaccctctccccgagtcattactccctacagaacctaagtctttgaaagctgcccttcaacatcctcactggtttgcctcaatgaatgttgagttcactgccttaaagaaacaagggacatggactctagttccttatgaaccccatatgaatgttattactaacaaatgggttcatcgggttaaactcaacagggatggctcattagatcgataaatctcgtttggttgccaagggatttctccaaactcctggcattgattatgaggatactttcagcccggtggttaaacctgcaactgttcgaattgtgttgagtattgcagtcactcacaattggccagtcaaacaactcgatgtgagtaatgctttccttaatggaacacttcaagaaacagtatacatgcaacaacctcccagattcattgacaaagacaaacctcatcatgtgtgtctactacacaaggccatttatgggctcaaacaagcaccaagagcatggaatgacaagcttaaacaaactctttatcgttggggttttcaagcttccaaatcagatacgtctttgttcattagtggctctcatgatactcttgtttatctcctagtctatgtggatgatattttaataactggtcctaactcttctcttattgattctattatcactaatctcaactctgccttctctcttaaagatttaggacctgtgcactacttccttggtgtggagatatacagagatgccaactccatgtatctaagtcaaagcaagtacattgctgacttattaacaaagcttcacatggaaggagcaaaatcatgtcccaatccagctagctcctctactaaactaagcttacatgatggagatccatttggtgatgttactctctatagaagtactcttggggctctacaatatcttagccttactcgccctgatgtggcctttataatcaacaagttgagtcaattcatacatgccccaacaaccattcattgggaagcttgcaaacggttacttcgttatctcaaagggactatatcttatgggctcaaacttcaagtttctaatcatttcacacttcatggttatagtgatgctgattgggctagttgtgtggatgatagaagatcgacaggggggtatgcaatgtttcttggtgataacttggtgtcttggtctgccaagaaacagcaggttgtggctcggtctagtaccgagagtgaatttagagccttggctaatgcagcagccgaaatcaaatggatcactcaccttctctctgaacttcaagtccctctttttcaagctcctgttctgtgggttgataaccagggtgcaacagctttggctgccaacccggtttttcatgctcgatgcaagcacatagagattgacttgcactttgttcgtgatcttattcttacaaagcagttagcagttcggtttgttccttccttggatcaaactgctgatattcttaccaagtctctcactacagatcgctacaactatctcaaaagcaaacttcatatggcagtgtccccattccgtttgaggggggatgtaaaccagaacacgtgtgtaaattccattagttagtttttctgctttctgttaagatagttgttcttgtaattagttttgtaacagattctgttacacctttcttgctttgtaactctcctcaatataaataagatcatagctaaccattttctggttaagctcttttggctaattctctgttcttgtgctctgcactttgctctcttgctctgcaatttttcttttagcctttgagcttctacaattttgataattttttttatattttcacatgtatattatattagatcaggtatttactcaaaaaattggcttggtgacacagattttgtttttgacacaaggaaataataatgggccccgcatcctaagataggatagtgttatttgcacactcagggcactcaagaaaacacctagattcaatgaatttgtttttgagttctattctttaacaaataggtcacaattaatgaccacaaaaacaatgaccatgaagctgaacatgtcacttggacaacccggggctcaagggccaagtacaagtactggacgcctaggttgacagcctgcgccctggcttgcatcagtttcagttcccaaataacttcctatatgcaatatgtgtaaagactcgatttttgaccgagtcaaagctatttatatataataataataat

SEQ ID NO: 295139 - DNA, 2461 bp, Cannabis indica
gtttataaaagaatgtgaaatgcaaataataaacataagctacttaaacacacctctccacctcaggactgtatccaatcacataataagtaagacaggtccaaacaaaagattccaaaagtgaaagaggaatcttcaatagagatgctggaattgcgtaagcccaagctgggtaaaaacgcaattccttctgtttgtagaaaatctcaagccttagaatagtcatggccatctcaggaattccattaacaagaagtatggttagagcaaagaacaaagaacccatatagtaattagcataaagaacatcaacttccatcctagtccgcaagaacacagtcatcgtgatgaaagcaacaaggataagctgcatgataaaagaaataaaaccatgttagagatttcactctaaatctagccttcaaacaagcaaaagtgattagagtatcataaatcctgacctggacagttttaaatatgtaaataaagaatttctcttcatgagaagatattctcttgatgcgcaagctctaaaaagttcccatttagagagggaatacagactgaatgagagagcattctcatggccttgagctttatcatatggttgtgagagctcctcatttagttgtttcccaaaatgagatgccttaaacatattggagaaatcatccactgatacatagtggaaagctttctccgtggaatgccagtattgttcttgatctttcttggagattacctgtaaaccagagggttaaatatgtatgttatttacagactataaaatcagattttagatataaaatataaaaattatatgattgtagtgcttgcctcttggacaaaatcagctactcctttcctttctggacacttaaacccacaatcctcaaaaaattcaagaacatgatcacgagggccatggtacacaactttcccttctgatattaaaatgaggtcatcaaagagttcaaaagcttctggtgccggctgaaggagtgaaacaagtactgtactttctgtgatgtgcaccaactgctgaacacaagcaacaatctgaaatgcagtggaactgtctaagccatttgttatctcatccatgaacaaagcttttgttggacctacagtcatctcccctgttgtcaatcttttcttttgaccaccagatatgcctcttctcatggcatccccaacccaagtgtcagcacatatatcgagcccaaggatctgaatggaagcattaggatgagtgaaaagataacaaataagagatacacaaaatgaaagaggtgtggtctgttgaagagaatgaccttcagtatgtagtctgtttgtagagttctctttagacccttaacagcaattgcctgtaaaaacaaacaaactttcattttcaacacttaattgtcacttgcattgcatggcactttaattgccattgtacatgtaaccaggttcatctttagcattcaaaaagaaaaatatgtaattattaagctttttgcagatactctactcgttattattgttacaatgtattgtatattttgttactttacagtttttctactcataatatgataaaataatttagtaaactcataaataaggacaaaaaggatctgaacaccatttgaaaagcaccttcatgtaagtatcaatgtctggatctggtacaattcctgcctgtttctcccttctactgacctccatcataatctcttttataagcagaaaaatacatcatcactctcatgtactaatagaatatccaaacatatgagttatgaacatactttatatatatatatagctcaacaaaacataccaactcggcttccaacaccctggaaacgggctgaataatcaagtgtttctcttactgtcatatcagggatatgctgatcaaattgactgatataagcagccgttttctgggggacaaactcatctagtttgtatccgttgtaagaaacctcacctgttaactattaaagtatatcaaaagttaagtacccagttgagtatattgactagatatagtgttaaaattaattaacctatcattcaccagcaagcatagtttagaaattgtatcttattttctactactttctcattaacatttctttccaaatttgcaggggtgatgataatggaattcatgcaagttggtgagaaggcataatatgaacctttagtgatgagtctaaattcccagataaagcctttagcagtgatgtcttcccacatcccgggggaccaagcagaagagttagcctgccacaaaaagattaaaattactttacttgaggttagtgattttatgaacacactaaagtgtcacacttaataaaccacttgaggctagctcaagtggccataggaagtgtgtgtgtgttggaggtctttggttcgagtctcaggttatgcatgatgtaatatataaacgcttaaa

SEQ ID NO: 295140 - DNA, 5184 bp, Cannabis indica
ttgttggtagtgattcacgaaggcttggacgattgatgctgaaatttttaagaatttttctttcctagcttatttttttaggttaacttgtaattagatttattaacttgttaacacttggactaattttacaatattgtgtaatatataattgtaatttttttttaattacttatatgaaattaatttaaatgtattagctaatcataaaattaatttaaatatattagctaatcataaaattaatttaaatatattagctaatttagacttttaaaaaaaaatatttaatttaaatttaaattaaataatatttattataaattaaaatatataatttaaataaattaaatttcttgatttataataagtttttaactgaaaaaaattaattattaatgatttggcgtcagtttttaagcttttaacatcggttatatgtgcatatggcgtcgattatttgtatataaccgatgccatagtgtatatatagcgtcgattctttgataataattgacgccataaggtaacatttagcgttagttgtttttagccctacaacatcgtctggatcagtatcggtagtaaatttcaccaaaattaacgttgaaatgccttaaaaactacctctaaaacccaaatttatagtagtgtgtattaatgcagaggagaacactaaaatgttcaattctaatctaaaaagaggagaatgcataatgcaataggtaaggagaagtggtcggctaggttttaaagatatttctcttcggaatataggagcaataggtaagcatgtttgaaaaatttcatctaaaaaaagtaatttatgggtgaaatgaattaattctatatttataaaagggaaggattggtaggagtatataaagctcccttgaatgctagctagtatgggagaaaatcggtcagcacgaagaactagattaaaaatagaattaaacaggtgcaattctagaactatcagtatacaattgctgatatgtgtgataaattgaataattcccagcatgttaattagagatattctttgatttgtgagaggcttagtattccaaagcacaaaataattctttggctaactcttaaaggaaggctttgctataagagttcggttaaacaaaatggctggaatcaccaatgatgttgatttttttttttgaaaagcttcaatccattaaactgccaaattggcattaataagagtttgaagagaagcaggagctgacctttctacaaaaccacaacctaaccaaaaacaagagttgcgagcaaaacaatgatgctgattgtttgatttgcggagaaaaggaagaatcaagtcaacattttttttgagtgctgttatagtgctcaaattgggataggctttagaggcttgagtattcagatactggcctgttgaaccttctagccattaacaatagttcatgaagaaaacagagtaatcaagaaagaaaaggaagaagaaggagagaaagaaagactgaaaaagatgaacagaaagatattgttattaaatgagaagtgtacactggtttatatacagatcagttacaaccaacagaatgactaacaactaacacagtcacaactaactaataacagaatacaacagaattaactgtttattccaacgctccccctcgaactcataattgaaaggtctttaattttgagtttgtttttgaaatctaagaatctctggctggaaatggctttggtcagaccatcagctagttgatcataagttgtgacatgcttgatttgtaccattttgttcatcactttctctctaacaaaatacaaatcaagttctatgtgtttagttctaacatgtagtataggattttgagtgagtaaaacagtactcatgttgtcacaccaaatggttggaggttgtgacatttgaatcccaagttcataaaacagataatgtaactaagttagttgagtagtaacattggctacacttctgtactcagcctctgtgctggatctcgaaattgttggttatttcttacttcttcaagcaatcagattcgaaccaaagaatatagcaaaaccagttgtacttctcctatcatctggatttgatgcctagttagcatcacagtatgcagtcaggtcaagggacagaggttttgtgagatgcaaacctagttcaagtgtgccacttatgtatcttaagattcgtttgacagccatccaatgagtggtgagaggattttgcattatctgacagaccttattaacactaaaggataactcaggtctggtaattgtgaggtattgcaaggccccagctattgatcgatacatctcaacatctactactggatccccctgttgagttgacaaacgaagcccactggtcataggtgttggagcagacttggctccagtcatttgtgctttttgtagaaggtccattgcatactttgcttgacataggagcaaaccacaatctgttgtatgcacttcaatgcccaaaaaaaattcaaagtgcctaaatctttcaatgaaaactgattgtgaagggtagagatgagttgagtaacagccataaaatcactctctgtgactaaaatatcatcaacatatatcagtactaggatggtcaattcagcagattgattgatgaagagagagtgatcagattttgaaggtgtaaagccaagtgaaacaagactgtgatgtagcttctcaaaccatgcacgaggtgcctgctttaggccatacaaagccttattgagcttgcaaaccagatgaaattgaccaggaatttcaaagccttgtggttgggtcatataaacgtcttcttgtaaatctccatttaagaatgcgttgttgtagttgcctaattgtccaaccttttgacaaagcaagaactaagaccaccctaatatggtgacaaatttgactactggattgaaagtttcagtgtaatcaaagcttgcttgctgttgaaaccctttagcaacaagtcttgccttatgctggtatactgtgttatcaaggttttcttttagcctataaacccatttgtagtcaatggctgtctttcctgcaggaagcttaaccagaacatagtctttttttttttttttttatatatatatattattagggcaagaatctcatctctcatggctttgttccattgttcatgaagtagggcttcctgaatattggaaggcagtttggaaatcaagaacactttgggtttgtggattctagacttggatctggttttcatctgatggttgttggctttattaggggcattagtaaaacctgtcatttgtaggagcctggaccatgctagcatcagtagttggagttagaacagcagcatcagtagcagtgccatcagaagcagtggcacttgttgcaacaatggttttagtggctgctgtgtcaacaccagttccagatgtgatgacctgttcagtaacatcattatttgttggctgttgaggttaaaatgaggaccttgggaagccagaaactattgtgagatgaggatgtgtgtgctctacaaaaatagcaccctgccttgatgattcacctgtaacaaagatcgaaggttggcttggaggcccactgttagtagcacaagttagattagtggtatctattgaaacatgctaatcaatcctttgattagtactgatgtgatgtgaatgcacaagatcagaaagagtgtaaggctgaccgtaatgtgagcatttgggaatcaaggtagatataggagtgtgaataacctgaggtaaatcaggtgaatcatggtccacaatggtctcataataaggaaaggaaaattcatcaaagactacatctctggagatgtaaagtcttccattagaatcgagatatttatatcccttatgattgagactataacctagaaaggtgcaaggtgtagatctgaaatcaattttgtgcttattgtatggcctaatattgagaaaactctcgcacccaaaggttttaaatgtggtataatcttgctgtttattgaagagaacctctaagggtgatttattatgaagaacagatgtaggtagtctgttgtgtatatacacagcagacctgaaagcttcatcccagaacttaaggggtagggaagcttgggtcgataaagcaagaccattttcaaaaatgtgtctgtgctttcgttcggccaagtcagtgagataagtagaaaattattcacccccaatcaatttgtagagttttaatagatttaccaagttgtaattcagcttcctttttaaagttaagaaaaaattttaaaggcatctgatttattctttagtagatataaccaagtaaatctagagaaaacatcaacaaaatgtatatagtatttatagccattgtgagaaactttgtgtgagggtccctaaataagattttaaactactagttgtaatggttcaaaaatgacagtggtggaagcttttgggaaagaaaacttatgtatttttccaagacaacatgtagcacaaacagagaaaggagaaatttcaaattttattgctaacaggcagattaatttgcttccattgctgaatcttcctcaccagtgacaatattggcactcaaatcaatttctttccccgattgtttgattcttgcttcagatgctaaaagtagagcctcgatttctccaacagtatagttttcaatgcgagtgttagaggagatgacgaatattgtcgtattcacttggaagacccttgaagatagctccaacatgatcacgatcactgagaacttctccacagtttgcttcactttgagaagataatcgttgagagttagtgagcctttctttaggttctgcaacttggttcgaaattccagaattttggacgagacttgtaatgtaaagtgtttctcgagtgctgtccagatctgatgtgaggtgttacaaccaaccatccttgtgagtaaactttcagtcatggaagataacaaccatgacacgaggagttgatcttgaatttcccaatcgacataaccaggattgattctgttggcagcacgatcctcattggtcaagcattcatctagtagaggttctttgatatatctgagtaatcgatttcccttgatggcagcaagattttgttgcttccaaagaagaaaattatggtcatt

SEQ ID NO: 295141 - DNA, 7049 bp, Cannabis indica
aaaaaaaaataaataaataacaggtggggtaggctagtttatactgggcttggaacgtgataagccctcgcgtagaatcagaaatcggcactgcagaatcataatcagaatcagaacgtgtactccactctactcggcgaggccagggtggtcttcctacaaaatatcaaactccggtcacgcggagctggattaaacttggagtgcttcgatctagctctccagccttgatcaattcgtccaatttcaatagttggtttcgaatattctttagggtttgaacgaagaagtcccattgatattacacaatggggaagaaacagcacagcaaggaccgaatgttcatcactaacacggagtgggccaccgaatggggtggcgccaaacccaaatcaacctccactcccttcaaacgtctccctttctattgctgcgcgtactttcttcatcttcattcttataagctttttgcaaatgtctacttatataaaagtatgaattttgaaattttttaactcgatttagtcatggcttattaatttttgatgcaggctcacctttacgcctttcgaggatcctgtttgcactgctgatggcagtgtctttgaaatcacgtgggtatctcaatctgtagctcttgcattttttttttagggtcatgatggaaggctgcttagtttagtaatgttctttggctttgttgtttcgaaatgggtgcaggcatatagttccatatattagaaagtacgggaaaaatccagtgacgggggctcccttgaagcaggaggatcttattccactaacttttcacaagaactctgaaggttggtgtttttatttttttcctttcgggcttatgcaattattggattggaattgtggtttatgaaattaactatctgtcatgtttgagtttagttgatgtaaggttagaactatgtggagaggagaaaatgagttatagatattgttgaacttaatcaattagatataactgtagaaaatgttcaagggtcggtgttgatgcttctgtcaaaataggcacaacctttgctcataatgatgctgtcagtttcattgctatcaattatgagcagatgagcacaagctttttaacagcagaccaaatatttagatgcagtatttctctatacagtgattgtttactcctataggtgctgatatgtttctcttttaaattgataaaaggagaaaagagattctgaagtccctgtttacattcctaagcattggcatgtattatgtgatgagtgcatattttgtgtactcattgttatctttttaaccaagaaaagctgtattttttcttgagtttttgtatagctatgttttttgtagctgtgcaggtttgtgtttaattgtaaaatttgttgtgaatttggagtataatggacataattgaatgaggtaatgaaaccaaagaatgaaatgatgctgcaaaatcaacaatccatgaatttgtgttccaggccatatggcgccaagaactaggcgccatatcgctgcacctgctatagagaaattgttcgaaaatcgcaaaaagccccaaatcaatactaggctttatatcgcctggcgtatgaatttttaaatttaaacattattttgaatgtatttcaaatcccatctttagaggattatataaataggggtttaggggttcataaatatactattggatgattggaaagcttgttaaacttcagagaacacaagagaaaagtagctgtaactgctgctgctccacagtacacaagtggggacaccgtttcttttaagtttgaggagaaagtatttttatgttttattttatttttttcttcgttttattttgatttttaatgggtagtttttgtttatttcatttgttggatgactttattaattgagatttggatcttatgacctatggggttcaatgatgatgatgatgatgctaaactctatgactgtattccgtatgtgtgaaggacatgtgaattgtgtgcaatttttattcatacttttctaattaaaataagagacttttaaaaactattatgtattggaactaaaattcaatccctgagggttcaacgacttttttaattaaaatatgctaaattagataccgtatactttttaataaaatcacaattattactttaaattagactgttctgagttattgtgattagcttatggttttaaaggcttcaattatttctttgcggacacctttatgcaatgaaatgtttttgaaaatgcttcgaatgattctctctcttcttttcttttttataatatatacttagaagcagtttcctcaatttgtcttgattatgagcctgtgagttttaatttatcaccttgctagtatgcataggagaagcaacattgctagtaatgtgggtgtattgataatttgatatggctttcccttcattaacgaagttttgttttgtccctagcttcatagcttagcttgtttatctgttaatttacttctgaggattagctaattgtaaacctttcaccaattttatttcattttttcccggttcaggagagtttcagtgcccagtgttgaacaaagtatttactgaatttacacacatagttgctgtgaagactacaggaaacgtgttttgctatgaggtctgtatttccaccgactcttaccattgattgtttgtaatgaataaacatatagttgtctgttgatgtataagttttccaagttccttgtttgaattttgctttataggcaattaaagaactaaacatcaagacaaagaactggaaggagctccttactgacgaaccatttgttagaggggaccttataactattcaggtaaagtagtttgaattttgaaacatatccaattctttcagaactcttctgagtagtttttgcttgcttgaatataacatgtatgcttatgggtatcctttgcagaatcctaatgcaattgacggcaaaacactcttggattttgatcatgtgaaaaatagcttaacacttgatgatgaaggtaagtttcatgtttcattgtgcaggagtttcttaaattttgattatatgattttaccattgtcatttttacctcttcagttccttttcccagagttaaagaaaatgggttcagatccatcctataacataaatgtcagtggagacatcaagcagatgttgaaggagcttggtacagagaaagcaaagcaaactgcactgctaggaggaggtggcagcaaggcacagaatgaaagggccgcagcacttactgccattttggctgcgaggtcacgtataaaagaagattctgacaaaaaatcaaatggagagagtaatgcccctcaggcttacagcatagtagatgctgcatctgcttctgtacatgggagaagtgccgctgcagcaaaagctggatcaagtgataaaactgctgctcgaattgctatgcacagggctggtgagagaacaccattgaatgctaagctggttagtttgtctttaacttgatatctttcaaaaattgaggggatactaattgtttgaggttccagtgtaaaaagtctgtttcttaaaagagaagactgctgtcgatgaaaatttagtccgccttgccatattttcttctacatatgaaaagagttcttggagatttagtttcctatcaatagatctagccaactatgcatatcttcacagtctagttatttgaagttttcaaatccgaactattcaaattgttcgtactagttaaaaacaataattatacatagacttctctttttggtgcttatgtttctttctttcttttcttttttttttttttgcttttatgtttcttgaagaggagactgctgttatttgaggttaattgtttcggtaaactacactgttgtctgttatctggtcctttggacaagcaggatgcaacattattaatcctactattagtttactttactaggtgctatgaccattattaatgacttatctgtttcaggtcaagagtaaatatactactggtgctgcttcgagatccttcacttctacctcttttgatcccgtgactaaaaatgaatatgagtatgtcaaagttgagaagaaccccaagaagaaaggatatttgcaactgcacacaactcatggtgatttaaacattgagctgcactgtgatataactccgaggacatgtgagaacttcctcactctctgtgaacgtggatattataatggagtagctttccataggaacatccggtatgatacatacctcagaaatttatgtgttcatatgcattctatatataagcttttgtctgttaatgtgattaatttcaagttgtttggtccatgtaggaattttatgattcaagggggtgatcctactggtactgggaaaggaggggaatctatttggggacagccatttaaagatgaagtcaattccaagttgcttcactctggaaggggtgttcttagtatggcaaacagtggtccccacacaaatggttcccagttttttatcctgtacaagtctgcaaatcatttgaacttcaaacatactgtttttggtggagttgtaggtggattgacgactctggcaacaatggaaaaggttcctgttgatgacgatgatcgacctttggtgagttcttgtattatccttttctcacaactgtgtttagagcttactttagtttcaattcagtgctctcccatgtcatcattaataatctgccagactaatgggaaacgtattactttgatagtatatttaatttttttcgcagaacatatcatttgttattgttcgaaagcttttcagtgtggattctatatttcatgctgagatattagcaatttgttactactgtagcatgatactattctttaaactaattttcaataatttaaccattgttttagcatgtttgtgttattgggcatgcagcattattctttaaacacaagttttcaatagttcaaacattgttttagcatgttcgtggtattgggcatcttattttcacgtgtgagtttgcacaatccgttatagtggataaatttactttgctatatatcatatttatcaattttgcttctgttgcttttatgcaggaggaaattaagataacaggtgtctcagtttttgtgaatccgtactcggaacctgacgaggaagaggaaaaagaagcagctgaaaatgagaagaaagctgaggatgaagacaatgttagtagtaaacgatatcacattatcatgtcaagagcaattattctattaactttttctattttttcaactgccagtaatcttcttgctattgtgtttgtgttatctcaggacaagattgggtcatggtatagtaacccaggcactggaagcacgggatcgggaacagtcggtggtggtgttgcaaagtatctgaaagcaaggactgctcaagctgaatctagtgttgtcgacaatggttcagcagctgcatcgaaaacaaagaagaggaagatgggaacttctaccgcagaattcaaagatttctcatcgtggtaatttgtaaataatcccaaaaacttgtaacataggtaggactaaaaaatgatttgaaatttggagatgttggtctgcctaagccagtgtcattatatattctttttcaaatagaattttttgaaaaaaaaagagagaaaaagaacaggttgaacctttgaagagggacgtctgttttctttagttttcaaatctataaatgtacaatgacatgtaatgtattccttgaaaatggccttcgttgtattgtaataaacattaaaattttgtcctgttatagtagtgatcatctctaacatctctctattctcaacatctagttataaatcaaaattgatgtgagatgaaattcaacactgattaacaaatatatattctttttttgtttactaaaatgctatgtcttgtcgttttgtctctgatttctgaaaaataataataagcaaaagtggacaaagagttactttcaagtttcatgcaccgtcattcatggcggtcagagtgagtgagtggggactggggttgcaccgggaccagcgccaaccaaagtgggatcccctgataccctcctcacactggtcctcatgtgggcatcttttttattcccttatgacaaaggaattttctctaactgttgttgggtttggttagctatagagtctattctatagaataatatagacgaaagagggcttaactgcatatgtacagtacaggaagaaaatatttaccctaaaatatatgatgacagcagtagtcgtcccttttaccaatgttcaagttcccatcgaaagcctgagactttgtggaagcttttaacgaagggtttctgtttggtaagctggaaaatggagcaggtttttttctttatcatttccacctgaaatactcatctgctgtatatgccaaagtgtcagaatcaatcaagtgttgttctgtatcgattatggatttgaaatgtgctaactttggtgctctttgagagaatgaatgagacccacaacacacctaacccaattcttgatgcccctgtatgctaagctatgctatgctatgctgtactcaactttagaaacaaaggacactttcccccagtactcttgggtcttctttctttttgttaaaaaaaataaattaattattacataaagaggttatgtatttaaattcgaatagatactcaaactagattatatactttcttaactagattaggagacattgctgttgtttgaaactagctagtgaagatccttaggtcattgaagtggaattaatatttttaccatttgttttaaattttaaggcttcgtaacagctttacattgtaagtcgttacattatgtattgtgatcctcttacattattaaataattataaagatgattataatacattattagaaaataataaaacataattataagcaattataatagggctatttacaaaaatatgggaaaataaagataagttttgatatata

SEQ ID NO: 295142 - DNA, 3956 bp, Cannabis indica
acatacttactccattatttcttcctaaaatgcatcacctgctccaaataataagaatttgaaatattaacttattgttttttttttcaaccaagggtggcaagcaaacgttgagaagtgtaagcgggaagggctgaagccaccattttctgaccaaggcatggatcgttaataatgacgtctctaataatctctattgtgtatatttgtgtgaaatttgtggtttcatgtgtttgttgtgtaatcattattcatgcttgtctttctaaagattttccttagcaattgtttggctgtatggtttggcattaataggagggtaaaaatgtcatcacgcatggctcgtgtagctccattgtatgtactattcaatgaaatgacatcactttttacttgtaaaaaattggtcatttggtcaagactatcttacaaaccaaaacagctgaacatccactgatcattgacaatattaagcacaactccttcatttcttttgggacaaaattgttgaacctttaaaagggtgtgagttataactttatacagacaaatagcagcaaaataacaagagaaggcaatcaaagagatctcattgtttaaaccacttcctatgacgcacccaattacagattctggtgatgtagcattaagcctattgaacggtacaatgcttgccaaaccaaacatggcaagaatcgtcgaacaggatgaccagagctcaatgatccacttcgaaatccttccatttgagaaatgtcacaagtacatcattggactaatcattctgcaatctctccctcttctaagtcatcctctgcgtttgagttttttctgtcatcatcctcatcaaatatactttcaaaatcataaaaaacgccactatagtcatttctgtcatctttttctaagctttttctgccatcttcctgttcttcttcttcttccttgtcaatcaaaccttccaaatcaagaaaatcatccggattaatttctgcaattaaatccgaatattcatctattaacccttgatcaaaatcaaattccatatcaccaatttgtgctcctttattggtgtttgatacaggtgactgtaagccatcttctggtgcaactcttgtagacattgctcgctctgatgagttaactgatactttctgagacatacttcggttggtgaattgatgtggggaagccaagttcattgacctctcatttttcataaaatcaaagactttaggtgccaacttgtcaatctccactatttcttcctctttaaaaggaacacctcccatctttaaatgattatcgccatcataagttttaaggtctggtttgtgtaaagggggataatgatctttaacgacttcaaaatcaatattgtgtgaaggaaggaaaacatatatgacagggtactccaaaatcaccttgtttgttaattgctgccttagtggaaccttaaaatctaactcatagaatggtgaaattgggccctgaaataccacaagtgaaagattgtgtcaatggaacacacttgtaatccaaacaaaaagaccgatacaaaacacaagacacaacaatattattatattcatttgaataaaacatggaacacttagctgaaacacctagctggtaaataaataattttcaactctagtttatagtataaaagttcttctcatcgtaatctgttctaagaaacgcaatagcataccttttgatatttccggataaagaacttgagatttttggggtcttcgtcgcaaaatcgcttcagttgatgattccaaggaccaggctttaaatggttcccaataatggaggaaatattcatgttttcatcaatactgtatcagcatgaaattcattaaccattaagaaagcattttttaaaaaaagaaagaaaaaaatacttaacaaattgctctaatgcttgaagtcaaccagctcacccatgatcaagtaacacaacatccgttgaatgaaattgccactcgatcgtccagtatatgcatttcttcctacggcattcagacagaaaaaactttaaaaatcaataaaaggaaaaaaaaaaaaaaaaaaagatacaccagtaacccattcatctatgtaggcaagaaattaaaccaaagaatgctaaacagggaaaatatcatattaattcgtgcatattcaaaagttatgatcttttctgtttagccattattaaccttttatcataagtagtttgattcttctcccttttcaccatgccacctggaagaaacaaaatctttgttctcctacttgcagctgcacttctaacactcctgaggaagaacggtagcctatagttattgtatttgcatagcttttttctcattctttgagcagaatcagaagcccttttcacttcctcaagcaaattataatctaaaccaagaaaatatacagcagaacaataaacatcattaaaaaaattaaaaaaaaaaaaaaaaccgaaagtgtaatttataaaataaaaaataaaataccagagatgagctgattatcgtcgaactgagaaataggaacgaactgagtccggtccctcttgcccgtacaaccagtgcgttgcttgtgagctttgacgcagggaagactacaggagcgaatagaacaacctgggcatttgtattttgaatcattcaatttgcactcttcacataatttggagtcttttcttacttctctttcctccattttccgtctcagggtcatcaaagctacgagagggtttgggtttgaaggaaattggactagggtttatacttcatataatgcacaaaataaataacaaaaccgttctcaaaattaatctaaaatttcctgtttaagaaaattactgctgttggagatgggaaagttaaatataggatatttattccgaattatattattgttttatttatttttttcccatttagttaaggttttacttttaataaaaatgtaacataattataagttttgatttatttttatcgttttaataattattatataaaaaaaaatgaaaaatactttttaaaatatttagatattattcaaaaatgtgagtaaattaggaatcatatgaattattttaattttaaaaatagtttctcaaaagtctttgtagaagaagctacaaattctaacttcttctaaaaggacttctaaaaaaaattattcaagattacattgaaatagattttaatttagagcacaaaattcaacaaaaacttcttcagtcaagttagcatgagaagcaatgctagacttgttcctacactatcatgtcatatgactcggcttgctatagttgtaacacaaaaattgtgcagggtcattgcgtttaggtggaggtggttaccttcattgttacttcctattatggttctaactcttattattgtttcgaggagtgttgttgcggttagaattggaattcgagttgcggtttcaatttttgaaatttttgccattaggcttagtgttgccatttgaaaaaacaaacacttcctcttagtggtcttgtttccttgcttcttcctcaatacaaagatgcgtgattaaactctctaaggaaaattccttctcggttgaaggtttagggacaactggtttacaatagtgagaataaatgcgaccttcttcatggtcagatagaacaatatcttttgtttccaatacctaaaatgtaattcctcaaaataaaaaggcttgttaatatcgttagaagcaaaaccatagaaataatcgatagcagtcctagtagaacaaaacgtcttaaaactattaaaccaaaaaaataatttggaacgagtttacccattgataattctagctgagttgcgtactatgttgttttctttaagacgtttcgcaactctgtctgaagagtgtatgataatctatcaaccacaatgttcctagcaggcccgaccctgggcata

SEQ ID NO: 295143 - DNA, 14780 bp, Cannabis indica
ctctgtcccgcttggtggacgaaatcttctccccttttagaattctttctcccacacacctttgccctctttcaccgaagaggaaagaagaatcttccaaatatataaatataaaatattatatatatataataatttatataatagtaagtagggccccagaacgctaaaaaggtgggggaacaagagttgtcacgataggaaagagaaaaatgactctaaggaaccaacgattctctcttcttaaacaacctatatcctccacacttaatcagcatttgatagattatccaaccccgagcaatcttagttattggtgggggttcggtcccttagctggtatttgtttagtcattcagatagtgactggcgtttttttagctatgcatcacacacctcatgtggatctagctttcaacagcgtagaacacgttatgagagatgttgaagggggctggttgctccgttatatgcatgctaatggggcaagtatgtttctcattgtggttcaccttcatatttttcgtggtctatatcatgcgagttatagcagtcctagggaatttgttcggtgtctcggagttgtaatcttcctattaatgattgtgacagcttttacaggatacgtactaccttggggtcagatgagcttttggggagctacagtaattacaagcttagctagcgccatacctgtagtaggagataccatagtgacttggctttggggtggtttctccgtggacaatgccaccttaaatcgtttttttagtcttcatcatttactcccctttattttagtaggcgccagtcttcttcatctggccgcattgcatcaatatggatcaaataatccattgggtgtacattcagagatggataaaatcgctttttacccttatttttatgtaaaggatctagtaggttgggtagcttttgctatcttttcttccatttggattttttatgctcctaatgttttggggcatcccgacaattatatacctgctaatccgatgtccaccccgcctcatattgtgccggaatggtatttcctaccgatccatgccattcttcgtagtatacctgacaaagcgggaggtgtagccgcaatagcaccagtttttatatgtctgttggctttacctttttttaaaaatatgtatgtgcgtagttcaagttttcgccctattcacaaaggaatattttggttgcttttggcggattgcttactactaggttggatcggatgtcaacctgtggaggctccatttgttactattggacaaatttctccttttgttttcttcttgttctttgccataacgcccattccgggacaagttggaagaggaattcctaattcttacaaagaaccgactcctaataataataaacactgattctttttttttatgtccatccctttgatttgacaggcaaaacctgtccatctataactataacgtttttgttttggaattcttctcctattagccccagaacgctaaaaaggtgggggaacaagaattgtcacgataggaacgagaaaaatgactctaaggaaccaacgattctcccttcttaaacaacctattccccttttgacgactttctgttttgtgctttttctaggaccagaaatcactgctctaataacactccgccgtccactttttttatcctcttagtcctttgtctcatagttttgtttcatattttctctggtcaaaataaaaaaagcttacgcccttttcttaaacttctatatatccgcatctgctttctttttgcgctagatccatatttattgcgagttcatattgattctttattttctttttatgggatcactttattatgaatttgttggaagattctctctttctaggaccgctagagagctccgccaattccggcgttggtggcttcgagagcgggcttgaagggccgcccgaagtcttgcgcatggagccgccagagcaaaatgagctctatgcagccgttcagccttatctccccaaagacacctcaggtcccacggaggtctgtaagtctccaagtgatttcgtgcttatgttagagaagaagctaacctccttctgtaagaggaaaactattctcaccaaatttggtaacacggatttacccaatgcggacataccgcctttggcaaaagagttcgctaaggagcactggccagcttgtaaattcaacaaggagcatatgaaattttacaataatatagaaaacatccagagttatatagaagatttcttagaaagaaaatttcccaagaaatgaaacataatttttttactattactttagatcggttcaggtgtctttcttccaattgaaaaaaaaaaccggaagcaaagggggagtttagtctgactgcgcaatcaaactttagagtgggaggtgggggcactagggagggcttgcgacttgaaacacagagcgcccccccggatgtactcacgtagggcagtgaggaaccgggtaaccaaatcacgatcgttatggtatgaagtaggagataattcctccggaagtgctggttcgaatccagctcgtgacaaagccttggtcatatagatttctcggcacctccattttctcgttagatggatgactcccccatttcattgctggtaaatacggagtaggatccactctggcactgaacttgtttgtctatttatctataccagctcttgtgctggttgttcaatactcccagcaatcaatctcgttcaatccaccaatcaacggaacgtagcgcggcagctctgccatctgaagcgaaggataagaaatcggccgaatgattgatataatatattagtttattccactgcaagtcctctatcgaaacagaacaagtctaatactccagccccggtcggtgccacaggtctgcaagcctaacacaaaagtttttctcatctttggttttccacttcccttgagtttggcagatgataagcgccgaatcccccacttcgatttattctattcccagggtcaaggcagcctctattccatggatacatgcttcatattctgtggtattgttagttccttcaaagttgaatggcaatgggggtgtgcgattcatcaggtgaaatcagcaatgcccctactccgtaccctttttgattagccgcgccatcaaagtaagtacaatttccatgccctcctcttctgtgacagctatttcctcgtctgggaagcaatccttaaactcatcctcctcccaataccaactctgcgaaccatgcagtgaaagatgtaactagtggacccgtcagaaacggaactattggaagctttgggggcttccatagaacaacttctttttctaaaggaagggcaagagcgtgactctgattttggatgcgctgagttatctaagcaattcttgatattgttattctaaattcttttttttctttcttttcgaccttgtacccgggtacaaggaacactaacagaatctctgttcaaacaaaaacgacaagcaaacccgaaaactaaagggtcaccttctctagcaagcaagtagacttttctctgagccccagggtagcaaagctagctcttcgtatcattggcattgggcaggtgaacttggctacacaacaactcttactctagcagaggatctagttccacaccaatccgcttttcttatataagataatatatatacttagcgtacctacaatcgcttgcttgattgccctcttgctttaagataattatctcctagtttcacctgcccttgtcatccatttctccccccgcatccggttctacctgtcatatgattgctggccccgtatcacgcaggagcgctctactaggtttcaccccgttcctcgcattcccaccggtcccgacaagatcgagaaggtgagctcttcgcccaacccaatacttatcttccctcttttatcggggacaattaaggttggtggtttatgtaaattccttccattacttccctttgaagatacgatttcatggttcgggataagttcagtcgataaaccgatcgacccgccagttaatacgtgtataatatggattgggatccctctcttcaattccgttcaaaggcggtagggtgaattgacgaacagagggtggaacttggacattgacttcattgtcagctcaacacccggcacacaaagatttctctgcctcccttagctgcctagctagcttctttcaatcgcgtagctaccagtcctagcaaagacaagacagtgggtccaaccatgcccatctctttctcttttgctttcggtattaagggaattatttaccagcttgcttgagtgaatgaagagtattgatttctttgtgtctttcttagtgtcctaaatccaattcaccttctcctcctcttatccgtacttgtttcttatgcccacccgtcgacgatcatgagagcttgaagccattctatctccgaccgcttacttttcattcgtacccacctcctcgagccgcccagtaaatgcatttctcctccaatcgttgagcggagacggacgaaagcattggatgatcggccggggggcaaagggcagctcatttgttcctatccccatccttttaagggataagcagcaacctacgcagtgcactgctaatcagtcatagcttgtgttcggagctatctgctgtccatcgttccgagctaagcaaagcagctaagcgatcaatctccctcactcagccctacctaccaaatccgtcgaggttgccatgcattgctatgcatcgttgggaaggagaagaacgaagcgagcgaagctgttctgcatcctccgagcaatcaaacaatcagttcaatcctgccttcgcccttttgttagcagctcggtctcagaggctaatccaaaaggtcactttcatggggtcaaagggatcgttttttgagcttgattttgaagcgtagttttccactctattttcaactatatatagttgagctggaataaaaacctcggttaggctactacgtttttttctttttagttcttccaccgcccggtccagctgtctgaggtcgatggtgcatccggtaagctctttcggtattcatctccagagcccggtcagatgcttcaatccttcattcatattccgtcttactatattgcgagtttacagctcgaatcttttactagtcttcccctcacatgcgataaatgggcggtctcccctagaccttattccgtccaagctaagctctcatagcattcgtctttcttccttctctgctgcacgtctgtactctttccctcgctttatagagatcttggctttctggttttttgtttggtcagggggtgctgtggagaaatcgtttaggaaactaataagcggaaatcaatacacatgaaaggagttgtacacgactttggtaaaacattcacctgtcggttgtacatcgacctgtcgggaaactagaaactctcccccaatccggggctcaatgtagttgaaatctctatcgggcgaggtctctcgagcctcgtgttgatcgggaacctatcttgcaccttcggaatagactggacgcggtagatcctccgaacctcccttttatcgcagcccaacacgactttgacttcattgtttgtttgaactccttgcgtacctgttcagccgtgaaccacttggcttctgtggcgagaacatttcccaccccactctgtagagagagctttttccctcttcttcgggctctctttagtttggccggtcttcggttaacaccggctgtcgatcaggaatgaggtcgtcgatctccaactcaacctcaggttcagtcgcctcatccaagatggagggctctttcaatctcagctgatcaacattgaagacggggtggcgggcagttctagtttgaacgcattctccctgaccttctcttgcagagtgaatggtcccgcaatggtttaagcttgcggttgccttccttaggcaactttaaccacagtcgatctcccacctggaacttatgagcggttccgtctcggtcgtgcctttgcttctgttgcctctgcgttttctccagagtatcagcaacctgcccatggtaccgccgttctccaggaaactaacggctcgcagctgttcagccgcttctctaggagataggagatgtgccgctgactgggttcaggacacaaccatcgtccgacccgtctgctaccaagtccatggggcctttggttggccattagaaacagattaagcacttctgccggtcgacgaatgcgtgctccggttgtagcagtgttgaatgaacggcaggtttggaaccagaccgggtaactttaaattaaaggtggtcccgatcttagattctcaagaaccgacggttctattggtgacccattcaaaataagctggccgcttttactttgattagccaatcgagtgcggggggtgctcctcttcatttgttcccgttaacgaccacaaagcccaacactgctcctgctcgctacttgcccttttttactactttgactagcgcccggcaaaggaattcttttttcccaaagccgacttcctttatcgagctgttgacgataaaagtgatggtccgggctgggctgtctgaaataagcggtaatttttgtcagtcctaataccacgcgaagcgcgtgatcacccagattcctaatgcccggaggagtctattcctattcctgctaactgaccggcttacttgctggcttccttcctattaccaggcctgcttacttggtgtaccagaagtggttacggtgacttgcctctttccttttgcttgtgttgtgccagttgaagtgaagggcttgctactccaactcaagtaagattagataaatagattaaattaagtagaggagaatgatagagggacagaggtaacaggacggagggttggggagtcaagaaggtaaggtgacggtaaaggtcttatcttacagaaccttttcctactggcaggctttcgattgcgtgcttttcttcgtttgtgtctgaccagaggagtggagttaccagcgacgagaggggaagagacagagacggttgctaaccagaggggctagtgacaagtgacctgagttccagtttgctttctattatcagctgactggtaggcacaatcgcttgagtctagttcttcagccaaggaattgcttgcaatgacaatttctctttagcaagaagacatcagacctcttagttaccaaaccttcgatagactaaaggaggagaggaagctttagaaagtgactctttggactagtctcatagccatctatctatatagcataccgccattctgctccttaccgtcccttgagtgagttagatagcccattccttgctgattgaccaacttcggggagtttcaaggctcacactacaataagagtccgagcgactaggaacaggcttgaatacagaaagatattcgtactctttgcgcttccttaccaattttattatctttttaaaaaccccaaaaagtcttaaatatctgcgcctccctcccgaatgctttcttttacgtgaggttctttcggagcatagtgggcgtgagcgtgctttctgaggttcctaaccttcccgtcatccggtgggtgccctcgtggtagtacataaaaaaggtagggctgtgctcaactaagtgagtgaagttcatacgttattaagttgcaatacaccgtgagttagtcctcgaaagttattagacgactatgttctgactcgacgctacgaacttttcaaaatttgatttgattgagcttaagagctctctttctcctcgctataatatccccgcccagacaaacacatggaaaagagacgcctcgtgtgctttccccttctagagccttgaattctagccccttcgccttattaaatgaaaacaaatgtgtggcacttcttggatcagttggaaccgcttacattgttgtttacctcgcttactggggattgatttcgaataggacccagggcagtatcgcttgttgactattccgatccgagcacgtgagctttgacccccccccttccttgactattctatttatggtatggtacgtcttcctattcaattaaggaaaaaacggtagcttgcatctcgctattcttcagtgaaaaggaaaaacctaattatatcttgccccttggattcatgggaagtggtgccccttttggttaatgaacggaatcaaagccattgtttagagtaaagaaaggaaggaacctcaatcgaggaagctgatacagaacttcaatcttgcacattgaaggggaggcatcggcctgatatcgcccatttattcgatctttcaccggggcagcaggaacagcaaacggagagatcgagactcagtcctgaactccagaagcggacggatgcccgaggagttctaccgttgacgacagcagcgggaatggatttaaaatagcagctgctaacgcccactgagaaggctaaaaaagctacatttccatttataacaaatataacaaaagccattgccatttaagatctttttccaccaggtcataatacccccctatacccctctttgaactaaacaaagaaagacctttcgtttgaggagagaagagaaatgaagggaagagatgggattcatcaacaaagggatagggataaggaatcgcggcgataaacagaggaggcaagataatagatatgtaaaaccttccccttccaccaacagggcattctaacagcctactcgtgcaaacagtcaattgcccatcgcgggaatggaaatgaaaaagtaatttatagatctagagtcagatgaatatgcaacagtctctttcctccctcaaagcctagttgtccactagaagcagccaactatgggctataggctatttggctttcttacttacattcaatggcattttcttcttttttgctttgcctaatcagtgaaatccggttgccctattcccccccctcgcagcttgcagaaaaataatgtatatataaagccttaaaagaaagcatactctcacgcacgaagaaatagcgtaaagtagaagaatagctaagagagaacctgcccgcagtaaatgggcgtcccaaaaaagaattttttggccagaaaaggccggaaacgagaaccggaaccacgagattgcaaaaaaccagcaaatggcggcaacacacagggaacttctcaagtccccagaaaggggaatcagaaatgcactcgtgcaaaagagaaacaagcccggactacaatggtggcagctgacacagatgagcagtgccatgccataaacaaaggaataaacggaggagacctttccgccatagcttacgccatcattccatgcttaactatctcctgcggggtggggaaacatacccgatgtaatcaaccaatttttaaacatagaaggcgtagaacacatagcgaatgcggtgcaggcggaaaaacagatatattaaatcatagggtagaggcggccaaagggatagctgttgataggggggaccagataacttatgtatgagccgcaggagaaatccgcgagggccattgctgtttggattgaagtgaacaaggcggatctaatgtgtgtccacctttctttttttttagaaagggattaaattgatcaccaaccattggataagagaaaaaagagggatggttgacttcgcacaaccggcacagggtattcattgctgctggcctcgaccggtccactagaacggttggagcaactggagctcctattacccctagaagctgctgttggttgttggctaggctcgatttgcaccaccgggcttacccatttttttagtggatcatgcctcctttctttctgagcccagccttccatttctcttcgatttcttgaacggatgggacttttctctctccaactggactagaataaaggagggtcggcccggcctgtgatcgtagcgtagcccgatagctattcctgccccaacttaaccaatggggtccggtagttaggggtaagaatgaacagaaggcgactaaccgatctctctttgaaaccagatgcccggagatgtttgattcgtagggctaggagatcggcgaagagggccagacaaccaagcaaaaagttcttccattacggcgactccgaagcgccaccttctccattcattactggagacgaaagcagctatccctaatgccttgcccctctacctccagtcgggagctaaaccgggggaatgagatagattgaatgacccggcaggcaatagtagattcaacctttatcagcgatggtctgtctcaaaagcgggatatgcaagcacgggattccctacttccggatagagaggaattgaactcattccatccccaacatagatttctgttccgccgacttcacggctcatttactatctatttaaatagaattcccggcttaagacaagacgatgagtcagggaaggcttagctcaaagacttgaaagagcttgttggaggaaattgatcaaagtcaaggcttgataagtaaaggagtgatacagagaaggctactgcgacagatggtttactaatgctcctaccgttacagatagaaattcgctaacaggcgattgcctgcccatgctatagccatgctaccttcacttcctataagctggctaactaaggcctacggacttattaccggtatacgaatacttaaggacaggagacagaaggcagaagagggaaagtagctctatttacaataaaaaaaagaaatcaatcaatttaggcacagcctttgtccacagttacagaagtctttgccgcagatgaccgctttgacatattagcccggattgcgctttcaaatcaatagttcactaccgtgaactcctcccttttgtttgaacaagccttgttactaaagaaaaccacgtccagcgtggagataaagatttaaatatggtgcaatgaaatcatgttcatcatggcacaaaccgtttgccgaagaaagagagggaactccatgaaagtcttgcatctcacgtggaaagaaacgatgctgccaaagcttgctgcaaatgaggcagctgcgaagggcgcaaagctcgctcttacgaaggagaaagaaaagaaccgccgttgttaccggagctgctaatgacgaatccatgctctttcgacctccaaccaccatgatgatgcagctgtcacctctttatggtgtgccgagctacacggatgaacatgccaatcccaggaacttcacagtggaaaaactgctacacgcccttgagtacctccgctgccgcaacttgtctgccgaagaggaggtttttatccgtcatcagcatgactgtgaaatgatgaggctcgagagacctcttctctttactgagatcaaacctttcgaccttgagaaggaacctttcatggcttggagatgccttaaaaaaatgcattcaaagtttggccaagcccatgagagtctcctcatgctctcgaatacccatgcgaagagcactgtcggtttttttaaaatgcaattgaagttctcggtctctcctgtcgaatgacgagaattgcaacagttccagacttcgtgccgctgctcctcttctcttggcttccatgaggtttcatccgtggagaacacaacttttcgtctgcgtgttgctcctacctttctattctgaggctcgagagaccttgggctcggttaaggctaatgctcatggtggattttcccatcagatacaaccatagcagggcttatggcagggactgctgctgttatgtgattgcagcacccgagaaaggcccacggtctgacatttcaccacaaggaccaatgtaactcatgcggtctattttcgatcatgatagaaatgggagagtgatgcaatcacataacagctactgtgccatccactttggcttccgaaacatcaccaatcctgataccgaacaaggctcccatcaccctcttcctgcagcaaaggttctttgcttgacagctttgacgtccccgacccccttccctcgcgggtttggctatgctctataacaggcttctcggagaaagaatgtagccggctttgaagccgtgaccgcccgcccccatggcatgatgttttaagatcggtcctagcattgtttgctaagcatggtgttagcatggcgttccaagaccaaacctgatgtgttctcttcataaaaaaaaagaagaataaaagcaaggtaatgctaactcttggagcatgctccgctcttccttggttgcgactttggcatccggcgctgttgctggtatccaccgcttctttggtttctagcgccactcccgtgcaggttgtcgcctttcttgacagatttcccttttttattcttatgtcattttcctctttccttcttacctgaacctgaagacgataacatggcctggtctcgtgatgacggccccacgtcacttcgtagccgaatccctctcattctcagcggattctcctcatttacatattgaaaacgagcgacagggatgctggaacgccacgtgcttgaattgaagcaaagcacgcacattgtcgtgttcaggcctgactccgttgaggatgatgcgtaccctcttggcctatgaatacttgctttctccgtccagctgctcacactgaaagcacagctcctttactcccccgaagtatgctgcgattgacctgacatatagcttcctcctcttcctagccgcttctctaactaatagcgacagcttcgttatcaatcgcctgattgaacaagattgccagcgcattccatgcctgactcggcgatttcgcgtccttgatatgaccgatcatcttcttcgtcacggtcatctttactttaggacgtagttggctctctcagccttctggttccacacgctagtctcaaatctggctttctgggtgagactgtttatgtgccacccgtgacttccccacaaatcatgcaccttcagatacgacgttgtgcatgtcgaccaatacgaatacttggtcgagttccgcttttcgccaaccaggttatttacacatctgccatggctctcaaccggctactaagcactcttggaaagaacaagactcgtccttcgacagtccttcgtacttccgttctgactaaaagccccgatctgggcgttactttgttgacgtcacttcacgctcccggcactgtcacaacagcactccttgctgaagtagctctagtatatggtcagatgaatgaaccaccgggagctcgtttgagagttggtttgactgccttgctttcgaccccatgccctacatcattaatggtgctaaatcacttccttgccttacccagcgtcgaaggaaagttcctgaaccgagctcactgccttcattaaggaaaggtaatccggttgcttgaagctctcttcccgtgtcgatgaagggctattcccactacgcgctaactagaaaaggaggaaatgaaagagagtgagggctgattctatagcaagctccctctgggcattcaagaagcccttctttcccaagcgattctcttgtgtgcctttaactattgaaaggacaggatcactatgacctctggctcaaggactggccttctcttcttttaatgcctacagagaggcctgctagagcccttttaaggcataaaggctctaaggcctcttacttgactgaaagagtactcatattatggtctgcaagcctatctcgctttttcatttccgttgtccctcaacaaataacataagtgcagtgaagtagcgcttcatcccaggcgacacctccgcccgcctatgacagagaggcccttctcccctttgaaatgcggaagctcgcttattcagacaactactttagaaaaggatgaacgggtcattcgtcgcgggcctttcctgttgacagttggaaggcgggtgagttgattggcaagccagctaacggggccacgaagggcccaacagattgagggctcgaaattttatacttaacacagtgagttcgaagtcctcattcaccaccaacatgcttcaatccaatctcgggggcagaacccgatcatcgagagagcatgaaacttgctggcgacatcggtgtcggcggagtgtttcgcaaacctcccagcctcaccctagccctagggttggctccgagatagggaaagtggaaacctaattctatatggatctctccttgtagatcctttataaacagggcagctatccaggatctccgctttcactttcatactcttcatgtcgcgtgtttcgctcgctatggcgagctccactcccacgctttccgttggtcaacaaccaaccacaactcactataattcttcactactcctacaggctttacggagtctggagggattcatttttgttttccatttttaaaatagcgaatgcaattgaagccctagataaatttttatctgtggacaggaacttttatttaattgctagtattgtttattcttttttgggtttttatttgtgtgcaggcgtggagcacacaataaaatcacggcaggcttattcgtataataagcgttttaacgtacccattagaaaaactaacagctggaggggaaatagtatcgaggtgcaatatcctccagtggagtgtcgtcggtgtaaagagaaagatggcaccgtcgaccttcagtctcgtcaaggggctaaaagccccc

SEQ ID NO: 295144 - DNA, 2723 bp, Cannabis indica
aaaaaatttaacacaccaaaaatctgttttcttattaaatttttcggaattatatcttaaataactataaacttcaacgactatgaaaaaaattaaattattttttttttctaaatacaaaaatagataagggtatatagatgcaccctcttactcttaatggctgcattgtatacttcaatcggaccaacaacattactctaatttaaaatatcaaaacttatccaataactggtagagttaccctttcatttcatccaattttaatttatttttcaaaactataaatttcaggcattgcagaaaattcttgatggcggccacagacttcctaacccagataatattctaatcaatggcagaccaaacggtaccacattaacatttgaaccaggtaagttttagacaatgtacgaactttaaaaacatctatttttttaaaattaaaaaaggctaaaaattaggttttgcatgcatttgtacaggtaaaacctacagacttaggatatccaatgttggtatacaaaactctctcaatttccgaattcaaggccacaagatgaaattggtcgaagtcgaagggacccacactgtccaaaccacttattcgtcccttgatgtccacgtaggccagtcttattctgtgcttgtcacagcagatcaggcacctcaagactattacattgcggtctcaactcggttcactcgtaatattatcacttccactgctatccttcactacagcaactcagccagtgcagtttcaggcccaattcctggtgggccaactatcgaaattgattggtccctcaaccaggcccgatccattaggtaacctcacaagtcacaacatcccccctcctttgatagttgtagccttttcctaacagtctttgttataattttccttcaggaccaacctaacagctagtgggccaagaccaaacccacaaggctcgtaccattatggtcaaattaacatttcaagaaccataaggttagagagctcggcagctcaagttaatgggaagcaaagatatgcactcaatagtgtgtcctttatcccagctgatactccccttaagttggcagattacttcaatattgatggtgttttcaaagttggaagcatctcagataacccttcttccaaaaagatgtaccttgatacatcggtcatgggtgctgattatagagcttttattgagattgtttttcaaaatcgtgaaaatattgtacaaagctatcaccttgatgggtacaacttttgggtcgtggggtaagtccaatattaatacataaatgtatgctcacagtatttttatttatatgttattgttttagtttattattgatatttttgttaacttggaatttcagaatggatggagggcaatggagtccagaaagtagaaaacaatataaccttgctgatgcagtttcacgatgcaccactcaggtttgtaactttgacttttacttttctacttactaataatgttttttttagttttggaaataaagttgaaaatcatttggattttgttataggtatatccaaagtcttggactgcaatatatgtggcgttggataatgtgggtatgtggaatttgaggacagagttttgggcaaggcaataccttggacaacaattctatcttcgagtttacacacctgtcaagtctacacgtgacgaatatttgattccccaaaatgcccttctttgtggaagagccgaaggcaaaagcacaaccccataaacaaaaaagctgcttcaatgattgatacataatgttaaatctttacgtatttagtaattttaattttattaattatcataattcaaatttcattctttgaatacctttgcatttttttaagttgtatgtatacacctatattttaacataataaagtatatgtatcctttcattaaaatcaaatatatgtgtagatttttgaacaaatctaaaagggaaaaagggcaaatgacaaatgataatttttatttaataaaaaaatggaactttattaatttgattattctctctaaacaataggaacaaattaggagttacatcaatcattcataaatagcgtcctgccataacagggtgttcttgtaagacaataaacaacactattatgcttgacaaatgttagttttaataaactttttcaccacaagaaaaatcaaaatggaacatttaattaccaaaactaaattacccattaattttttaaccaaaaaacgaaaacatattgttaaaaatagtaaaacaatatacgagcattgtgatccacatcaattaaattgatcacaataatgctcatgaaaaataatttaagattaaaatatttatttagagcattaatgataataagacatacctcccatagcaattttttctatttgtgtcaaataacactatgaatttctaatattaatggaagaactaaatttaggagtgattacaaaagagaaaccaatgagcaacccctcatcctattactataccatcaattaaactcccatttcatcttaatatacatcacaccaatctaatcctaattggttattggagtacttattaggctaatacacattattaatagtggcctataatggaccaattatatgttagaacatatatattaagagtatggttgtttataatctataatctaacatcctaaatatgaattttctaaaataatgaaa

SEQ ID NO: 295145 - DNA, 2934 bp, Cannabis indica
atgtaaatatactttttgagtattgaatatttcccacaattatataaacaataccacacccacaccaccatcctagatacccatctagctacctatatatacctttaaattaaatcaactaataaatctccatcacatttctcccatattccataatagagcatctcccatgttgtcattcatcacccaatcaccggccgccatctggcactcgggttccaaaatgtcaaatgcttcaatttccaaaagggggtccaaatttagactctcaatcccatagctactcatcataatatcatgatcaacacaacaattttgatcatccaataacaataaattattaccattgtcgtttattaaagaagaagttgtcgttttgagtagttgttgttggtcttcttgatcatcacttcttgttgtgttgatgatttgggcatttgagcccaaatcaaacggtgtcgtcgtttcgatggccttattctctgctgatgttgttgttgatgatgataacgacgatgacgacgacgactcgtgagtagtataattataaggaagtagtagtgaacctgaattggaattttgaccattttgaattgtggtcattaaaggatgatcacaattagtattaattaaataattagtagtgttttgctccattttttgaagtaatgtaggtacccaaaaaccacgaacagcttcaataaatttcttactatttgactcaatatttagttgtcttgcttgcttttgaacccttgttctccaataattctttatttcattatctgttcttccaggaagatgttgagcaattcttgaccatctaatacaacaacaaacaaaaacgacaatgttattgctcaaaacgacatcaaaattacacataataaaacataggtataatctaatttaattaatttacctattgccccacttggaatgaagttcaaggatcaagagttgttcttgtggagttaggttaccacgtttaatgtcgggttttaagtaattcaaccatctcaatctacaactttttccagttctcttcaaccctgaaacaatattaattaataataataataattaaaaaaaatattacacagagtgacgtgacattcttcttacctgctcgtttagcgagcaagttccaatggccttcgccatgaagagaaatataatgaatgagaagagtgtcttcttcaagagtccaaggccctcttcttaactcaatttcttcttcattgttgaactttgttgtaatggtatgcatagctaattattaatttctctattctatagatttttgtgtttattatgatgatattcactttattgaaaaaacaagtgcatgtgaaagtgaaacagagaaaaccagatgcttaaatatttatagacctaaaattcgtaataaaggcaccttttttattattattattattagattttatatatacacttttttttagctgggaatttgttgtgtagcaaattatttagtatatttttgttgagtagtattgttagtgggtattagtagtatttaatattttttataggtgacgtttcatgattggttagtaatattttttaaaagttatttttatgagcattgctatcgagtaccactagtgtctaatacctcttgacatgttttttcgcgattggctagcgatattctctaaaagttattatattaaactgtatgagacctgatacttaattgaaccaatagcgatagtgatatatagaagggtgctaaacactactggtgccttttaacatttctctatttgagcattgttatgtgtgattcgatacttaattacaccaatgacaatatgacaccgaaaaaaatagtagacaacaataatactatttaatatttttctttagttgagtactggtttgttttggtcatattatattcacagtaacagagaagagaagagacttggaattggaccagtcaaaaagtagtactttttatttttttcaacataaatattaatattcgagaataaatttcattataagatcatgattatctgttttcaggtataattcacaaaatattattattattattattagttattatactcttcttttagactaagcttaaagaaaaattgcatgtatagtatagggatttgaaattttgatgcatgttttatatttttttgaaaaagagatatttagtggaattttaaagggagaatgattcaaagttgaaattttatttttgtgatattaacaagtttaatactacctaattcgatttttttatataacaaatttatgtttttttttttttaaatatatatatggtagtaaaaattttaaatataatattttaagaatataattaaacatatttttttaataaaatatcaaatgtatgtagtatcttaaaaagatgaaaacaagtatttgatttagaaaataattatattttttaataagtaataataaaaatataaaatataatattttaaagaaaaataaatgcagtacttttttgttaaaatatttttttttttgtaatgtgaataagaagttttgggtgtgacctctatctcactcttgaaccgaccttatatatataaagatatatatttaaaaaaaatgtaattatataaaaagcctcaaaaatagaagttaattacaaaaatattttctcatatatatttttataaattaattattgcaatcatagtcttattcaattattatcaaaaatatgccttctcattagtcttactacctcttaaatatatttatttgaattagatatgtaacaaattagctaaattgctttcattaatttgttaacatctcagttgtaaatgttctcctatatatatataaacaagtgatgatgaaacatgacatttgtaattaataaactcaataaatattaattttttttttgta

SEQ ID NO: 295146 - DNA, 1277 bp, Cannabis indica
tcatcttctacattgatttgaattcctagtaatctttgtattgtatgtctatgctgccccttaattttcaggatcaagaacagctgcgagctgtgacagaatctgttcttatatctttggttgtgcattgtagtggacatgtaccgcgagcagaatttcttctctttgctttacgtagcttgtgcagtattggttatattaactgggacacttttttgccatcacttctttcttcagtttctactgcagaaacgactttgggtcaggggagtcaaacagttgcttcagtttcatcacagcctgcggtgcttccatcgtcgaatgcaatctccaattcatctaattttcagtcttcaaatcctgcctctccattaccttctgtgcatggtatcgggtctcctgttcaatcatctttagaaccagctcctggtgcaaatttatcaccaatcaaatcatctgatatttcctgtgtgatacaacagtcttcatcaagggtgaattcatctataagggataatgctattagcagtctacggcaattctgttgcaagattatcttagctggtcttgaatttaaccttaaaccagtgactcttgctgacatttttactcatatgctgaattggctggtgaattgggatcagagacaacaggggattaatggatctgatggtttcaaatcgtggaaacttgacaaggctttaatagagtggctgcatagctgcttggatgtaatttggcttttggttgaggaggataaatgtcgagttcccttttacgagttactgcgcagtggcttgcagtttatagaaaatatacctgatgatgaagccttgtttacgcttattttggagatccataggaggcgagatatgatggctatgcacatgcaaatgttagatcaacaccttcattgccctacatttggaactcaacggattttttcacagattattcccaatagtcctggtgaaccagtagctggcttgagatattcaccaattacatatccaagtgtacttggagaaccattgcatggagaggtaaggaagttactaaaaatcattatgtgaacatgggatatgcttaatctagtagcatagatattctcgtttcttgatagtttgaatccaagtaccataactccataaatctgaaaatctgaaatcttgctttatatgttaatataaagtaaacaattacaaactaatcacatataattaatttatgtatttgcagctgtaactgtttagaaatgtttaagttttttttttttt

SEQ ID NO: 295147 - DNA, 7763 bp, Cannabis indica
tgagttttatgatgactgttgttgttttgtgaaggatcgagccatggggaaggagtttcttcggggagtgcttaacaagattatatcagctacatattacacaatcatcttctccatatgttccgctcaaatcatctagtccacctttgtcttctagtttttcttctgttcaagttccatcgagtctgtcaaaaccaccactgtcaatgggaactttcgtcgagtgctactctagaactgattcatagagaacctcagaatacacacctggaactaaactaaggcacatctaaattcggttccaagtgaccggtttattgactcagcatttcctacaggatatttatttactatggatagagtttccccaacggcagaggtgccctccggtctcggtgagttcacactcgcttgttgtcttgttctctgccgcgaacagggatcactcgctagctaggtcagattggagcaaccttttttgagaacatttttaccacccatattcgaggacaaggggcgaaacgacgtctcgatctactacctctctaggggcagtaagaaatacatctattttcctgaaggaaaaagcaaatagcaggaaaaaagactacgtaggcaaaggcaaagatcgaagtgaaggggagattacatctagctcaccctaatcaaaaagtgggagaggaaagtttggaatggataggaatgactcaccctacccttccttcagagcgtataacaagttagttagtggagagtctttacttgttgaattaaaatttgatgttaatgtatggcattaacgccttggtcatcctaatatcaatgtaatgaaagtcatgtcagctaatgaaaaagtttcatttaaatctgctattctttttttgtgatgcctaccatataggaaaatcaaagcataattattatgcaagttctcaaactagtacaagcaaaccccttgagttgattcacttgatgtttggggtgctgcttcaatcctctccaacgatggatatggatactatgtctatttcattgatgatttcagcaatttcacatggactccactcaaactaaaatctgaagtcaaagaaatctttattaatttccaaaattttgttgaaagaaagtttcatattaagattaaaacccgccaatctgattggggaggtgaatatagaagtcttgcacattttcttcagtccataagtgtccattttcaacacccttgtcctcacactgaccctcaaaatggcaaaaccgaaagaaagcactgtcatatcattgaaatgggacttacactcctctcacaagcttctctattgcttcattattggtgtgaatcttttagtacaaccaccttcctcacaaatcacctatccactcacaccttagttcacaaatcaccatttgaagttctcttcaatacttatagtttctcaaggtgtttggttgtgcttgtttccgtcatcttagagcttacaacaaacataagtttgatttcaagtttgcaaaatgtgttttccttggatatagccttcatcacaaaggctacaagtgtctacatcctactggccgcatctatatagcccaaagtgtcacctttcatgagcaataatttcctttctctgttggttttcatattcccaactctccaagtcaatcgtcttcctttgaaatagtcaacacagtcaattgttaccctctttttgcacacttcaacaggataatgattgtgcaactcctgcaccagctgaagaatccaaagttcaacaatccccgttgcatcttcacctcctcatggtatactttcctcacctcaatcctctaatattcaacatgaaactgcaaggtcagtcacattttacccatccatccctctcggcatttatctcccgtttgaaaatccctctcctcaatctacatcttcctcgtcatcatcctcaaccacatataaaccaccttcactccccactcatcccatgatcacccgatccaaagaccaaagttttcaaaccaaaaacatttttagcctcccttatctccgaacctacctttgtcctcctcattgtcatccctgcatctgcttttgaagctcttgctataccagcctggaaaagtgctatggatgatgaattttttgccctcataaaaaattagatttggaccttggtaccatttcatgacaccatgcacattgtcgacaataagtggatttttcagcttaaattcaatgctaatcgaatggttcagtgctataaagcgcgccttgttgccaaaagatttcaacaacatcctagtattaacattttgaaaaatttagtctcgtggttaagccaaccactattcgcctcattctcactttggttgtcacctacaactgggacattcaacaaattgacattagcaatgcttttctaaatgacactattgatgaagaagtttacatgtatcaaccagtcgactatgttgatcctgcttattcgaatcatgtctgcaaactcaatcgagccctttacgggcttaagcaagctcctcgcgcctggttcgatcgtcttcagaccattcttcaccaacttggctttcacaactctgtctcggacacctctttgttctatttcaatcaaggtgatgctttcatgtttgttctggtttatgttgacgatatttttcttactgttactaagtcacaacaggttacatccattatttctcaactcagctcagtgcctcctttgctctcaaaaccttgggcccagttcattattttcttgggtttgagaccactagggggctgatggtattcacttgtcacaaaccaaatatacaattgatctcctttctcaaaccaatatgattcatgccaaaccgtgcctcactcctattaaccaaagcatctctttgagtttacaagacatcaaaccattagcatatcaccctttattgtagcataatatgtgctcttcaatacctcactcttagcagaccagatattactttcacagtcaacaaatcgagtcaattcttacaagcacctactcaaaatcattggcaagcatgtaagaaggttcttcggtacttggtagggagtcttggagaaggaatcaagttcacaccagcaactaatctctctattgaaagtttttgtgactcagactgggctagttgattggatgaccgcaaatcaacaatcagacactgtgtatatcttggtggaaatctgataaattggagctctcaaaaacaaacatcggtagcatgctcaagcaccaaatccgaatgtagagcccttgctcaagcttggaccgagatagtgtggctgcaatcctagctcaaaaaaatttgaatcactgccaaaaattcaaccattatctggtgtgacaattcaagagcccgacagttagcctcaaatccagtatttcagaccaagcatatcgaaatagatgttcatttaaccagagataaagtagcaagcaaagaagttgaagttagatgtcccatcgagtgagcaaagaggagatacactcacaaagtccctgtcaattgcaagcgttcaatatttaaaggacaagctagctgttgtagttccttcaacacattatagcttgagggggcgtattgaaacagaggatttggaaatcccttcgtcatcaagtaaggaatcgcatacgcacaattgaggacgtacctttttgaccgttaacacagctgtgcaaattgtccttgaatattccctttcgtacaccaaatcagggatcatttatcatccaatgatgagctgtatttttctcaccaatcagtgcctttctcttgtaaccgtttcctcctatttattctcatgttttcctcatttgtaatttgagccaattaatacagtcaatagaaggaataatttcagtctcttttttctccctttaactatcggagtctctctagacttgtttgtctcaagtataggaaggatgtttgtttagcatcttattctctcttatcttatgtctgtttcatgatcaggcctttgtttgtaatgtgaatgcagcatatatataatcagaaagatgattcgaatgataaggaaaatatctttccagtttactccagtcttagaattccgtatagcagatttttaaattcagtaatgtcattttccataattaattagttatttaatttgtgtggttgggcattccgctttgtgtgggcctattaattgcttaggaaggtcctaacatcctggttgtttaaaggattatgacaatcaatttggtcccttttgtaattcatatggttacctgaggtggtttcctaattttttttgttttggatttctacttagtacatgcttgtcaatttgaacctgtgcctggtttttttggatctaattgtcatttcaatcgacagatattggagaaaactgattacactatgatatctggaaaccctttcataaaaaaaacaggtaaaacattgtgactttctttttgtgagtttcaagatcaaataaaactgaggcacaattttcctataggttggaggaagatatcattttactttaatctgtcttatgaaatcaaagacaagacaattgagtttgatgagaaccgtaatgttcagcgtgctgaattcgtggttcgagccttcatgcagtatgtgttctggctttcaagaattaattttttatatagtcacaattttatttagaatcttttttcactattctttactcccttcctactgcttgcttattaggggtggtaggttttctgatggatggggttcatgtgagcggcgtgagaagagatttttgaaaccaaatcatgatattcccagtacagcggagaccagagccaaaaataaagcatgccaggtatgtatttaatatttctgccttctggttgcaattattaaagggcttgcatagtgacaatacagaggacaatgttatgcatatttagctatgtccaactatagtttagtatccataatttagttcagtcttgatgcatgcttttgcatggttatttctctttatgtcttcagccttgccttctttgaactgcaaaccttacttcctttttatagtcatattttttatctagtgataaggaaattattgagctcctgatggaaaattagcagttgataggtcctctattgggattggactacatctcaagacaaaagtaatatgatggggtttattcgatgtctcttatctgcctccagacttcatttacttgagagtaatttaattgctcaatgaaactccattgttttttgtccattaatagacaatactgtcaggtttcctgtctcatagttctagcacaaggaaacatgacctgctctattagtttatatcttctgaatttgattcaattttcgtcttcattttatagcatgatttcattcagttggtcaagtcatctattttgcagcgtttgttctgttaaagggaaatgcattttttctaatttgcaggacctgctaggaataggagagtatagacctggtgcgggacaggtcaatcgataaagatgatcccattaattgtcactattgctcaatgagtaagcaatggatcatgaaaatcgatagattcactcataggcaaaggactagaagtttataataatagtagaacagtaaatttgtgattaactgatgtaatttctttctttgctctacactgaaaagagtgttacggaatatataatagattaacaaactagaacaattgaggactcaaaaatgccaacaatactcactcgtccactgtatgatgtattaattttcggtgatataggtgtccaattgcagtcttgttctatttttttttttttttattcttttttcatataaaactgttttcttatggaattctaaaacaagattcaaactcaaatgttggtatcggcgttgtcagtatagatactggccgcagatttctaatatgaacattatactttttgaggatcgggttgctgttttgggagctattgtttaaaaggaaacagtttctgctataattctgttgtatacactctttttgaaaataaaagatgaatgatattatccaatgaaatttttggatcagtcgcagattaggtcgctctatttaagacgtttgcgacactgttcaagaatgtgcaagcaattagaaaatatcggtcgtctccaagataaaacaacacagttatatactgtattgaattaccactgcatagtagagaatcgttgaatatactctcaaaatttgatatcacagtttttttttttaatagtgaaagttatgttttttttttgggtatgaaaaagatgtgtttctcccgttaattcaattgtgtaatggaatgagaatataatgggaagaaattttttttttttgtaatcgtgcagttgttgctgaacgagtcccataaaaccgatacgaataagtatttagttttacttaaacacatttctcaaattaaataaagtaatgaaataaaataaaaaaataagtattttattaaataaattttttgtagaaaacaaagtgttacactacaccatccagcttggatcagtcgaacggtgcgcgcgtgtggtgggttaagtgtgtcttcatccatttgcacataatggggttcccttgttgggttttgtgccctaaataaaacccattttaatataatcaggtttactaattaataaagatcaaaaatcacttttatgttgcatggttcacatgatttattttatgattatgtttaatgtataaattctattaagtccagaacatatgtatttgttgcctttggtttttttctaaaatacgtggacacggataagggcgacacgtggatctgtaagtcacccacgtactaaaaacaactaagtcttggacaaaaaagaacacaacagggagtgggcctcttggagaagagcatacgacatatttttactctctgggaggctagagccatgttaaggcattttcgggaggtaaagagattacttgaacaatcacttcgcatttactgccgcatgggggaaatcgtattagtgtcttcataaaagatgtgacagatggcgtaagccctatttacggcgattacacaacaatcgatgagtctagtgacggctacattatgaggaatcacatcagttaagagaggataaaagattatatccacctaactcctaagatacctacggtataggtcatgtatttcctaatatgttcccctatgaagctaacacaaaaagacaagtgattcatttctagggatccccttagaaaaacactataaatacccccaaatagactgaaaaggggtgaattgattttattcaatgaatcgaagagagaaaataggagagaaatccaccaagaacattctctgtaataaatactctcataaatacaaaagactcgtggactaaggctcattaatgccccaaccacgtaaaaatctcctgcattaaactttcaacaactcttctcatatattatttaattggttgctgaaaagctcgatcaacattttggtactttcattgagagctgaagaaagcgtctttaaacagacagcaatcagaaaagttagatcaacaatggtagaaactcgtaacaatacacgtcagcctcgtcctcctcaggatgctccaatcccagaggacgaggaagtagcctcaagagtgaacgtgggttctgaggagcgagatgaggccaacgacgaaaggtatgaagagaactttgacgagtatgacacgtacgacga

SEQ ID NO: 295148 - DNA, 1305 bp, Cannabis indica
taatgaatcttatctctgggcgtggccctgtggactagtaacaatctgaaaagattgttgaaaccacgtacaaaaaccttgtgtgtttttacttttatgcactgcttgtttttctgggttcttctggagttacagagttgtatctgtaattacggaaaaactgttttcaataccagtttcattattccacatttaattaatcacttaattaaataattaaactgggaatattaaaatacgaaatttcattatacttcaagaattttaaagatcgttaaaaatttcctcgaaactattgagattattggatataaagacagttagaatttgaagatgtaggaatttatttctaatataaccctacacacagaaaaccattaatcagtataccaaggtcaaatctgacctttattatccagtcaaatcctcttttgactctcagcttataaaccacacaacaacccttttatttaagagctacaagtcgtttttaatcacacaagaaaccctaaagttgaatcagacatatatatattgcttctttatcattcaaacaacaacatgcctccaagagctaaccctagcagagcagccttatcttcttcgttgttcttctctgaagaacacgaagaacaccaccaacccagaattaaaacaacccagagaacaagagaacaaaaccttaaaccgagccttctctttcgtgattcttcactgaagaacacgaaggcagctacagaatcccacaacaattataacacaggaaatacaacctaacccgctgaacaaaacccataaaatagaataaacacagcagtaaattcaaaaaagaaaatggagaagaaaacaccagattttatagaggtttcccaaaatattttgctgggtaagtcctcttcgagctcgcctcgttccactatgtatcttcaaagatcagagattacaagaattggatttcaatacacacaggtacgaattggtaattcctaatatttacagtgtttgatactctctttttctctctgtttctctctaatttcagtactaactgttgttttttctttccttctttgatgcacaatcctctggcttttgggatatccaaaccctaactttgggttccaaggcttagtccactgtaagcctcctccaaaaaccccaatcagactatttttcctatgtgaaactgatccgattttgtattattacagtataaaacccatttcagtataatcagatttactagttaataaagatcagaaataacattttatattgcatggttcacatgatttatttcacgat

SEQ ID NO: 295149 - DNA, 3657 bp, Cannabis indica
cataatttaatgattatattttttctgatatggctcataatttgtaacaagatacaaaaagcaaaaaaagttgataatcaataatgtcatcaatgacattttttggggccttaattttcaaaaaaaaaatatatataatgaaaaatatcaaaaaagaatatcgtgtcactcaaactcacgatattttgtatcgtatcatacaccccatgtaattaagttataaatatttattgtttacaataaacataatttcacttaaataaaacgtaatgatgtctttcattttttattttggacccacaaaaagtgaggatcttaagtacgggcttaacttactcatacctagaactaatcctgtatatattatatatattcagaggtatgctctttcttttttgcaaatttattttttactattgtaaaatgtttttcctttgaaattagcatatatattcagctcaaagactaaaaatgaaaaacacaaatacttaaatgataagacaaaaaagaaatggtcactaagagaaaagccaatatagaataagagagaataattattagctttctagtttgtttttaaaaaactaacacctaaaataatatagtctaccaataatttacatgttgctttaataattaggctttttaaattaattaacatatattaaaaaaaataaagtaatggatttttgttggacagcatgaatggagggaagagaatcagcagctctttcaaagttgatggagattaattaatagaatgttactttataccacaagataacacccaccttcttcttttgtggaaaactataccatacatattattatatggtattaattaaattaaacaaaagaaattgaagacaaagttgtcacaagaatatatataaaaaaaacaaaacaaaacaaaatgtgatccttcacaatcattactctctccaatccaatcttcatacattttgaaagactccctcacagccccctaatctcttaacctgcagcattatacataattaattattactttatgatccaatagtaataataatgcctaaaacttttaatatagattaggaagagcaattattactcattgttttccgacaaattgaaaggagcacaatcagaactgctactcctgcaagtacacccactataatggccactgtttttcccacgtcgtcttcactagtggagtctaatacaattttaaacacaattaacataaaaattaataaaaaaaatttaacaagtagggaatttgttttagttgatttgactgtccttttattctttttaaaattctgtgtaaggagaataaatgttgttatctgaatgtgacctcaggtaatattttaagactcaaaaaagatttaaatataactattttaattgagcaaaataaagggcaagaatttttttaccaaagcagaacacataagaattaaagaaaagattaaaagaaagcaaaggagggaatggcacaaagaaatgaggtacttaaaagcaagttggtaaagtactattatccaccttaatggtttactttgttgaccttgattgaagagaatttgaaccactttgtttctcttttctatctagaaagaactaaagtattgatattcattatgtgacccctttaaatcttaagtaaatacatgttccttttaagttttagaattcattaaaaagacacaaagtaaacaaaaataactcaagtaattgatctaaagaataatgaacaaacctgaggataactcatagtagccagaagcccaataacgagcataacattgtgccaagaagacatcagctgctgctgcagaaccacacaaagtttttaactttccaacagcctcagcaaggcaagaagagcaatcatttgggctcaaatcaccaaaacactgagcaaaaccttcaaccaaaccagaactactaactctaaaactaatggcactttccaaatcagctaagacatcgtctcttcgcctaaagaactcgacatcattattcacacttttgctacacttcttgtacctaacacctgtatcaatctttcccaagaagtcagaatgctcatatctaacataacaaccttctaactgcaaagcagctccataggaatatggacagaccaaaccaatttggttaactgcactctctatgcatttagagcaatcaatgatcttcaaatcacccctgcactggtataatccataagtggcagcctcaggtggggttgagcttccattccccatggaaaagctgttgtacaaggcttgagaggatgagctaactattgatgaaaggaatgagttgaggtttccctcaaatggtgaccctggttggtacttctcttcagagcaccctgcgtagatgaagatgtgagctttgatggcgtggccatagctactgagtgaatagacaagaagaagaagaagaagagctaagattgttttgtgagtggagtgtaaatgaaggctcttcttcaccatttttcttttcttttctttccttttcaaatggggttcagttgtagtattcttgagaataagagactaacttgctttttggtattttcttcatttttcatgttaagcttttccaaagggccccatttgttcctttaggggctaatttgtgtatggtcaacagctgaagcacactgctgcggtaaactaaaactatatgctttttttccttccaagtaaatagtattggtgctcactaactaagcaccacttcttttaatgttccataaccatatatcaatttatgaactttacttttatgaaaaacgagtctcaacaactaatggtttccctgaatacctttatattccatattcttcttctttggccatttatataacaaccaagttgagatgccacaagaggaaaatgggatttcaatagggcaggcaaagaagaatcttttttttgaaatcttgcagggaaagaagaatcaagtaataaaattcccccccggcaaaaaaaaaaaggtaataaatattaggacagctgttagttgacaactgtcatttggtttgttgtatggtggtttgctgttaaagagttagttagagagtttgttagagtctgttatttcagttctctatccttttctttattttgacagtatataagcttgtactgcttgagttaatcaatggaataactctttcttcttcatctttactctttctctgcctttcttacctttctctgtctttctctgtttgcacttgtgatttcatcaatggctaaacgtttcaatatggtatcagagcttttttctcccttatctgccaatatggcctctggaggaccacaagttcctggttcgagagagcaaaatggagctggagacaccatcggcaattcaagcaatcgaaatcctaatccgaatccgaatcagcgaccaccatctctgcatcgatcacgactgcaaaattcagatgagttttccccaatctacttctctcacaacctctcaatacgcttaaatgaccataactttttactttggaagcagcaagttatggctgccattcgtgggaatcgtcttcaaccatacatcactaatgatcctccatctcagtatctgactgaacaagtgttgctatatttttaaacgctacgcaagtatacgcaa

SEQ ID NO: 295150 - DNA, 1223 bp, Cannabis indica
agaaatttagaagcctagaagtcttgtgcatgtattaacatcaataactaaaaaccctaccatttcctagcctcagatcatccgagaacagttttcatagaatagttcaaagtaagttatgcatgaaattaaaagaagtagaatagtgaaaaaaaacttactcattgttcatagattcttaaaaaatgctcttagatggcttcggtagtgtgaaattccagcaagaacactcttcgaagatttgagaggaaaaaggaaaatatggctctgatggtttgagaagtcaaatggctaaaaaagtgtcaaagaagcttaaatctctattttataagtattttgagggataattagtaattcgaaatttaaattttgggatttttccctaaaaaaaatacaactaatactcattaaaaatgtgcaaatgtcacgtatacggtacctggcaactgtcgttacgtgtctcgagctccaactttcaagaaggcattaattgccctagacattgaagagacattcattcagtcacatcagatcaagagtagtttgaagaccgaacacgtgtcacccatctgatcatcatggtgaccgaataagtccacgtgcgaccaggaagttctcgcgcaaacttgtggggaaaatgttatctcaatttctacacaaggtgatgtggcatccatctgggtgacacgtgggaaagattctatggcctggatgggcagttcctcctacgatgtgtcatcctgggagatttactactagtaaatattcaatctatagaaggagctaagaatggatggacagagtatgttacaccatccgaccagcacccagtgcacagtcagctcgcatacatccgaccaaataatgcgagttaaatatcttcaaagatatgtctcataaagcttcaaacttgcaactcacgatcatatctctattttcatgggatagatttgtattgacaaagaaataaggggaaacctgcctggtttaccatttaattttatttattcaaggaaagtaaacaagtttcctattttaagtcttattagttttggaaaactaatttgatgcaattcttctcaataaatagtggaacagctagcttctttcaaggcaaggggagctctcactattcagggacacaaaattagagagaaacaaaaatcatagattcaagagagaaatactcaaaaatcattgtaagagctttcgagagagatcaa

SEQ ID NO: 295151 - DNA, 3793 bp, Cannabis indica
gagagagagagagagagtagtagtagcagtagaagaactgaagaagcaggaagaaagaaaaggcaaaagggcattgttcattaatgggctgctctgcttcaaaaaatagtgtcattctccccaaaaaaccagaaaaagggtcttcttcatcgctatcaaatccttctgcttccgcatcggagtcctccattgcttcctctccagtccctagagctctctctctcccaacccctttggttcaccaccctgccattagaaaaggggatactcaccacttggtctctcttacctccaccacttatggctatggctccctccttgaccatgccacacccgaaaacccgaccatgaaaccgaaggatacgcttcttaagaagcctaaaaaggcgtcgttgaattcccagaagagagctttggctacggaccacgacaaagacctttcgattatccctctgtcacctgactcagtcattaacacatgggaactcatgcacggtctcgacgaagactccgttttcaactccgccaatctcgaccgtccgatcaaattccagaccaaacccagttcgtgtaggtacaccaactttgatgggtcggggaagaaacggatcaactcgttcgagtcaacgagatattccgaaacaacgacgtcttcgtcttcaacaacaacgacgacgactacttcttcttcctcttcttctgcttcgtccttgtcgtcttccataacgaaacccctttggcagcacttatctgaagaaaatctcttatcgaatatggatcccaatgtgggattaacttatagaagagccttatcttcgcggcaattgggttacaaacactccaaaaccaggtcactcggttcgagtcccttctcttcgttttcttcttcttccaacagtgcttggttcaaaataccaagagcagaggacaaaatcgtaatttactttacaagcttgagagggataaggaaaacatatgaggattgttgctctgtacggatgatattcagaggcttcagagttccagtcgacgaaagagacatatccatggattcagagctcaaaaacgagcttcaaagagctctaggaggaaaagttttaactttgcctcaagttttcataaggggaaagcacattggggggtcagatgagatcaaacaacttcatgaagttggagaattggctcagctcttaaatgggttccccatattggatcacggaatggtctgcaatggctgcggtggtgtaaggtttcttccttgcccgagctgtaatggcagccggaaagtgtttgaagaagaccaaggagagttgagaagatgctctgattgtaatgagaatggcttgatacgatgcccaggttgttgctcatgaattatgtgtcactgaaattgagatttttattttgaggtaatttgtattttttttttacatatatatgcaataaatttactttttatttcaattattttgtttggttaagcttttcatttgcttgtagttagaactattttataaagaactataagataatataaatttttacttatttttagtgtttgcataactatcatatcaatatatttttttattaaaagtattttttaaaatgattggatatcattaaaaaaaaatttatgagtaaatcatgaataaattattttaatttttaaaataaattctcaaaagttgttttgagaaaaattacaagttctaactttttcgaaaaagacttttaaattaaaaaagaaaaattattttttatccaaacaccctgaaaaaaaagttaattctaaaaattaaaaaagagtttataaaaactaaaccacacagtcatagcattcacttcactctagtgtgagatgtgtatgattaattaacaatacatttttctatatttaagtaactttactgtgaaataagttatgtataattaaggttggccctatatataagcgggataggctcgtgtttaggatccacaccttttagggatcaaaaataaaaaatacaatatatcattagtattttatttaaataaaattaagtgaatttacacaataaatattcatagcttaattggttgtggttatatagtacattatataatggtatgggttcgagtcttacgatatttttttccaatataatttttttatataattctaaagtgagggtccgaaaatttaaatagctgtatgtatgcatatatattctcaggtccgcctgtatataacttcaaggtggcatttatcaacaaacaaacatagctactaaaacttaactacatgataaggttttagtaattagataaatcaaacaaaaaaaaaaaaatcctccaaggtggccgattgtagcgatttaacacaatacttatgcatatttgggtattgggttcatactagccgtactttatcttagtcaagagcacaattgtacaatgatttttttttccttgagttggtcataattccgtacaagactaatatttatttttttatagaaccaaaagctcatagattagcagaaagtgaggtccacaagaagagacccctccccaataaaaaatattctcacaaatgtaattgaatccaaccataaaagctaaataattgtccacaaaagaaatgcaattgcgtttgacaaaacgaaaattacaagaactaaaggtattcctcagcttaacaatgtcgtaaaaaccctttgcaatacgccaatcaggaagattattaaaatttaaagcatgtacagccacctgacagtcagagaataaggaaacattacaacaaccaatgttcttggcccaatcaagagccattttcatagccatacattctgcctcaagagcaaaaattgctggaacaagatttaatcatccatctttgaatgaagcatcaatgaaaatcttccaatgtggtgaatgataaaaatctctatcccaaaactaggaaactctctgagcttttatgtagtactagaagaatttgaccccataaactctacgaatctacaattaaccaaacacttgacctgttcaatagaccaagttgtattcttaaaaattcttgcattcctacatgaccaaatggtctcaaaaagagaggctatgtaaataatcaggtgaaattttgagtcagcattgacctgaagcatcaaatttccaatcttatccatcaaggtatcaccatggcactcattgattctcagagaccaaggatccccataccacagggccctggccaaactacgttgagtaaataggtgtagaagagttttagttcaatattatagaaaggacaacttaccttactagcaaaaggaagcttatttctagtagtcaaggccagagacagtgctctccaaaggaacatgctaagtctaggatgaatactcctgccccatatcagaatccacattgctttcctctctgaaaacctattgctttgttcccttggctaaaaacctctcattcatacatcccttccaaatcaaagtatcatgttgcaactctgagacaataagaatttaactaattttctcgcctaactcctttccaaaaaacataaaatcaaaaaattgagtgtcctacttctttgaagagaagtaaattaagccagccacggttcgcatagaagggaccctatgtatgacatattccatcaaaaactctaaaagtcttttggagtcaagccatgaaatctacggttgaaaccatacatcaatactctcccccactcacaaaatcaaaagtttgagcttcattggcaatggagtctttagctgagtttctatcc

SEQ ID NO: 295152 - DNA, 5435 bp, Cannabis indica
gaggagatcgatagagagagagtgatagagcgagagagaaggaaaaacaaagaaaaattatttaattatttatttatatatatattttttaattttattttaattattaatttttttaaataatttttacgtggacaatcaaaattttgtcacgtgtacatcgtgtccagtccaacatagcacttaacacctaaatggacagaaatcttaaattgctaacagaatatgagtattggagttttaccgcccaaattttagttttgggttaagtgaaaccaaaatgaaagtttttggagttttgccgccatttacccttgtaatattttattgttattttaatgaacctccattcttataaatcggaagctcctcttaactctttttttacattctgaaaaaacttcgtaagatcaaaacatctctttttaaaatttaattttctctgactaattgccttataattttcgtgagaaataaaagctctaaataaacgtaactccattatcattacaacaccgagaataaactactataaaattttagtctcttatttactttcatttcttacttttgtcctcaatctagctagacgatattagccaattcttagcatcaacacgaatcacccattgaaataagtactcaaatattatccttcaatttatcttctcttctcctatttcttttaggattttatattattttataataatatcactatattagtaatagttaaaaatattttgaccatgagatcctaatgataatttacacattatactactgttctaaactggtaaaggattaaaacaccaaagccaaaatagaatataaattaacttataatgaaaaaaaaaaaatgtcataaattatttgttcatcatctcccaactcttttggaagtgctatcgttgggtttggcattggtggccttttcaagcatgagtttgttcaaatactcttctttctcttgtcaccaaaaatagtccattgtgggcatcttttttcttttttttttttcctagagaaaatgatagttgtattaatcattgaaacacatgagatacaacagatataattgaaggtagaattatcatccagcatgacaaatgtatatcactgctagagcaaacaaggcggccaaaacataagccacaataagagcagatctatttacatacgagaatttttgcccgaagaaaattggatacaatattctattatcagacaaacgaaaatgaaactcattaggacgagtatgacctcgattgactctccatgtacaactaatgaaatcaatttcatagtcaaatgtttgttgcaaatcaaggagtaagattagcttccatttcttcagtcttgaaattgtccataacaggcttggagataactgcaagtacagccattccagagcctcgtagacaacctcaacaccaaacatttcattcgaatcaaaaacggcatctgtgtaaagcttcagcccacttcttgaatagtaaatatggccgagaaaaaactatgtgatgatgctgaaatgccatggctctgaaagagagtgcattttcttgttcagtaagagtgagggtgttggtcaggttgtcaaccaggtgttccaaggaaaaaatgggtaaacgattcagagaaaaaacaataacgtagcaaatggacggcaggacagtggagataatgaagcaaactgctataaaatatcaaggaaaatactcaactgccatagagcacgaaaagatgggcagacgtttttcaaaacacgaaaatatcctcaataaaaataaaaacaaaaacaaacaaactcaacaaaaaacgcatacatgaggctacactcttatcttaaaaaaagcaaagtatatgtacataaaaacatataacacaatcagaaatatatacgtacatactacatacaagaatatagatataacatattaatattgataattagcagttaattaccttttaaccttgaactgctatgaaattaattcttcaaaagtatttctacatgctccctgcaagaatgattacaagtaagcaatcttcgtagaaatgccacactttcggattcatacagtatcaaaggggaagcagggaaaaaaaaaattgtttgcatggctacagcactgattgtagcagaaatcgtcatattttccagtgaaactcatcttgtttcttctttacatttattttactatggccaaccatgacaaaagtagtggaatttccaatgacaccagctacattgacttccacaggccatatctctctctccacaattaccttaataatttcataacttccaaagtaattaacattctcatccaataggacttcaccaatccctgatagttaatagtgctaaatctcatcaaattctaaagaaaaatacaaatattcaagaaaaggctgcagcataccttttaacatcaatatcagagttagtcattagatcttttggtactccaacctgaattgttaatctatcctgctacagaatgtttggacttaaaatttcgaggcacgttgcctaggcgttgttgaggattttctatagagtacacaagtaggcttccatccttggttcctgctaagaagcattcttctggggttactgtcagggacgttattatctttccaattccattatacttttttatgacctcaagtgaattcatggagcgtacaactatctgcccttggtctccagcacagaccagaaactcaccacatctactcagctcaacacagttgaggcgtccattggattcagaagaagcaagatgcttaccatttattgaatataaatgcaaactgagatcatcatcagcataaaacacgattcttccatgctgagaggcaacaagcttagataaagcacagttattgggatggcgtaaagatcttacatatcttccctcccttaaggtatggaaaatacaggttccatcttttgatccactgataactatgtcaagctccatgctaacaaacaagcatgtgattatatcatcatgcccacaaagaatatgaaacggagtttcaacgattacacagtctttccgagggaattccatctgcgcagtacgaaatttcttttctgcatttcttccacgaacttcccaaaccataactgtggtgtcaaaacttccagtagcaaggacgcttccatcagatgtcactgcagcatcattgttaattttaaaccaataacttggaagaaacaaactgataaagagttattttgactgaaatttccaaacataaacacgacaaaacaaaaagaaaaagggaagggacttggatatctttgttttcagtgtaataatattttaacaaaaaatgttctaaatttctcatacaataggaaacaggagatttattttatttatagacatgtttcaatcaatacaacttattttgtagagtttaaattttcatataaatttcagatttgcattactttttctttttggccttctccattttggggccatcatgataagaaacagagaagaattcaatgccagctgtattacttatctctttaagcatggcaaatcgttaaattttggaaatatagttggtaccttacccagaaaataacacctccactatactagcaatggagggaattcacacccaagacacttttttcccttttaaagaaatatatatttatttatgagaaataattggatagtgattgtttgtttttaattactatttctaggtacttttattatttttggtacatagataaagcgaaaattcatttttttcttttaaaataatgtagttacagaagaccttgcaaattttcaagaaattccaaataatttagcatgctgaaaccagtattcaaacagccaaattacacacatgtacaaatatctgatgtcaacctcctaaattattcagaattttctaaaaaattgcataagtctgtaactacattatattatacgcttataaaaaaaatgaaattgcaacttattcatatgtacggaaaatattaaaagaagacaattactattatcgtggtaccctttatatatgtgtgtgtgtgtacactaaagacagaataaattgtgggaaaagcagcagtttccttcctttctacgcattgagaaaacattgagttaacctatgcaaaaaaagtcacaagataaccaacaatatgcttggtgtaaaccattgcaaggttagatattttatcctgttctgcattgcatacatcatcattgtttttagactcttgactcttgagaagatacttcaaccagtccttgagttataaaattacctgccacacagctgaccacatccttgtgctgtctgatgctttgtaccattctgccatcattcaaggatataacttggaagctgttttcccaattgccacaagagatcaaaaaattctctgatggtgtttgcattgttgcaaagcattgtgctccaagttcaacactttcagccaatgggcttccaatttttcttgaagatagaatatcagaaccaacaccaaagaagggatcctgtaaatttttgatagaatgtttatcaaatgtataccctacaataggtctgaaaggtttagtaatctattgatacaaatataagaactgaaaccctacttgagagcccgagaaggtaaaatttccaccagattgcaattgggttgttaaccacatcttaactgacaaggtgatcccctgattaataatgacaatattcgagtctaatatatgaacatataacacagaagatgatggatagcttgtactagatacaatagaggttaagttaattgagccaggtgcaaagtaaagaggatgagcaatcggaatgggtggtccccttcttgggtgttttttgcggaagatctggataggtgtctgaccaaaatttgcaatttggtcttcaattgctgatctttgcaaatcatcttccatggtgtctaaatcaactgcaccttcataagttaaatagtagaagacattccctgcctgtacaaggagaccagaaagtacgccacaaatgaatgtcaacgaattcaaaatcataaaacaaaaaaacagaaacagaaaaagacaagattttagaggatacctccactgcaggtttcccacgctgcttgtaaccaaataccaaatctatccagtgatgaaggtttgagctaacatattcactttcaagagcctctcgatttttacgaacaaattcttcaggtgaaccctgacaaaataagtacaaaatcataaatattcaccatttactatagggaatctcggcggttccttatctataattaatggtgatacctatcaccatttaccatgatggctggtatcgtttcagtttttttttagcataaaatctgatcttttaggtttgtatgaatatatctgatttttttttttttt

SEQ ID NO: 295153 - DNA, 1920 bp, Cannabis indica
aaccaagaaatgccgttagataggcacttttaatatataaagatttaactgtaatatttttaattttgtatattttttattttttaaaaaaaatatagtacatttttttataataataaaatttattttttttcttaaaaaaaactttctattatataacaacatttaatatatgtagatatatattgtacatatttttatatttagcgaagaccgtcaacaagtaggaaataaaaatataataactgatgaacttttctagtaagttaaaaggctcattgaaaggatcgccaagatagggaaacagaaaattcgtttgttgtgtattttaataataataagaacaataattttcatacaaataataataataaagtgtttatctaaataaataacaatagtacagtagagctgcgcatgaaaatggatgtaatgcaatgcttaacaaaaaaaaaggtgggtagtttagtatttttcattttaagaaaatgaaaagagaagaaaaaataggtgatgacacattaaggattgcattattgggttgggtgatagtgatggccagtggccacagtcattaacaccatcatcagtttcatttgcatctcaatatagaaaagcaccaaccatttgtcttttagtattattgttgagaagttgatataagatttttcagctctcttcatccatttctaacctctcattttatttcttccttttgttttccaaagtttgacttgaacaaaaacaaaaatatcaatttggtaaaatgaaagtatttttactgataatgaacaaccactaaaaaactttacataaaaaaaaattaaatttgtaatcaattttaacttaaaacaaataaatataagaagaaaaaatatatcaagtcaacttctattttgctcaattacgttattgacctttatatatatatattttgcaaaataatcaaaatggactttaaactcaatttaggtcaaatattttttaatagctaaaatgcttttattttttataatattaatatttactctgacttttaggttcgctatgcttctttttctttggtgttaactcttcattttcttagtgagagtagcaagatttttctatattctaggaattaagatttgagtttggttcgttatctttttcttcctaataaagcggaagttgtcttatctatttcttggccctcctcatatgtggatgacaaacttatttggaattttaaaaagtctagatggtgctctgttaagagcggttactagttggctcttcattataaaggcttgggttatgcttctccctcaagggagtactctggatgatggaaaaaaatctgtatcctgaatatccctctaaaagtgagattgtttgcttgacaagtgtcctctaattagattcatacgaagataaatttggctactcatggtctcttatctgatggtctttgtcctctttgcgagctccatgaaaagactattcatcatgcctcgtgggggtgtccaactttaatgtcttgcaggaaactttgtgattttgagttgaataactctcttcccactcatactgattttcttagttttattcacaacgttattgatcatttgcttaaggaaaaaattgaataagttattgccattttgtggcgtatctagtctaagagaaataaaatggtgcataataacattaaatcacctcctgacttggtggtgagttgggctcaagaatacctttggaacttccaacatagccgtgctcgggctaggcatcctccctttttgggacaatggacctctttgctttctgatgaggttggtttgaaatggtcttcttcgttggttggttttatcaaggttaaccgtgatgctgctgttagaaaatttatatatataaactgaaacatatatgattaagtat

SEQ ID NO: 295154 - DNA, 11091 bp, Cannabis indica
aggttctccaatgcctatcccccagtctgttgatggaatcctctgatcaggtcagtagcctctcttaatcatcggttaatccccgcttgttctgcacgcatggattcagcttgtttatccatccactcttggaattcacacctctgctgttcaaacacatggttcattacagcacgtgtttcttcttgattatggtggagggcattggtgtgacatggaattgtcccaatgcatccctcagaatctctatatcagtgttttcccccaaatcaacttggggttctcccacaaatggatgtccggtgcccgactcagtttctccagcatacgcatggctggtatttccattttctaggacaccgcgcgtcaccccagtgagggaggttgtaatcgtagtagttctgaagttaacattagcatgagtagtgggaaggtttccccaaggtggcagtcgtgggttagggttgtctactcctaagtcaatgggagcttggacgttaggatctgtcaccattgtatcacgttgctcagttgatgaggacctccttctaagaaccatcatcaaagaatcaaaattttgaaaggataagactgtgttcctttgctttcaatcaaagcatcaaaatatggacatcgcttttagcgaacgacactgagtctttaaactgatgaaattgaatgatcaattaataataaaacaataataaagtgaggcaataagaacaccagagatttatagaggttttggccaagtgataatggtaatagtctactccccttttagttgtattacttagagaattattaagatcacaagattcggctaggtgagtttcttaataatctcgagaaatcttacaagtattttttttttcagaataattactcttcaaagtgtaaaaaagtagtccttttcttaatgaaaagctttactatttatagaggaaaggtaatacatttaagtcttaaaaaataggagcagtaaattaaattctctattttggtgggattggttgaagatcagctccaaactgcccatcccacgaatctcattctagtgagttaatcccaaataaataggaattccagttgttatttttgtgaaaataacttaaaagagaatctggagaagatctgcttctcttgtatttgtatgtacggacaattcaccatgcgcgacgtattgtgagatactagttccgttcaaagaatagttgcaggatagctttacttaaatgaatctaaccttgagagggatatggccgacctatttgggtaatattctctaaccagctcttaacatacctgccactttaccttgtgcgaaatttgggattacaaattaaattctatggaccactaaaaattaacaaatgtgtatactatgacatgcttatttggcatttaacataaatttttggatggagtggtgaataccaaaacataatgtaaatttagagagttttaacttaaaaaaattcaagattaagtgttacaatttgtatagttcaagttttactttaaagtactaaatgtaaaatttcatactacaaggtaccaaataaacattattaaaaacataaggtattaattatatttttcgaaaaaaaaaacacaatactaatcgaatttaaaagattcgtgacaatggtgaaataattcatgttagcgctgaaactgaaagtcatttggattgagacttcactgtttatattaagaagaaatgcctcattgtcattggatgccccccaaaatgtaaaaatcttttagagttaaataccatgattgaagctattaacctagttatcaattatcataggtaaggaaagaaattacaagcacaattcagggaagtgactgagactgccacggcccacgcttgccttttctttctgctcaagtgcgtgtcttgtcaaacagaataagatatgctattgtgcccagcactccatatactaatccaaagtagaaaggcatattaggtaaatttcaactctcccagttcccacacatcaagccgagagggccccccttattgcaatcagacgacaaaggtataaaatttattagaggtgcccattttctcttttcatattattctgaatactcagtacttgttgtcttgtggcagtacaagataaaaggatcatacaaaagataaatacgattccaagactttcataaagctctactttttatttgaatataaacactatcacgaatttatagatatcccacatttattcttggagaaatgtacaaacaatgcaactatgatatctttctaagtccattttatgttggctgttgccagctcagaaacattaaacacttgtcttcgaccatccataaatacataaacagcaccagggttatgcaccttgataaaaacgttaaattggaagtgctcaagccacatatgctacgatttcaaaatcagacagcaaccccatgatcggttcataagaccatattcaaaaacatgatcacacctaaccgtccctagtttgagaaacaagtatgtatacgtaaatacatagtatctttgtgtttctttgttgataacttgatattgatggcaattacaaatgcctactaaaattaaccagaaattactcaaagccccttgtaggtgaaatcagtacgggatatgcaaatatgacaattgggaactggatactggtactttttcattttaaaggaggaagtattgtcgtaccattgagttttcataatttccactttcttcaattgaatccccatggttgaccaaaaaaaaaaacagtcaactaatacctaaacagcacagcagaagatgtattaaatggacaataaaaagaaataggaatgctaattcaaaactgggacccatgaaatgaagacgctgctgtacaaatttgccaaaccaagtcctaattttgcagttgattcatatatttatacaaaattataagtacaaaaagctacacataaattttaattgaccataacttaccaagaggtaagattggcatgtcctagcaatgaaatcgacctcatgattggtgcgaaggaagctcccacacctgcttccaataccttagcaaaaatacaatgcagcctgtgataataactcgctgaaaaatctagcatatgcacatacagaacctttgctattctctttcatttttcttttctagcacatacataacatgcaactttgttacaaattttcaagtaatggtgaacaagtatagatcttgttcaaatgatatgattttctttaaagccacatgcatccatgccagaaacaagacaaaccattcatgtaaggccacttttgaaaggaataaataattttagttttaatctaacaccacagatagacatgcctatgaaaatcttgatattaaaacacataaaagaatcaatttttgtcaatattaatcctacctaaattaattatttttatataaaccatccaccattaaaagagtagactgtattagaacataaattcataactaacaataccgcttttaaaataaacataattgataaaccattacagacagctgctttgaagtacacaaatgctttctgtctttgaggacaaatctagacagccaagaatcatcttcaaaggtaataatggaaggcatgaaatgggagaggaagaggacaaagagccaagtacatgctgaatggctagaatgtccatagttcactgcaaatcagagtcgtgccgccttccaaaataccaccattaacgaaaatgacccgtgcatatgccttcaatcaaaactactgttaaaagatatacaaacttttcaacataaggtaaaatggcacatccagtgggcatgacaaattaaaacagcaccgattttcaccaaaattgaaagcatgtgcacagatgttcatatgagatgcgctgtgtgatggttgtaataaagtagtaatttaacatacatcaactcctatatatgccacaataaactaacttgccacaacaagaggatgtttgcttcttgaagagtggtagatgagtaaaaacaggctgttgtgccacaaaaagcaagaggttaaacgtatgtcagaaatttgcaaaaaactgtggcagctcatgagacagttcgaccatagcaaatagatgcaatgtaaaggttcttcccccatttgtcctgcaaaaccacacagcattgaaataaaaccaccgaaaaatagaacagcagaatgagagtaaagaagaacaaatcagataatttaccttgacatgtgtactagggaaagcagaagtgcggagtgtctcttgagtctcatctattggttttctccttggcacactcagaacaaaagcagcctgatcccaagttgctgcagttgcagtgatacggtagccactatcccatcttctgtgaataccttcactaggatacagaaaatctagctctacaacctaacaatgttgattaaaagaaaaacgttgtcagaattctgtctacaaaaacatacatgtatatgcttgggtcacctactgcaattccaactaggatgattaataatttcctaacattaacaaacacctggtccgagaagcctgcacctcgagacataacaattgcccacctatttcccgcagcagccatagcagtaacatgaaatccctccctccatttcttgttgatccatttgaatggaaatgtatcactcactttatatgactgctgtaagtactgagtccctacatgaagcaacaaaagttgaatcagacagctacaaagtacaaacttctccatatatttgtgtttttgactccagactaacctttcgacattatgactagtgaactaccattgttagctcctgctattgcactaatatagaaattcttctcccattgctccatgatccattccttcatttacaaaaacagtccaatgaattcagagttttaagtccaataagcagttgtcatgcagagtttttacccactgtaatagtcataaacaaatttttctgtgtataaattttttagagaaagtatatgcagcaaaatgaagggcaggtattcaacgcacaccaaacaatgcaagaaaatgataagcaataattatatatatttcataaatccatcctggatttgaaaggagaaaagaaaccttatgaagaaagtaaggagagagtgcataaacttgatctgtgaagccagttccagcatccataatgagagcccaaaggtttgaacaagatgagacactgctgatatacaacccatcatcatttcctttgtcaatgtgttgggatagcctcatatctgcaacattatagtgatatctacaagagaaattgaaaaacgaaagtgaaaatgaaaatcaacttccgaagctttgagtaaatttcaatatcaggagtttataagcaagatgaacatacctttgtttcataggacgacgggcattataaacactgatccactgtgtcgcaggcattcccatacgaatcttcttcttcggttgttcctcatcttcgccttccatggacaatcttcctcttttacgtccaaccagacatatgagctttgcaatccataatacatgagttaggtgtatttcaagcaaaaaaacaaccaaatttctagtttaatgtaaacgaatgaaatgagaagtaccttctgagcaccttcagtatttattggcctaatatcaggattagggccaataattccatcaaaaagagagatatattttgcatagttgggttcttcgtcgaacttcaaattcaccacatactccacaaaatgtcgaaaaggttgagggcaaaaacaacatagagcttctggagaagtagccatcttcttcttacaaacaagaaatcccttattatccccctaatacaaagagatgtattagtattgcatacaaatttaggttaggtatacacataactcaacaaaaacttgaaaattctgaacctgatatccttgccaaggcaagcgtcctcgaagaagaaatacaagtgtgtaagcaagagattccaaatcatctctcctactaccagttctacctagatgagcatgcacactagcatatcgaactgttcccctgcaaattagaagttatcatataatatcaagcaattgtcaagacggaaaaagaaattcatctcctactaagtataagatgtctaagtacctgaatacatctgggcgttgatcatagtcaacatgcaggcctgttccactatctcgccaccgagttgctgaaatgtcaaaacaagtttcaaaattatttttcacatcaattataatatattaactaattttggcaaagtaacaacagctgagagaaacaatggtactgcacagttacctaatcccaagtcaacaagaaacagccttttctcatcagaggttccaggggggccaagcaaaaaattctcaggtttcacatcaccatgtacatatctgcaagaacaacagcagaaaatttatagaaccataattatcaaaataaacaaggatcttgtagtgatgcacatcattctagataagttcatctatctggccagttcaactagaagtgattgctgtgtttttatacacaatcaccatcagataaggaatcaaaccttctttaaccaaaaagaaaataaaaaatagcatcaagatagaacgaaaaacacatatcacgatatgaagaggcttcaacaaagtataaggtaacgcctattatgttgtttaattgtagatgtaaataattcatgtgaaataatacaccctatatgtggacctacaagatgaaaaattagaattgtaatcatacaatgaaacagtttaaaaaaatttgacatgagatagtaaccatgtttgacaacagaataaaagaaaagtggtattattagaagtataaaagcatcaccctctagcatgcatcttttccaatatggatatcgcctcaatagcaatacatgccaccatttcaattgacattctgcgttgaaaaatgtatgtcaaatgacaataaagataatcaattcttcaatgaacaacacagtatacttacgtatgtgaactattattccaaacatcccacaaactaggtccaagcatatccataacctgtacaaggtcagataggattacttaaggcaatcacagagttgcaattggaaggaaagttgatgtcataaacaaggaaccataccatgacaaaatagtcaccctgtcgacccttataatgaactctaggcaccccatgactacctccaagtgcactgtaaaagcaacaaagttactgaccgtactaagattttggtggtgggaatgcagcatggaccagacgaaaaacaaatgtaagaaggtagataggagcctcacttgtaaacttgccattcgtatggtggtccatagttacatcctttactggttctgtgctcgaatttcaacgcaacctgagataatgaagatcacaaaagtcatcataaactataaacacaattcagaaagagcaaagaaacaccaaacaataaattgtcaaacctctaatgctccggggccagttctttcatttatatttataggggtagcacgcctaccgacataaacttgtccaaagcctcctttccctaattttctttctactttgtataatggagaaccaccaacctggatctgttgttggaaatcaaacattaaaaaacttaataaaaaattataatttttgcagactaacataaattagcgggaagatatagtataacagtgacttaacgacaccactaaactaaaactttgtaaagtatcacaacaaatatgaaaaaagaaaagaaaaagaaagtaaactgcagtgcctcctcagttctcataaaagtgttttttttttttggtcaggacagttctcctaaatcattaaacactcgtccattaacaatggatatcaacactataaaattttctacaggactttatcaaccaaaaaaaaaacagagcaaacttttacaagcttctgaaaataatcaaagtgtggggagctaaaatattcgagaaaatctaaaaatgaaacacgaaaatccccacatttcgctgtatcttcatttcatttctacagatagccatcatgaaaatatatatatgtgtgtgtgtatttctaaaacgaaaacactgagagatatggaccttctcaggaatcggagcattgcttccgtcatcctcagccgccacaactcccttatcgccactgcgaccaccactttcgaactcgtccatacctctctcaccaactcttttctcttcttcgaccttaaacgacctcctttcaacaccgatcgcgtcttttccctccttactcttcttacttcctttcgttcaccgcaggccttctcccctgatgaccctttacagttagctgagtctgtagctgttcttgttgatgatgatactcaaggtgtgtagtcgggttgggtagtggttcaggactaatattaggtatccaatttctgcgagctctgctacacagctcaagcatgataaagccgttgttggttggagagaaaagagaataccatgcaaggaatattcatgaaggttccagaaccatcatcagcctagaatcgatcactgtaaagggggacagaggcatataaaagtttgtatatttatttttcttagggttcggtaagaaaagaatggaatttggaaatatgtggagggaaatgaaaacaatcaaagggattctcttctcagtctctagatttccacttcgacagaataaaagaagacatgtctttgatatatcacatctatataaatatctatttcgaataaccaagtttcatcctttcaaaatgtataaataaattaaataaaattcatcaaaacctagtcggtctgtgctgaaaaagagaaaaccttaaagcttttacaatcaaaataaacgatttttactgtacacatataaatatgcaatttattttaccttatgacatgcattttaaactatccaaatccattaagttggaatcacattatttttatgtatagttctcttttctttttttaacggaaatttttatgtgtaggagtagtttaacacactactattattttgtgtgtaaaataaatgtgaagggagctgctaactaagacggctgattactgttgcatttatccgtagatacactttgatttttagtacatagaatgatagaagtgttataagttaaacttgtacattaattatataaggtatttcactagttttaaaatctatggtatttaaatcagagtttatgttgtttgttttacatggctattaaaaattataagtgtgtaattaaaatttgttgatttacatacacttcttttcttttagaaaatagtctcacaagataccaccaaagaacaacgagctcaaaagggtcgagagctagaaaaatttattaatgcatggcatcaaccaaaataaagttttagatacaaaaaggataatcaggctatgcgactgtatctgttaaagcaaacttagctaagaatcagctataaaatagtaattaaaactcacaatattgagatacgaacataaaattctaatatcgtcaggaattaaacctaaaaaagaatctaaaactaacagattattatgtttatgaactaaactttgcaatcggtgtcgagttgaatactgttgaggttgattgtaatgcattgagacaagacatttgaaattgcaaatgcctctgcaatttttgggacactaatgccagacactctccaagcggcagacgcaagaacaataccattagaatttcgaatcactatgcctaggcccccactgctcctaccaaattgatagttgtgtccgaattaactttgaatagtccacagggagggtacacacactttactcccaatagttttttactctatgccttaaaatatatcatcaaaactcaattttcattattatagaacacacttttacattataccatcttcatattttcttttacctcatttaaagattatatttttaaatactattttaactaaaataacatagaaaagaatgaatgaaaaaaataataagaataaaaaggtaataaagttggagagagtaacatgaagaaagtaataaaaaatatttaaaggattcctaaatattttataaatttggaaaatgaatagtataattgaaaggatctctaaaataattatagagtttaaagaagttgttggagggattaaaatgcttggcttctttaaaatttgaaagaaaatgagagtttaaaggagctatttgagagttctctaatgttctccgcattctaacatgtatatcttgtaaggaaaagaaaatgttccactctaacatttgagtaaaatgttatgcatcacaaaaaatttcataagattatatcgtaaactatcgtatcgttatgtattatttcgcgttaaaaataaattttcatggcaacaatgttaaaatattgcaaaagcattgttaatatcacaaaaacatcagtttcttaaaatctctcaagattttcagaattttagatcaggaaaaaaaaaaggactaaaaccaataaatattttagatctattctaaacgtctacttatgattataaaagtttgagatatgcatctgggtattaaaatgattgaatgagtttatggattggattgaattttcaattaaacacattaaatatatatattttttaataatgtttcatggtgtcaacgttgccattggtttttgtattgatgattttggcaagtagaggggaagggaactgagagaaaggagacagagaaaatgagaattgagagactgataaaggagaggagagagagacgatttgtctaatcttctaaagccctttattagcaactaggtaactaagccgcgcttcgcgcggtgttgtttaacttttataatctttatttgtatatatatatatttattatacttatattaaagtgatatatctaaaatataatattttattaatgtgtgtatttaattattattttataaaagtttttactattttatttttatggtgtaccgttaaaataccttctctacaaaaataaatgtaggatgaca

SEQ ID NO: 295155 - DNA, 1300 bp, Cannabis indica
aaaaaaaaaccaaactagaaaggtaactaattatcttttaataaaattacactgtgtaacgtactttgccaccctaaatttacactcctatataatataaatttaagagcaatgttgttatagggtaccaaaattattagtattatcatgatgttttataattaattgacagattttcttaaaataagtgagaccgatattaatattatgtcgtaagggttattttgcatttctctaaatttaatgggttatatttttagcaaattttatacttaatttggtgaatattatgcattattacttgtaactttactataacgtaccaaaacgacgccatcacgagcagctagagctagaatatcagcacaagaaacgacacccgggcaggcagcttcaagcttagacttagcgtcgttaatgacctcgtaacccctcaacccgaggttgggcagcgcagttttctcggcaccaagcccgtcgatgagcacagaagcgtcacaaccttggacgaagcagtcgtgaaagtgcattctcagcaagccagcagccacggtgggatcagacctgaaatgcgattccactgtcgacctaacgatcgactcagctcgtggacatgtccgtaggtagaaccccacacgtgtgccttgttggctctgagctgacgtggaagtcataacaagtagtgagtacatcaacactatcgttattagtataacactttccattatagttgttatgatgaaagggaggtttttttcttttgtgaagggtatggatatgatgataatacatatgtgtataatgtatttataggagatgatttaatcaatgtagttggagtagaagaaagtaagagaattcggccatgcatgtgtggaaaaaggtatgcaaagaaatttttggataataagtgttaataatttacaaaagtcgaggatgtatatgatatgagctggtaagtttggatttaagtgattatagaagagttcgtcgggtttcacacacttatttccgcgtgattgaatagtcaatatatggctgtgcctctacttgtattattttatatttgtttttttcctgtgactttctaaattattggatcttaaggcttccaccgctattagcatttctctaaataaaataagtcaactatataagcttttaaatagtggcggtcaatgtcaacttatagttgatttttttagttataaaaatatatatacttacgtccttttgggctgtagaatgatcataacataaaatatatatgattagttctcccactcaattaaactatcat

SEQ ID NO: 295156 - DNA, 2032 bp, Cannabis indica
attattattgcattctcgtacgtgttcatgatcaatttgcccacaggccacaccacataaattgtcagcatcacatcacaccatataaaaattacagattaaaattctttacggtgcagttgtagtttatatttttgccaaactgcacagtgcatcatgatttgcaattttaaatttaataatcgtgttttaaattacaccgtattatatattacaaaaatatacttatttttacaatatatatatttttcatatttaaacaactcatatatttataaagtccaaactatgcaattaaatatataatagaacatccatataaattattttcattctttattttttttaatacattactattgttttttttttgttgaataagattttttttgttgaaactttattaaattaattttaaaatttttattataatgtttgatgtagtgtaaattttctaaattgtactataattttacagtgtaatttttataattttaagatcttctagtgcaattacaacttgagaaattataaaaactacatatgcagtttattttgaaaaaatgaccaaaatctacactgccagcaccttgaaatggcactgtagctgctatgtttttttttttttaaaataataataataataataataataataataataataataataataataataatagtttataacatttaaaagtaaatataactactacttgtaccttatagaattatagtaaggcaacaatgactctgaatgtgtaactaaaagtaaatttatatatgtactgctgacaactcatttatatatactatatttctattggttcaattttacccaaccaattaatgtttatttattatgatcataaaaaaaaacaagttataactgtattaattgaactgttcaggggtaattaatgcaattggagtgatttatggatagagttggatatccctacaataaagtttaaacttgaagtttgaagttgttcaaattattactaaaatgataattatggttatcattgtgtataagatttgtatagtgtaaatgttgtatatttaagacatgcttattgttttaattaaatgaaagtgtaactttgacatatttaatgtttaaagttaagtgtacactttaaatatgtttacaacaccgaataatcttaaactagatcttggaaaacactctgatccaaaaactaaattcaaagaaaattgagattttcccctgcaaaccaaccggtcggttcattagtgaactataatagaattggtcgatcgattctgacagacaagaaaatttctagttttcttcctcaaaactgatctaaaactccaccaaacctatttaaactctctagaacagttttatattataaaaataatgtacagaaatcatcaatactcaacaattcaacacaatactcaaatcaccatgcttgaaccaaaattagttcttaaactcaattcccttaactctaaactcaaacaaccaagaaatcgttcaattcacacacaaacagtcccaaattaaacttaaaatacaatctgaactcaaaccaaactttcaaatccaaaatcataaaaactcccacaaaacttaactcaaaacttaggaaattaattaagaaaagaagaaggggacactattacaaaaaaaacgatttttgtgtcgatcaatgctacgggtctacgaccatgaccaatgcaaaaaataaaggcagaacttttgcttcagttatcaactgacccaaaaaaattaatatttgcgttggtagctgcttcgacgttaatttgaaaaccgacaccaaaaaattaattttttataaaacaaatttatgttatgcgtcggttattaatagacgttaacattgttagcgtcgtttcatgactgatgctaacaatgttagtgtctaataataacctaagctaaatcatttaaattttacaaactctatctattacattcatctctcattttttaccatttcgaaaccaagagagaacttctctctctctctct

SEQ ID NO: 295157 - DNA, 2160 bp, Cannabis indica
cacttttaatcacaaattttattcgtacttgtgccttatggaaaagtataattcttgtagtggtggaagaaaagaaaattaatttatgaatgaaatattattatttattatatccctacacaatttgaattaaaatgagagaattctcaaacaagaatgataaataatttatttcatatcccttaaataaatatattcaaacataaaaaaaaacatgtataatatatatgtaatatttaaatgtttataacttatttaaataaaataataattaattataaattaataaatttgcttacctcagaaaacaggcaatgaatatgtgcactgtagtcacaatctttacaacaatagatgcgaaagtatggattcctttcttcttcacatatatcacaatagaattgatcataatgatcatcctttgttatctgatgatcaataagagtcaaaggatgtatgtggtatttaaattttatggtggatggcaatggaccacataaaaaatggagattataatcacattctatgcatcgaaataagaaggattgagtacgacttatttcatcaggaacaagatgatgatcatgttcactccaatctgcatacgatttttgacaagcactacaattgcccttataaaatgctttctccacaaagtaaagtgagtgaacatgactttgacaactcaccattgtcttaacaaagacgcattcagtgcacaaattaaaattacacccatcgtgacacttgaagattagcctacaatgtttcttacaacataaatcgcaagattgaggtttactaaattggagagcaagagagtgatgatgtgaatgagaattatcaactttccatggaaatttagcacaagaagagtggagaaaattcttacacgtttcataggtgcaagaataggctaatcccaaccatgatgatcgacacacaaaacattgagcttggtcttttgaattgtcatgatcgaccaacatcatcagttgttgatggcaaaaatattgaacgttgttatctttgtcgcatgttaagatgggaatagtaatcaaagcacatgtcatatgcatgtgtagtgagcattgattacatacgtatgcaaaaacttcattgtgttggaatggattttcacaataatagcatgttgtgttgttgttgttgttgccattgtttgatgatgaccttttttgaagcattagaggaccatggagagaatcatgtaacccatgattaaggtattgtggcaactcagcacatgttttgtggagagggtagacacattcccatttgtaacaatcatagcatatttgatcgtcctctactagaagttgacacaagccacagttgattttggcttcttttctgtatttacgtcgaatatcatgatattgtttcaatggatggctgtgactaaaatgttgtattgtgtttgacatttttatgtaagtagtactattgatgattaatactaaagaaaattatatacatatatgtgttagtagagaatggatgaatatatatctcaacaaagaagaaaactttggatcaaatgtgtgttacttataaaggaaaagcataatatacctttattccaaacttaaatttgaaggaaaagcaaagtgataattctataatcaatatacaagaatgaatatatcattcattaatattatcattccaagttaactcttcatgtttgggaaaaaaaaaattctatctccgtacgaataaagattttttgttaaaaattattatatgtgtattaaattaatttaaacatcacacatcaatttatttgagagtattttaaagaaaaacaattactatataattaataatatttaagaaaattagttagttaagttggcacactattaaattggtttaatacataatgaaataccaatttttcataattgatcttaattttcttccaatacctgttccattaatgtctctccacttaaattattccacttcattaaatttatcaacacacatttaacaataataactttgtagttatctctgtttgcttgagcattaattgataatttatataacaataattctacaatacatctctttaaaataggtatattgatgtacccctatctgttttagcatctgaaataattttttggtcaaatt

SEQ ID NO: 295158 - DNA, 4934 bp, Cannabis indica
gtgtgggttagatttctactttcaattttggtatattaagaaaaatgaagttcctctatatagtgtaaaagttctagatgtaagagatgtttttcttttctaaaggctttttcttccttagattcatagagcttgacatcattagtagattgctctattctactcttaatttttgtggatgtattttaagaattttaaatcttttttatctctctttcttagtatatgtctaattttattacattttgtttcactaaatatacattacacataaaaaataaaattattacttgattggaaaattttccatattatgttttctcaatattatgatacagttgtagttcttgattatgtgtcttcgaaagtgttaaatggtgtaaattatttttttttcaaaaaaaaaaaaaaaaagaccacatatttcttcttcttttctttttcttttctttttagcaatagaccaaatatttcattacaaactatataataattccaaaatatggttacataaaaataattaaaaaaaaaaactccgtaaaatattattactaatatatttttgttttattaggtgatttcttttatatatataattagcaatacttttttaacaaatattctcttttttttaccttgtaatgaaataggtcagcctaccattcactaattttatttttaattaaaaaaatattaatacaataagtgttaccttctttcgaactttgcctcaaaaatttatgttggattttttttttcatgacatggttgtgatattatttatttttttttatttttttgtgagttttctctaaaattttagattagtttgtattgccaaacaaaaacaaattttaatattctcatttactacacaatgttcaaaaaaaaaaaaattaaatctatttcatcactgtaaattatacaaaaagagtttaaaatagaatagacacaaaacaatagcattaattggtagtaaataaaatataaaaatgggaaaagagtggcgtgggatagagaattgatcacataatgaacatggttgcccacgattactaataaggttggcattttattattattaaaatataataccattaaagttcttttcaataaatcatggatctaattcaacaccccaaattggtggagaactcattattattgatttgtttttttatatatataatttaatatggtatgtattatacctaataatatctatcatatatacttagtatttatcccattttgaacacatcatcacatcttttatgagaaatgtcctaattttgttcctaataaagagattataaataattaaatacacttattttcatttcaaaaaacaaaataaatacacatttagtttgtttgagattaaatatgtgatgcattcttatagctcacttactaaaaatttattttaataatgtgttaaatgattgagacatagtaaaaattacgttaaatttaatacataatataagttgatgtaaaacttgtatcactataaatttattaatgttttattaatttttatataacattaaatttagactttttataataataaaattattattattattttatatttttaataaaatattaaaagaaattgatttttttttaattatatattaaaaaaattaatttaaatgtatcacaaaattttatatattatgctaaatatagcataatttttatattaagtattgaagaaaaatgattaatatagtttttcgtccaaataaaaccaacaaattcaaaatataaatatcttatttattcttattagagatatatgtttttggcatttagttattaaatgataatttacacattaggaaacatttggcagatcctctagctttgttcctatttaatttttattagtaaaaacaaaatagaatgtgtcctcttcttaactctatatctaaaagatttttttttttttattttccctttcttaacaacaattgtccatttataaataaaattgtaattacaaattgatttgaagagatgaaatgttgattatttttttttaatatttattaatagtaattggaatttttaaacttagctatttaaattttgaaaagaggcttgcattaaggagacccttttatggttttgtcccattttttttttttttggttttatgggaaagttttatcttgttcgatttaggttgcggaggctcgtggtgatatcaatggccttcgatttggtaggaatggagtacgggtatcacatttatttttctcagatgatagtattgaaggctaatagtgaggaatgccattgtttaaagtatttgctataagactattctgaagttactggtcaggtagtgaattttttgaagtttgagatatgctttggtagtcgagttgattcccattctcatggtcctttggctggggagaaaattacttctcattttgagaagtacttagggatgtcgtgttttgttgggcaaaagaagaatgaaatttttaagtataacaaagatcggatttagaataaaattcgatgatagaagcgatctctctttttctcagttgggtaagaggtgttggtaaaggttgtcatacaaggtatgccaatgtttgctatgagctgttttaggttctaaaaaaattataaacagtattcataacttagttgttaaattttggtggatctttactgaaagaaagcggaagatacactggtatacatggtaagagaaaggagtgggggagggggtgtcttgggtttaaaaattggggctttttaatcatgccatgttggtaaaataggtgtggccgctgttctgaaataatagctcttcgatccctcaagttttgaagcattcttatttttagaatggggatgtgttgagtgctaaggtgggttcttgtctgtcggttgtatggaggagattattatgggggcatgagattatcttagaggtatcgatgatagggttgggtgaacaagttcgtattgtggaggatcgataagtgcttaggcctacgaatttctcttttttggttaagcctttgttacaaccgagtattaaagtggtggatctacggttggtttcgggggagtgggatatagagttcttgcaagctaattttgtaataaggatattgcccttattcttggtttggtgcatggatctttggattttgaggaccatattatttggtattataataagaatggtgagtattttgtgcaaagtgggtattaagtggtgattaagaaaatgaaggtggaggaaagttggaggtgagtatggtatttgaaggtcccgttaagatcaaacattttatttggtgtctttgtcgtaggtggttgtctatttttgaggtgctacgaaagcgtctgatgagagaggtagtgcggtgttgtacatgtagtttgcaaaaggaagatgaagattggtaccatgctatttggggttatgttcaaatcaaaattctttagaaagtttttggtttggggaaggttgttcgaaggtgtggtggtgaagatcctatagtttttttaagccgcaatgaaaagttggtgccaaaagacaggtttgatttctttattttcttaacttgacaagtttgttatatgtgaaattatgtcttacataattcttttgagccttctatggatcaggctttggattgggtagttgattatttgcatgagttttgggataggaaacatggtggacacttttacgaggctaggttgaaatgtaaatggcagcctcctatggtgggtgagttgataattaatattgatactgcgattgatgaggctattgggtgttgtagtacatgtggggtggttcagaatcatttgggaaaggttattgcgacacaaggtattttttgaataggtatttttctcctattgttgctgagttgttagttataaaacatgggattgagttgattggtatattatctttagagtattgtatgattttttatgactgtagtttggcggtggccatgttggggaggtcgcttgtgctgtgtggggaatgggatctactggttgtggatatatgtcgactgattatggagactggtatttagggctatttggaccacatctcatatttttaggcctatatacctagattcaatccaattatatattatataagattttaccatccgatctaatccaattaatttcagtcatccaattgatttaacatccaattgatgttggattggctgggttttatccattatgtattttatgtatatttattggtttaatttaggtttatccaatattttaaacctagtatttattggatcagatcgaatccatccaatattttagatcaagtatctattggattgaattggatccatccgatccaaaaaaaaaaatttattttaattttaattttaattttcatatatacatatacattttttacatataacaacataaaatctaactactcattcaaactaaataaaaattaattagtttgattggatgttggatgtattggttctttagacacctcgtttaatatccgacctaatccaattagatattcaaaaataatatcaaatctaattcaagcacaattggatcatatccattatttggcggtcgattataattttatcggtcagttgtcattagattggatcaatttatgcacacccttactagtattgtgggtgtgtctttccaaccacgttccgcgagtaacactacaacatttatcattaaaaacggtgaaggagtttgccgctaataaaggaaaattttgttgctattggccattagcggcgagaatccgctgctaataattagacactattgatggttattaacggcaaattttgagtctgtcgctaataaccaccaatagcgacgggtaatagtggtagatgcccactgctagc

SEQ ID NO: 295159 - DNA, 2067 bp, Cannabis indica
tgaaccatgcaacattaaatattatttctgatctatattaatcagtaaatctgattatattgaaatgagttttatttagggcataaaacccaacattgagaaggatttcctttctccctttcgagaagaatgtggagttctttttggtcagatgagcccaacatgatcaaaaaggtaattgaaggcttcctttttagatcttccaaaagattgaggaagccccaggtacttctctatctcagcacaaatggggacattaagaatattggtattggacgtcttgatagtctcgtcagtgttaggagagaagtaaagtaaggatttggaaaagttgtccagatgtcagactataatcatgaagtagatcctttatggttttggtcgcaataggagatgcaacactgaaaagaagactgtcgtcagaaaagaagagatgagagatatgaggagcattacgagtgatcttgaagccaagtgcatgcttttggggaatttgtctattggttgcttcaataatgagtgaggataagccctcagagtagagaagaaatagatatggtgatatagggttgccctaacgaatatcatgggtggggagtagatgcccgtggacttggttgttggcagagaaagagaatgaggttgaggatacacaagacatgataggcttaatgaaatgctcagaaaaagcaaacttttccatcactttgcagagaaaaggccattcaatgcgatcaaaagatttttccatatcaagtttaagagccatccagccaaccttaccaaatgattgactaactagtgagtgagttacctcctgaccaataatgatgttattagaaattagtcggtcaagtaagaaaacactctgggagggagaaatgatcttggaaaagatagggttgagctgattcacaagagttcaagaaatgattttatacaaggtggtacagaggcttattggatcataatctaggagagtttcaggatgagacttcttcggaatgagcacaataatggtgttgttgatcaaagcaatgtttgttgtgtcgttcaggaaactaagagtagtgctagttatgtcttccccaacaatgtgtcaattagatttataaaaagaaccattaaagccatcaatacccggagccttatcattggcaaattgaaatgtagcttgcttaactttgtcaaccgtgtaggggcattcaaaagattataatcatcctgggtgatggtcagagtgattctgaagacaactttgtccataagagacggatctggaagttggctagtaaaaagctgagagaagtactcttcaacaatgtccacagtggcttgattagtggaggcaataaagccgtcaggatggacaagtgagaaaatcttattcatcgagcattgagaagaagccacatgatgaaagtagagccacatgtgggattgctgttgctagtagagatcttccttgtatataaggcggtcaagagaactttgcaattgacgacaagagctgaggcattgatcattgggcttggagttgctttgagttagacgcagttgagtttgggtctcacggatttgtcaagtaattggcgggcctaaggttttcttcagaaattgaagattgagttcacacttagagagcttgtgagagatattggcaatcacattagtgtactattcagtgggaacagagcaccaggcagtacgaatacaatcttcaaagctagcttcactaatccaagttttgtcaaactagaatcgagagggccgacaactgttattagctcggtgcccgccaggagaaaggattagtgcacgatgattagaaccaaaggaatctccatgttggagatgagcctaagcgaacaatgtgtcccaagcgaagtttgagatgctctaatctaaatgctactgagtgtgagtacgctgggaatgcttgttggtccaagtgtagggacttccatgtccaaaaataggatgaagaatgaaagagtccaagaaagtgttgggttttatgctctaaataaaactctttataatttgattagttatcaatataagaaa

SEQ ID NO: 295160 - DNA, 1858 bp, Cannabis indica
agatgctttagggaggttatttctaatcgaatggtgttcttgtcaaggtttagggagataaataaggcacacataattcgtcctatttcatcataatagctttttgtcaatagttgcagttgcagactagattaattattcttgtcatacttatgatcaagtctgtataactttttatttttatttgcaacctcaagtgaagtttctgataacatgcccctcagggatcttggcttcttctaccggtatgacaatgcaaccagatgcaagaggttgctggagaaagaggaggctatcttcatggacgaggcggtatctctctttacttgtatttcttgtctatttcgtgattggaatgtgaaatttatgtttgttcttagtttacatcttttaacatggttgagagtgagcagccttggacagtgatgaccttctatatctcaaggagcaaatggaagctgaggaggacgccgagcgtctccttcgccgtactgagaagcgggcatttgctgcctttaagatatcctttctcattgttttagcaaattctgattttcaactgcttaagttactctcataaattgctaggaatcactctttgttggatgagtatgaaacttgtttaaagcttctgttcaaattttcgaaaatacttttgatcaatttcgaagtatgatagctcattaatgcttttatctttttgaaaatttttcatatttatcaattgataagtatggttttttcttttaattttttaaatgcatttgtgagaaatactatactgattttgaacttaaattctcctcctaaacaatcactagttgaagatatgagaaaatacagttcatctttttcacttgttctaccttgaaacgagaatcgaactgttgttgtcatttttctttctcctatttctcctttagatgaaacttgtttgtgattagacattttttgtggtacaaatttccttaaccaattggcacaaagctgcaagtttagtggattcttcacctgcaaatgttcccttgccacttcgcgttgagccgaagccaaagagcggaatcaggtatgttcgtgctcgacattttaaccgacttagtgaacaaattgaatattttcaagctataccttaattttctttattatgttatatattttacctacttggaaattcagacagcaagatttactaaggaaggtagtggaaattaaaccgaaacgtcatagagtctcgagcccacctgatgggaatcagtctactcggggttcagtgaatctcaactcagaatctaaaaatgagaatgaaaagaagtacccattgtcgaaatcagaaggcgagagtcgagtaaataatcctgttaaaggtttgttaggcttagcttatgaaagttcagacgatgaagattgaataacaaacgggcaagagtgagttaacaagattacaatttgagttgaagaaagctctattttctgtattcggaagcggttagagttattagtatcttctttttgcgcattcgggacttgtggcgcaatggaaacaaccgaggatcttgatcgtaaacctcgtaattttcgaatgaaggaaagtccatttttgtaaacattcccaacttagtaaaaacattcttagtgtttttctagtacttgttaaagtgatctatcacaaataaattaaactatgttgaactatgtttgacatgaatctttactgtgtttatattgtgaaagtatgtacatttataacaacttaagatcttcattgctaaatagtgatattatttttatttaggaaattatcccatatactatttttttattttttatttttcaaatttacggtttgaatttttaaagt

SEQ ID NO: 295161 - DNA, 6441 bp, Cannabis indica
tacatcaaagtaaattttttagagattatgcctcaatttaatatcatcaacacgtgacattttggagcaactaccaaattttttaaaatgagcaccaataaacttacaaaaatttcaaactaaacttatctactatttttaaagttgagaacttatctacatcaaaataaacttattaaaaaaatttactctaattttccctatataaaatacataaacgtttggatttatgtttgaacaagattgtagtttacaaaggggacaacaattattaaaaaatgaataaatatgtgatcctccaatttttttcttataaataataaaataatttttgctccaacacaaaaaaaaactaaaagaaaaaaaaaatacactcttcgaatatagagaagagaccaagccaacagccaaagccaaaggcagtgaataagaatcaacaatggctctcttattcacttctgctcactcttccctcttctccacaaaccctaacaagccattctcattacgctccttactctctccactcccaccatcatcttcttcttctctttccctccaaaaccctattggaacccgagtcgatagattccgctccctccgcttacattcatctctctccgaccaaaattccgatcctattcctgggaaacccccctccgaatccggcgacgagctcgccaaggtcaccgacgagtggggcgtggaggccgggcccgaggagcttaattcatccacgaagcttgctaactcagaccctcccaaggatgaggacgaatggggaggaccagatcgttttgtgggtgtcgataatggtagcccagctagtgttggggcggaaacggaggatttggggaatgataagcttgcggagctcaaaaggtgcttggtggacagtgtatatggcactgagctggggtttcgagctagcttggaggagagagcggagattttggagttggtgaatcaattggaagctttaaatcccacgccggcaccgacttcggcgcctgagcttcttgatggaaattggattttgctgtgagtatttacgtttgtgtctgattgagaaaaaagcatacttcattcatagtatgcttgtgttgatactattagttacgtagttttgataagttgtttcactgtttgaagttgattaagtttaagattatgggtccaataataggtagatgatattacttaaggacctaaggttataataaatcatcttcttatttattacaatgttatacacggtccttttggaatggagcatggagtaaaagagtaatgggaagatagaaagtttggtgggaggtgtggaaaaagggttgtggatcttctgtttgtatttgaagatatttgggcttgcactaataaacatccacctcatataacgatgttgaggaaactaacagtatattcatgggtgaagatgaaattctagtgccaacagtaggcctatcttttatttcaccattggtacaccaggttaattgtttttttttttaatttaaattgagccgatttatgctgtttgtcaaatttacaaaaaagtcagaacagaacttagccttcatattgattagaagtatgcttaaggggtttttgaggtcgtcaaattatttcatggccggggcgataaatgttttagtgacttgtttaaagttggtaaagtagtttttttttaattttgtttcattgtgaattaagagttaatcaacctccgttacttccctggttcctgttgatttgttcaaattccttgtgacttcaaacttatcaggtacactggattttcagaacttttgccacttttggcagcaggatcgacaccattgttaaaggtagatcagataagccaatcaattgacaccaggagtctcactattgcgaactcaaccacattgtccaacccgttttcgactttctctttcagtgcatctgctacttttgaagttcgtagcccctcaagaatacaggtacttctatctcacaagtctagcatctaacaaatgttcctctgtagaaggaacattttactattatttaacaattagcaaaatgatttagtccagaaattccaagaaatctataccttgattattcagaacttccaaaaattcttctacacttgctgacatactaacggaattattcttgcaaatatataatgttcaggttcggtttaaggaaggcacctttcaacctccagatataaagtcaagggttgatctcccaggagaattgaatgtctttgggcagaaaatcaacctctcttctttgcaacaaacactgaatcccgttcaggaggttgtggcaaatatctcccggacaatttctggtcaaccacctcttaaacttcccattcctggtgacaggaacagttcctggcttctcataacatacctcgattcagattttcgaatctcaaggggagatggtggtctgtttgttcttgccaaggaagggagtactcttctaaatcagtagccatgtacattgtgctgggcgggttatctacaagagtacactcgatgatctattctctctttccttttttatatattttttaaagttctccgtagaaggaaaaagagcatatgcttgtcatcttgtatatcagtatatgtgcactaattttttttttttttcttattgttaagagataaatgctactacaagttgggagtaaattaaaacaaatattaaagaaatgattctatagaaaaataaaaaaattatttactttctgaaatcgtgtgtagagcgtctcttgctgagttggttataagcattggaagggaaacaagattttacagcagaacacagtttgtttttcgataatgagcagaattttattctcttgattgttttgttgataaagggagggctatctagatacaagagagaaccagaatggtcacgtataatataagctattactaattagtgtagggggaagcatagttggttaaacattagcagaagtaccggaaatgaattaaagagggtgggggtggtgcgaaataagtattaagaaggtgacaataaagcacctggaccggatagaatgttggttcttttcttttagtattattgggatttggtgggaaatgatttttgtgaggcagtcttagattttttttactattggtactatgcacaagggagtgaatgttactaacttagtgcttattctgaagatccaagccctaaaagggctcaacactatagactgacttctctttgcaatgtgtcgcataaaggtgatctcaaaaataattaccaataggagctttttctatcaagacttatctgtcttatccagtctgcttttgtgctagtcaggaatatctaggacaataacattatcattcaagagattatttattcattcaataggaagaagggtaaagaatgattttttgctatcaaaatcaatctgacgaaagcttatgataaaattagatggtagttcattgatcatgtgctatcctgctatggtgcgccggacatgtttagaaaatgaatttcataatgtatctctacttcttctctgaatgtttgccttaatggaggtcaggttggcaagattactctgtcgtgtggtctgccccaaggggatcttctctccctttatctctttatttgggcagttgagattctgtcatgacttttggaagaggccaaaggtaaaggtaatatcataggcatttgtctttcccgtggaggcactaccctatctcacattttttttttttttgcggatgatttaattttggtggggagagcctctttgggagaggccaaaggatttcggcactgccttgagaaattttatgattggtctgaacaacaggttaataagctcacaacgtcaattttcttcagcaacaatactctagaagaattgaagaagggaattagagatgtgttgtggattgaggccggaaggtaatataaaatacatggggctacctcttttcgttcaagcaaaaagatgcagatttcaactttattctcgataacctcacctcaaaattgcaagggtgaaaagcgaaagtgccattgaaagcagtgagagctactttgatcaaatcagtggggcttccaatgcctatgtacgcatgcaaactactaagctctctaaccgtcttgtctctaaaattgatagcatggtcaaggatttctcgtgggattttgagaaagggaaccatggaatccacttaaaggcctgtgataagctttgcctccccaatttgggggcggggcttgggtttcagaaaacgaaagaaatgaatcaggccttcttggcaaaatggggatggaacttgttaaataacagtcaatctctttgctaaatggggatggaacttgttaaataacagtcaatctctttgctataagattttgaaagccaagtatttgaaagggaaggatcttcttaactgcaagtacaaagactcaaactcctgattctggaaaaatatggtaaaagcaaatgatatcttaagaggagcgtgtaaactggtaactaatgacagggatacaaaaaattgggaagattcgtgggtggctcatggtaaatgtttctacccttcatctaacggacgtcctacaaatggcttaaactaggtggttgacctattaactgtcaatgtaaagtgggacattcaaaaattgatgagtattttcgatgatgacaccatttctcctattttgaaagggggtaacccgtctggtcaaggaaagaataaatggatctggaccaaagagtgtaatgggcagtttcgtgcaaatcaatctatcttagtcaagccgtcaaaagagcccttctctgcgaggtggcctcttcactttggaacaagctctggaacagtaaagtcttgaagagacataaggtgctttggtggagtattctctctaatgttctgcctttgcgagccatcctcaataagagattccaggtggatgatgtctattgcccaatttacgggatggaggaggaatcaatggagcatttgttccttaagtgtaactttgttttctacttttggagatcttcttcgtggggtatttatccagtgttggactctgatattcgtgtgtgggattgggtcaagttcatccggggtttaaaaaatagggcattaatgcggatgaagtctttaactatgcttctattgtgatggatactatttggggcgtcaatgaaaaggtgaacaataatttgttaaataatgtgaaccaatgtattgagtatatccacttttctttcgcaaatttgcaaggtactctccttcccgttgtttcctcgatctagagagaggattgacaacctcctcctcaggattggctaaaacttaattgtgatgttaaagtggaattagaaagttcctgcattacagtggttgctagaaactattttggtaaggtggtttggaccaatacgactagaatggattttgtggatgcttgctatggctcaaggggcacaagtccatcatcgtggtgatcaatgctctcaatcatttttcttcgtgttgggagattgagaactattcttctttttatttgaaactctctagatgttttgatggctgcgtttttacttgtatacctagaatttgtaattttaccgttcataatgtgcctaagtacccacaaatagtatggtagcttgaatgtttcttctattctgcaaaacttattttctaatgaccataagatctaatattaatcgatgaacgctcatttttttaaaaaaatgtgacaaacttatatcatattataaaattataatatatatatctaagaaatttctcatgtggaaatggaaaagacttcatagttataggactctttcttaccaaatgaatgattcccacatcattaagggtatccgaaatggtattttgcaactcagttcttcttgtaactttgcatttttaaatagtgtaattactaattggtaggctatttacacaatgacatctaaaggctggcctccacatccaaaggctggcctccccttggtaaagctgacaggaacatgacctgctagatcctgacaggaacaagacctgtaaaatcttggcaggagcatggtcggccagacctcattttgcaggtgtatggctgaccagcttctccctggccggacaatgatgcatagccttcatccgtggacaacaagccaagctccgagttgggccttgatagcccactaagatgctacgaaaatatctactttcaaagggcaatttggtcatttatatttattaatttaatatgtaaatatttattattttatatgctactagggttaatgctctcctatataaaaagtcttaattcaaccttaaaaagcctaagtcactctaagtctcatttaggccatattactctaagtctgaaaccttaatatcttctctctct

SEQ ID NO: 295162 - DNA, 7259 bp, Cannabis indica
ttttgttatgtgacatatttgcatcacaatttgacacactattagaatagaattttaacaaaatgagatatattttctatttgcatctctattgaaaatgctctaattctttttaaatatcattataattttattttattttttaacattacatatgctaggatgtaatattttatattttaattaaattataagtatatttttcaaagttttcattaaaaaaaaaaaactcttagcgccttaggggttcttttctttgaggttattgttatcccaaaaattgttcaaataacatgacatgagttttctcaacacgtggccctagacaacatctgtgcggcatgaaagcacaagaggattggtgaatatattctttggattcgtttattatctactcgacataaaacaagctacgcgatagccgaccaaaaaacttagtcatttccgctactgaagagaaggattagaatatacagtcgagttaccagcttggctatggtgcacaaagataggatcatttccatataacatcgccattacaatggctaaaaaagaatatcagttcgattatgcttcatgggccgaacaaaacaagtaaaaataggaaaccgcttaaggtgagaatgacaaaatatattctcgctttggggatataagaacgggaataaggcatatggaagaattagaagaagttaggatagatcctaccatgccagccaaaattatcaaaatatattgaaaaatgctctaattctttttaaatatcattataattttaaaggaaaacctcaatgtatttttcctgatctcatgatgacatggtgggaatttatctatcaataatatgccacgccctaaatattgatacccaaaatttttaacatgtgcagcagaaaagaaagttgcttgacaaggaaagagcacaggccttgaaggaggaggtggaaaagttttgaatcaacaagttcatcatcaaagcattctatgccatttgggtttcaaatcatgtattagttcacatgtcgaatgtgaagtggaggatatgtattgatttttccgacctcaataaaacatgtccaaatgattgcttaccactttcttggatcgatcaattggtggatgcaagagccaaccatgaaattccaagcttcatagatgcttacttaggttataatcaaatcaagatgtatccacccgaccaggagcatactagtttttgaacaaatgttgggctatattattataaggtattgtcgtttgggtaataaaatgttgaactaatataccagtaccaggttaacagaatgttcaaagacaaaattgaccacaacgtagaggtttacgtagatgacatgttggtaaagtccaaaaggcctgagggcatatagaggatctaggcaaatgttttgagattttgagaaaattgtaaatgaaattaaaccctctcacatgttattttggtgttggatcgagaatttttttttagttttatagtaaatacccacagaatagaggctagcatgagaagattcaagccattatggtcatgaagtcacctacaaaaatcaaagaagtataaagtttgattaattgaattgctgccttaagaagatatgtctctaagccaatagataagtgtgctcccttcttcaacatcctccgaggaaacaagaagtttgaacggaccgtggaatgcgagtaggctttccaagagttaaagaaataacttgcacaaccgtcaattctttcgaaaccaccagatgatgaggaactgggaatttacttagcaataaccaaacatgcagttagtgtcattctaattaaagaagatgagggcatccaacatcctatatactatgtcagcaaaagattgatagatgcagaaagtagatacccccaattgaaaagctaacttactatttgtttctgtcctcgagaaaacttaaaccatactttcaagcgcaccttatcaaagtctacaccgaccatccactcaggcaagtgctccaaaagctggacgtatttggtcggttgctaaagtgggcaatagaactgagccagtatgagattacttaccagcccaaatgatagtaaaaggacaagctcaagctgattttgtggtcgagtgcacaaacatttgtgagattgaaggttatgactaccagtgtaatgccctaatccgtagggatgccacgtgtgtgcttttataaaatagtttataataatgaactaacgaattgacgaaaattgtgatttgattaaaaacttgatcattaactgggacataaaattggtttggcaataattagggttggggatccccttttaaaagatttacaaagattctgttaaaattttacagcaaaatactgtacttttcagagttgccataaaacaaaatcctgattactcggctccaccagctgaataagctaatgtttacatttgtcggggaagacctctaactcatggatgacctagctcagtctttcctttacttgcaccacaaagtactcatgagtcacaaagactcaacaagaaaagtagaagcataaacaataaatatcaacatgcagacatattcacatatattgatccaattataaccaagtaaccatatattcaattcgtaatcaagaaattacactatctaatgaaatcaatcattacaacaaatgcttgtctaataagataaattaaagttgttacttaataaagtaatcattactcgttgttgtctaatgagacaaccttaatactgttgcctaacgagacaactcaatgtctctatcgttgcctaatgagacaacagataagtaagaaacctaacaacaatttcaaattggagtaatgactatttcttatattgttgcctaatgagacaaccaatagagtaataacccattctcataggcgtaattaacgaatcatatatcaacataatatgtggtacaattgtacttttcttacctcaagtctaaattcaagcatgtcagtcaacttgagtgggaaacgcttaacgatctcgggcccccaatccttgagcagctcctaaggttgattacttgaagagaaattggatagaaatttttagttttccctagtttggtttgagccgaagaagaagaagcaaagggaagagaggagatgatgttggtgtgttttagtttctatagcaaactatttctaaccttttctaaaaataataaataaaacaagatacatacaacttaaacaatatcaaaacttatttaataaaacttttggcaattaccaatttgcctttctcacactaaaattttaaaggtaaattagtcattaataaataactcgcctcatgtcataatttctaaccaaaacatatatccttttggtatcaataaaatactcactaatatcgttgtgatatttttggccaatgaatcagttctctactattgtcggacctgaaaatattttattttacaaatatcctttattttacctacattgtctaataaaatttctgtaattaataaattatgcttatttatttatttctattaaaatctttaattattacataattaacttagtaagattataatcttacctatctatgcactaaatatacatattatttcatatttaaaaaaatatgtcttattaaatataattacattttcgggatattaaaaccagacataaattaatgaaaatggtatcaggacagagaagaagtaagagcaagagcagaagcaaaaactagaaaagaagtgcaatcctaaaaattaaatataaaatatagttagagactgcttaatatagtttaatagataaataaaattatttatgtatgttaattaattaagtaagagattatttaattatttatgtatgtgccaaggtatcatattattatgtgatatatttagttaatactgataattacggaatagttcaagcaatatagtagaaaagtcactgcggataaaatactgaagtatggtatttagaattattttggtgtatatgagtgagaattatttaattgggttaccatttaataattgattaagtggaatttaacattttaatcaaatagatggaatttgtttttaattaaccttaaactctttttggcttgagatggtgatgacacctaggcttttgctaactttaccccaacatcgagtcaaccgcaaaactaacctttcattttgatgataaccttaataactactctaaaaatactttcaaaatttcacatatcatatgtccaatcttagattccattgtatctcctttgtagcatccagcactaactacttaaccaatacgtttatcttgtaataaatttctcgccttaagtgtgaataacactagattttggaatccgtgtaccttccccaaaaacacaaccgaagttttaccctccgatacaacatcactatttcctcttgcagtcactagtagtgttatacttatctaaccaatcaattctcaatatcacaccaaattataacgtgttgcctaataagacaatctaaactatgttcacctaaataagggaactaataatcactgttacttaattaagtaaaccgttatctcctataagacaactatatttaccctacaacgagtttatagagtaatgactctatcatttatatggtaataaccatacccaatatactcataaaaggaaatcaatcccacatggtgaaaacaaccagtcctctaatagataacaacgtaccatattcgcttataacgacatgtcacctgatctactatttcgtcataacataggtccaaactcaactttcctcaaggaatgctctcatgcagtttggatatctcgaataaatttgtcgtttctcattcatgcctcgataataaacttgaccaacttgctaaaactcatatctaaagtttgcttaaattccctcttttaatcattaagctccaaccctaaccaatactaattagtaacttttgggaattttctctaatgttattctatgttcatagttgatcctctgccccctatacatggagtgtcatctcaaccacttgaacacatgaccgtctaactcctagataattagttgttacaatcacatctcaaacttcgtgctcctctagacctccaatgtaccttgccttccttgaggctcattgttatttcatcaaagataaactaactcaagcagcatgcttgcttttcgacaggttaccttagccaaccgtacaaactcatccacttctgcgacgcggtaggttcattataatacctcccgtaaacatcaatcaagtcatatctcaggttatggtgtccaaatcataactctaagattcaaactctcaccataatcatgtgtctccctcttaagtagaccttaaccaccctcaaaataggagggttctgcttccaaaactactcatatgatggcttcaaaatgtcttccacactttgcagcacaaccaaagaatgtcggtggatttgattcataaccaagtcaagcctattgcttcctcgattcccttgttcgcttatcatactactaggtaaatctttcatatgataatgtctattgcttcccaatgcggaggtaatccgaggttgccatcatcccactcatttccaagctcttgaacctcccagctaaaccacttaagtcaccttggatgcattattagaaactccatcgagcaccaactaaaagaaaataaacttcccgaactaacataaatgctaataagcatttcctttatatttattctaccaataaacatatattttccaacatactcactattagcatataatcatggcattttacaaatataacttaactcatgctttttaaataatcacatatagcaagtaaacagatatcacttactataccatgagtcgagtttatcttcacaataaatgtacttatccagccagtctccaagacctttacaattgtggttgctttgatatcatattatagcgtcataacccgtagggacgccacatgtgtgcttttataaaataattctataataataaactaatagtttaataaaaattgtgatttaacccgtagggacgccaccataattattaattttagcactatacaataattagggttaggaatcccctttaaaaaagtttacaacaattctgttaaaattttacttcaaaatattgtactttttaaagtttccataaactaaaatcctgaatactcggctccgctggccaaataagctaatatgtacatttaccaggaaagacctctaactcatggttgacctagctcagtccttcccttacctgcatcacaaagcacatgtgagttacaaagattcaacaagaaaagcaggagcataaacaatgaatatcgactagtagacatatttacatatacttatctaattataaccaagtaatcatatattcaattcataatcaagaaatcacactatctaatgaaatcaatctttacaagaaatatttgtctaataagacaaaaaaaggttgttacttaataaagtaaccattactcattgttttcgaatgagacaatcttaatatcgttgcctaataagataatccaatgtcactatcgttgcctaataagacaactgataagtaagaaatataataacagtgtcagattagagtaatgactctttcttatattgttgcctaatgagacaatcaatagagtaataactctttctcatagacggtaattaccgaatcatatatcgagatgctatgtggtacaattgtacttttcttactttaagtctaaattcaagcgtgctggtcaacttgagtagaaaacgctcaacgatcctggacccctaatccttgagcagctcctatgattgattatatgaagagaaattggatagaaagaggatagaaatttatatttttttccctagtttagtttgagccgaagaagaataagcaaagaaaatagaggagatgatattggtgtgttttagtttctacaacaaattatttataaccttatataaaaataataatataactaactaataactaaaaaaagataaatacagcttaaacaataacaaaacatatttaataaaacttttgacaattaccaatttgcccttctcacactaaagtcctgaactaaaactttaggagtagcgtgttatgaggcatggcaacaaaattcgtaaagtgttatgaggcatcaaatcagggaatatggctgagaaactttgtcactaggctg

SEQ ID NO: 295163 - DNA, 2606 bp, Cannabis indica
ttctttctttctttcttctgtgttctatttaaacgacaagccgattgtgggtctccacactccacactccacagctaattcttttctcctaatggggtatttctaaatttttaatattcttctcttgtttttgtttatcaatagtagttttattatttgttttgtgaaactatccttctgtttactctttctgaaaaaaaaaaactttcttgtttggataatgattctgtttccctttttaaggtcttatgcaagagttaatttgtactactgacaattcaattctatattattattattatttttttaatttttttattctgaagatcatgaatcttttatattatgtgtgcatggtttgatgttattatattgatttatttattctgtttaattaattattacttttagttgaaaaagtcttgtgtgttaaattcttggcataaaagaaagctttttaagtgtacttaaagtgtaattgacttgacttttatatataaataaatgcatatccttttaatttcaacatgtgattttcatgttctttcaagacttataggatcatcaagtagacaagacaatagcgtttatatgtttcataaagctaatgttagatacttgatctaagtgaaaatttctgaacatctagttactatactttccataagggacaaggaaaaatacacagtaggctcaaacattgggaatatatactctttgtaatcagtactattttgatcatttaagctacgattgaaaaagagctgactgaactcagtatacagatatattaagaaaaaaaaactcagtgcagatgaatgtgtgataggaaaagtttaaggaaagagtgtgggttggggtctggaactaggcaggattatgaactttttataatgaatgctgttaagattattggcttctctcttttagttatgttatcaattcaatttcagttaattaagctgctcgtttagtgtagtttcacttaaaggaagggtagcttcaatggttaggcatgtggttcaagtcttttctgaggacttgttatagtttaggtttgaggtttgagtcccttttcagtacttgtatagtaattgctatagttccttggtccccaaatatcatggggtttgaggtttgagtcccttttcagtacttatatagtaattgctataggcattaggattcgtaatttcgaaattacttgttaccggaggctgacagaattaagtgttataggtcatgaggtcttacttgtgctacacttttaactgtaactaagacatctcactttaaatgaattgcaatgaaatctctaaatcatcttgtcaccacagtgattgttgatccactttgtttgtactcattcatacttgatattttgtcaacatgaaatgacatgctaatctggtaattttggccatagcaggattgctcatttaagagtttattgaacgaaaaatgaatgtagacaatgagaacatagaacctgtgactgaattaggacttggtctgggttattccaatcagtgcatacagggaatattgaacaatgattcaggtgcaggtgcaaatgcaggttcaggattaaacgtaacatttgtggccaacaacccattgtctgagctagtttggtctccacgcaaaggttcgactctaaaatctgctgattccacctttgcacaaacaaaatgctcacttttctgggttgcaggtccaagtaatgtggctcttttaccaccgagcatcataggcgggaatgctactactactacacagaaaagtttacacagagagaacttccctatattgaatacattacttcaaatgaagagtggaggttccagtgaatatactcggacaaaatctcctgtaagcgatggaggtgtcatgcccgtatatgagccaagtgaccagtataagataggtgagaatagttgttgaggtacattgacttgaagtatagattggtgaatgtttacaagatcacttctttgtgttgtgtgctatctttttgagttaatgtttaagttactgttcaagtatcttgtgttctgaagaacttatttgtggctggaatgcagagagaatgaagacagctagagtgaatgatcaaatagaggagcgtaaagagaataaaggggacgacatttccagtcacgtcgaatcccaaatagcaaaaaattactgagattagagatagctattttgcaaactctccaggtgaatgttacaatttatatggatctagaaaagtcatgcagttttcattggattgaggtgcagtgtttatgtttgtctcattaccatagtgcgtattttctatatccaatgaagactactaagccatatgtaattttaaagcctcgatctgtatattttttttcttacaacatgaggtttacatggtgatttaattttgtttccagatcaggctagcataaaaattactgaagttttgtcagtaaaaggagatcagcctaaacctgatgaggcacaaatcgaagcatcatcaggcaaaaacattgacagcaattgcatgatgcaaatagcacactgtgtgaataagactaaggctgttggtgatcaggttttccaaggcagta

SEQ ID NO: 295164 - DNA, 6063 bp, Cannabis indica
tttttttttgtttttttgtttaagtctcagttaggtgtttaacctataaatacggtttatactcacgttcaaaagaagaatgtttggtaaactatgaagattttgtttctcttctttcgagcatctggttcaccgtttatttcactgtaatatatttagttatttatactcataatctcttaaccagcctctttaatttgtatttggtttggtttatttactgtttgtgtttacttttattctctctaatttatgtagcattttattataatacgaactatattcaagtggcgaaaaattgggcaccacctgttctcattatagatataccaggaaggatttctttcaagagttgagtaaccttcctcccttggttttcccatcctaatggggaatttattgagtttgactgcttcaaaatccaggatgaaggagtatcacgaggtgtctgaatatgaaacctgcaagaggcaaagaatgtgcccaagtgttgctgaggagaacccaagactgattcctagtcttcctgatgagctgtctatccagattatcgctaggcttcctagaatttactactttaatgtgagaatggtgtcacgaaagtggaaggctactgttatgagccctgaactttttaagttgagaaaggaacttggcaccactgaagaatggctgtatctattgactaaagcggaggacgagaggtttttatggcatgctttggaccccttatcggaaagatggctgaggctaccttccatgcctgatgttgtttatgaagaaggacaaaataaaggtggtttttccatgtattggatgtggaacatgttggggcctagcatcaaaattgctgactctattagagactggcttgggcgtaggaacactttagatcaaatgccattttgtggttgtgctgttaacgccgtggatggatgcctttacgtcgtaggtgggttttctagatctgcagccatgaaatgtgtctggaaattcgacccagtgcaaaatgcatggactgaagtaactgctatggccgcaggcagggcctattgtaagacaggaattttgaatggcaaactctatgttgttgggggggttagtcaaggccgaggtggattgagtccccttcaatctgccgaagtatttgacccctccacaggtacatggtccgaagtgccaagcatgcccttctcgaaagctcaagtgttacccactgcctttttggctgacatgctaaagcctattgcaactgggttgacttcatacatgggaaagttatgtgtgcctcaaagtctgtattcatggcccttctttgttgatgttgggggagaagtttatgaccctgatacaaattcatggaatgaaatgccagctggcatgggagaaggctggcctgcacgtcaagcaggaacaaagttgagtgttgtggtagatggtgaattatacgcttttgatccttctagttccttggacagtggtaagattaaggtgtatgaccatggggaagatgtttgaaggttgtataggaaaagtccccatctatgattttgcaggttctgaatctccatatttgcttgctggatttcacggaaagcttcatgtcatcaccaaagatgccaatcataggattgcaattttgcgtgctgatctacagcacgatagccctgattccattccgtcgagctcagcttctctcacatctgaatcctctgactcacaggcagattcagatgcagttatctggaaggtcatcgcgaggaaggacttcggtcccaaggaattagtcagttgccaagttcttgacgtttgagcacaagagtcacacaatcaagtgtccgtacaatgacacgagtttcgtttcatttactttttctatgagagcaattatgttatttccttttaaaatgaggtatattgtatagagtagtgtagtatataataaatgtatacgtgtaaactgtttgtgagaagttctcttattttattacaaactgaactagtgtcaattgccagaagctgatgtgtgattgattatctgttattgggtgatcgccttgaaagtttaaacaaccacaactgaactgacattgatattactcttggatatgggatgtttctgatacaaacaaccacaactgagacattcaatactatacgtaccgtaaccatgtttgtcatttcttaatatattcacaataatgattcagtcatggacttggagtagtaacttagattcttatctcgtggagccaactttgaaatatttggctaagacatcaatcgtagtaatgtttttgatatcgtattattattagtgtaattaaatattggatttattatcatatcgctattagtacaattaagtatcggatcacatgttaatttaagatgataatttttgagaaatattacaaacttaataacaatatacttataaaaacatacatagtgaactgaacatgcaaaaaccatctcaattagattggtttacaatagttaagtattggatttagtatcatatcgctattagtacaattaagtatcggatcacatgttaatttaagataataatttttgggaaatattacaaacttaataacaatatacttataaaaacatacatagtgaactgaacatgcaaaaaccatctcaattagattggtttacaatagttaactatgattaattgttgtaaattggatacatgtatgtatttttattttaatactaattagttaatggaaattttacacaatattatttttgataaaaattttactatttacattttaaatatttttttatatatatttacggtattctataaaaataagaaaaaaaaaatcacataaaaagtaataaaaaaaacaacattgaaataatatacaaataataaaaaaattaataacaaaataacaagagtataacataaaaaataacataagactatattttcaataaataaaactttaaaaactgtaaaaatatttaaaatttcatacaattatatttttgtaatttttttttttttgttatttaatgtatttcagaaataatcccataaagaaatgcttttttttttcctttttcttcagtgtgagctcttgtcgccaacaaagaacaatacgttgatgatatgtattgattaatcttaatcggacctgtatatttaagtgctagaaattttaattttaatttgattcattgtgttcgtatgtcaatttattatgttcacgtgttgattatacttaaaactatatcgattaacataattaatattaaatatttaaattatgtatatttaattgtgtcaatttttctgactaatttaaataataaataaataaataaaattaattaattaaataattaatcgtagattatctatacaataaacaaaattgttaatattaaatgtaagtaagctatatttttatgttcttgtaagtaaattttttctagtttggatttatttttttgataattatatataatatttaactataaatttacaattttaataatatattgaagataaacgagtcaatttatattacatgcgttgactctaacctaaactaaataattattgagtcatttggatttgatctaattttaacttgtttttacttttcatgattttaatacgcaataattcgtatcaaatatatcgtactatcgtgtcgtgacttgaatcgccacttacaagttgtaaaatctttaataatgcaaaagataggtttttttatgatagtgtggtcccaactttggaaaaatggggtgtgacaaaaagatatttaatctaatattttttttttttttagtaataaaatctgataattttatagtgcatatttgtcaaaattatgaatgccctccaatgacacagcaagcaacttctcaataaagcctgctctggcttacattacataggattcttgaagttgactcctagtcatctgatgatgatcaaaactcatccgagtcaaagctaagaatccaagttggcatcaaatttgtattccttactttatttatttctttattagtagtgttaaaatgtttattattgtcaaatcaacactttagagattctttaatcatcacatagatttttggttcaagtcccaagttggatcaatttggtgggttttgctgttagggctgttggccataataaaaagcccttatacatataaatatatttatatatgtatatttgttcagtcttacttcaaccatattgtaattactataatctaaagcaaaagtggggaagagaagatgacaatagaaagtgcccaagttgaggtctcttgttctcacttgtctaatagtaccaaaagtcccttatctcttttgcttttgtgtttgttttttttaatcaaaggtaccggtgggagtgggacttgatttaaaactgtccaattataaattactactgaaaaattggatcccattgtttctctcaaatgagttctcaataataataacaataaaattctctacaatgagtattcaagtactttgcttttttttttcttcttctttttatcttatcatgaatggtttaattgcttaataattgatacaaaaaagaaaaatggtggtgccttaatggtgggcaaagtgaactagctatagtagtagtgatgataattgatatgtctaatataagatcaattcaattactctttttattgttcaactagaatctttcaacaattacaaggaagcacatgcatgcttttctaaccaatctcaattagagaaaagaaaaacaaacaaattctaaaagagagataatgaagtgtaggatatgagatattgacatttaacttccattaagagattcctttctttgccatgttatttacatgtagtggggagtagtgtagcttttgagaaacgacaataataatctctatcaaactttataaataatttctccaatcttatatgacttaaatgatcttttattatttctaacattgtggcaactcaaacaaacaccataccataactaataatgcctggaaaataatttgattcttcttctgttggggcctaagcacatgatgatgagctcataccttctctttttatttgtgtgtgtacatctttttcaaatattaatttgaaattgttacaagtacctgtctctatttgcttgtaataatcagtaatgacatgtttaaaattagcaacttttagaggaggctttacagatatatgtctaatagtattaataatttcttttttctatttataaaataataagtacaaatgttcatctttccagcatgatttagtttcacaacttttctgttaggtggccaacaaaattaaactatcataatctttttgcttctgtgtcttgatattattactttgcctttgcttgcattatttttttattaaataaataaatataattgctataggtatgtatgtgcatatagtgtgcacactgagagctagtttgctgtgacccaacaactaatcaaaatcaaattatatttttatatatactgatattatttcatgatcatgaaattgagctaggtaggtactacttcaattttttctttttttttttcactattttgaagattaaatagttccctacacataatcaagaggctgtattaaatgtatatgccaaattaagctatagaaagttgtagacttagacaataccatataacctgaaatggaatttgtcataataataataataataataacacaaacacatgttgttctcttttgatttgatggaggtacaatactaattacaatatataaaaacatatctccttcaaaaatatgcttcgaaatcatatgaaaaaattatgttataatcatagaattgattcagaaattcttgctccacttgttctattttccaattaatttaatatatagaacaatactgtaatgttccaatgcctttagtatagttgattattgtattaattttttcttaatattttttattttattttgattttttttttaataaacttagaaactttattaactagcaatcgttaataa

SEQ ID NO: 295165 - DNA, 2285 bp, Cannabis indica
aacatacaaaaaaaaaattagaaaatatccttcaccaattttaaaaaagacacctacaaaaaaatatagatattactaatctgcaataacaatactacaataatattatatatgcaaataaatctgtcaaaaaccaacaaatcacaaatctgtcacacacactagtctacgtagccagtctatatattattaagatatagaaaagcaagaaatataattccttctgcatgaataaacgacataactttagtaaaggcaaagaaagcattttataattggacagaatataagaaaccccattccctaagctttaacaagtatctatagtacaacttttatacatatataatccaaaaccgcaagggaagcaaggtagcaagcaaatattcatgcactatataaaggggccctagagttaaaccaaaaacagcaacccaaaaaccacacaaccacattcattaatttctagcttctcatcactctcttttctctatttttaatacattttattcatttatttttcctttttttcaagtgtgtgagtgagctaaatatggataccaagatgtcaggtatcattgctccatctcatactaagcatacagtcacaaatgggctacctaaacaagatcatcatcagccgctgcagcagcagcagccgcaccaccagcagcagctgcagccgcaccaccaccagcagcagcagccggggcaccacagctttggtgctcgagtcctgggagaagctcatcatggtggtgcaggccgagggactcgtttgcttggaaatggccgtggttcccaccaccgagcgcatggggcatccgatgagaccgagttaggtaggaaaattctggccattcatgaaactgatgagcgtgggattcatgtcaagcctgttctcagcatcattgaagtcatattttaccgtgcaacggctgaccttcctggttattcaccggtatatatacatattttcaacatagttaatacttaagtactatatggttatataatatgcatattgagttgttgttttgaacgcataacaggcagctcccttacctcaatcgttggacattgttccacatgatgagaaggccgtgcactccgctgttgcgctccatgacatggtcgaactcccaacccggaccatcagtgccatttcctgcgaggtcaatcattattattccatcaccttatattgtatatatacattatatacaagaaaatattatcaacgcatgagattttcaccttgcataattgtgcccccaatctattaatacttgtaccaagctctggtttacgaattttgataacaaaaatatatagttgtagtagttttaataatttggggtaacataattagtacagatgatatagtaatagagagtaaaaataaatttattctattatttatatgcctaatgtaaacaaagttgacacactcgcaaagtatataaaagagcactcctaataggtatcactgctgtagctgcagcctcagtgacccttttaagaataattagcaatattttataaaaattattatattatgtatagcaatttaggtggtactaagcacaactagtgctttttatgtgtacatatcattactctatttatatatgtggctaaacttggttgttggttgttcttcaaattatgttatttcacagattttcagtaagtgttcagctggggtagacgtgaacacaatagtcatggatatactgcagctaatcaagcactacaattgggattcaaaggtggtgttagtgttggcagcattcgccatcacattcggcgagtttcggctcgttgttcagctttattcgtctaacccactagccaaagccatcgctctactcaagcaactcccagaaatattggagcatgctgctgctctaagaccaaaacttgatgcactctttgctctcatcaatgaaattcttgacgtgaccaagaaaattgttgagttttatgatattcctagaagtgagtacttcactgctgattcccctgaaatttaagctgctgcttctcacatccccacagctgtgtactggaccatccggagcataattgttgcagctactcaaattttggccctcactggcatgggatagagtaagttactaattattttttaaatttaatcaagtgtccctgtactgacaatctattttacttgtctcaggtacttaactgagccatgggagctgtcatctttggctcataagcttaacaacataaaaggacatctgtggatctaattgacg

SEQ ID NO: 295166 - DNA, 8470 bp, Cannabis indica
tattaataagcaaatctgattatatgaaatgagttttatttagggcataaaacccaacaaaatagcccatgaaagactttatagatatggtagatgagatcattaggattcctagcaatctagtgttatcttcagataccattagggtggatccttttctagccatgtcgtttccacatttatgagaatatggtagcttcatttgttggcacaacatgattctttttgctagtgaagaaccttatagctgttcactgaatggttccacccacatgtatattttttagaatatgttgttgtatgctaactatgattctgatttttctataaagagcttgcttgctaatcatatgattgttatgtttacagatactcttgaagcaaagatgtggaagtctttgagtgaaaagatcccaaaagccttgccaagatggaaggatcctaaggaaaagggaagggcaatgctagggttcacaaaacctataaattgaggcctttgtctaccttttccccttcagatgtttcgcaagttcatcctccgacaaaggtgaacaacaatccataggttcgtaagttcccgctggggcaaatagaacttcaaccatgactaaagatatttctagggaactggttatgtttacgagtggcataacccaagttggccatttcaagcaacaaaccctggcaaaggcttcacttctacttattatggatggaactacccaggaaatcccagagaccaccattgcctcgaatgagagcttggattggcatatgtttcccaaaaaaggtgtttccgtgacaccaaagtgcaagactcctccattatctgaaatggacacctagaaggctaagtctgctctaattaggtccctttctcaaggaggggatggtgatcttcggggatctactactccaccaccaccaaatcaatcatcattaatgtcaactcaacaacaataatgacaacagaaataacaaggacatcaacaacaacaccagcaaaaataacaacaacaaggctagtaaaaacttcaacaaccaccacctaaacaacaaagtaaacaacactcgcaattaggagccgttgttccttcgaaggccaaaccatcctcttccaactagggactcagaattgtcacctctttgcctaaggttctacccctgaactgcaattttccactgaagcccactattcttggcgacaacattttgacaaggctaggcaaagccgagaacaatttgaggaaatgccacaaaaaggagaggatagtgctcaaagagagagctgacaacctctcctccgtgaagagggaagaaatatttgagggaattcacaattctgttctattaggaccaatgattgacaaggaggctctgtgcaagcgaatgatgcccaaactcaggagagaagtgcaccttttgctgcagagcttttggataaagtgatggggcagtgcaagtgagatgacttcaaaaagtgggcgatttgcagcagcagtgatgccttcactattgcttaagattcaaaacaataggttttaggggtaagttttgacttttttgtctttacttttattgttgtgtgttgttatcttatgttgttttgttgtaccagatggccttaattgcagagaggaatccaaaggaagtaggggccttgatcatagagttcgaataagctcatgccaaaagtcagtcctagcataccaacaatagggctttacttttttatcttaagaaggctaaatcccaaaccattgttgaagtgaagaaattcaaaaaagaggcagaggttttggtaaatcaagtcaaggccgattgtaaggctgaggatgaattctatcgagtgatagaggagagagataacaaggatgattggttggtgaaccaaggtgacgctctaaggaccacactccaagaggtaaaatctttgaaaaataaggcccatgagaaagcttaggtgattcaaggcttgttgggaaatgtcgaggatctaaagagggagatcaaggacttgaggaaagcgaaagaatctctactggtcaagtacaatcaagaaaatataatcctatagggtgttcgcttaaccattaatgctcgtaaagacaccataaagatgctatagagggaagctactcaccaaccagccaatggtataaaagattttatcgccatagcggctaagaagagagctagtgagactactaagcaatctatctaggatgctgccaacatagaggctaaggctgagaggctctatcttgatgtcttatttaatgattcttcatagtttgtggagaaaatccgaactttctccaagcatcttggatcagataaggcagaatttactcagagggtgcatcccatcgatgataacacttctttagaaatatgaccttcatagtgatggtgatgagtccatcgagggattagctagagacttagaacttgaacattctgttgaagtggtggtttcttcgagaaattccacctaggaccttccaaaggataaacccgaagactctatggctctagctcaagatgcacctcgagctcagacccaagtccaaatccaagagtcatctaataaacccaatgttttgttttatcttgcatctttttttctttttactttaagcctatttgttaaaacactaaattatgccttaactgcgaggttgtatgtaataacatagaaaagtgcttctctttatatttatgtatgttcattttgcttgccatgcctgtgtttgctttttttcctgctattacatattcactaggccattcgataaaatgccatagcattttttgaagattttggttcgaatgtcatgagcttgatgcccttagacttttaaactttgaaatcacttgttgaatcttggaagtttgcaaactgaaaattccttttcttagatgtcaacctgttcaatgccttgtttggtggaacttgtaaacttttgcgaagagggactataagctcgttcccaaatgtccaaaagagttacaaagcttagctcctatctatgtgtttctcgattagctacctccagaagaatgttgtagcgctttttatcttcaggatttagtaagagaaggggcctatatgtgtagtagaatccaagcaaagtttctcacgcgaaaacaagactggacacgtattaacacttaggttgtgcttcctcaatgcaaagtaacaaagcttgcctagcatcagataggtttttcccaaatttatgataagagaattgttgaaaatgcaaaggacttcaggaaaagcttctttttctcactccttataggaagcctatcagtatggtcagcaaactagaacgactgcaataagattcaagcaatgttcctttcttaggaaaaaggctgaaaaacatagtgattgtgcttttgtggaagccaagttgaatatgcaatagacttcaagtaaaggctgaatatatattgaaatttaagaaacatttccactcaaaactaagaatgaaaaccaagttgaatatgcaagagacttcaagcgtgggttgaaaatgtattgaaatttaagtgatatttccattcaatagttttatgaaaatttaaaaatttaaacataagtaaaaaaattaaatacaagtaaagaatgaatacaagcaatgagtgagcagtgtatgtttttgagggcacatatctaggtatactactacccccaagtgagctaggaagtttagatatctctaaattcttgggcacttgtttaaaacatagcatgtacaagaggcaaaaatgtaaggtcttgagtaaatttcttctattttcatttgattatacctaaaggtttacattaagagggagaatttacaaaggattacatataactcaaaggaatgttcagattcggatacccccaacctattggttgtatcaatgtaaacaattttcattctaggcacgacggatctctgatctgtccattctcttaagttaaaatgttttatttcccactttatgttgtatctcatagggcccttcctaattagctacttttggctcttgtgaagttgagaatactctcgtcaagacaagatttccaacgtcaaatgtacaaattttgacttttgaattaaagtgtctggaaattttgacttgtagatctttagttgaccttgcaactattcttagagatcttcatttaaatctaattattcttgtaacagagagtgattttgggttgggtcataagtatctcgttcatgagagggaatcatggtttctactgtaatgactgcttcacacccataagccatcgaatattgcgtgtgccctattgatgttctcattgtggttttgtatgcctagaggactcgtggaagctcctcggccaatgggccttataagcttggagtttcttcttcaacgttgtctttaggatcttgtgcacagcatcaacttgtctattttcccatggtctggccacaactaagaagctcttcacgatttcatgctagacatagaagtcattgaagtgatcactatcaaattgcttcccgttatctgagataatctggtgtggaagtccaaagcaacacacaatatttttgatgacaatgtctagggccttctttgaggtaatcgtgttcatatgctcttcctctacccatgtggtgaagtaatcaacatcaaatatggcatacttgactccttctttccctgtggggagggatcccactagatcgatacccccaaactacaaagggaaaggtagtactcatgactgtgatctcagttggcggtgctcacaaaaccttagcaaatctttggcactaatcacacttccaaacatactctatgcaatccttcttcgtagtgggaaaaaattacccctgacaaagggtctattggaaagacttggttgaaatgtgtgatctccatgaaagcctccatgaacatcgtggatgatagcactgatttttattctgccagtacaccttagatatggcacagacaaccggctgcagtaaagtttcccatcaaatatcatgtatcggggagcttggtactagaccttttgggaaaaaactctgtaagtcagaagctcccccaagtttaggaacttataaatggggcctatccaggaattagaatgattcacaatgacatttacccctgcgctgcaatacttggagtttttaatcggccaataggcagcagtccatattgtatgatcttaaggtctgtggcgagttttgctagcatgttcgtgaatgaatttttgtatctaaaggtttggcagatgttgtagcttttatatctttgcagtagtactcaggacatcatcacataaacaacaattttcttgcacttggtattagatatttggtttaccactagttgggagtcactctacacttcaatttattgggcccttacttcctcagccactcacaatctcgctagcattgctccgtgtttccgcttcattattggagttatgaaatttgaaatggagagcactctagagctgatgtccttatggagagattagtatgattctttctctggctcccttttcattcgatgctccatcaatatagacttcccagactagtgactctaagactagctcatccaagaggtaattcaggcaagaacattccaccataaagttagctagggcttatcctttgattaaaatttatggttggaattggatgtcaaattggctaagttccatagcccacattagcagcctaccggatgactccagtggttgaatcacttggcggagagggtggtttattagtaccttaatggcgtgggcttggaagtaggttctaagcttcctgcaggtgaataatatgcaataggtcaacttttcacttatgaataccttgattctacaccaaatagtcttttatagatgtagtaaactggtagttggacctttcctctcgcactaaatgcagcactaatggcatgatcagacacaaccaaataaagggtacaactcttcaccttccactggcttcaataaaattggagctttggtgaagtgctcctttgatttctataaggcttcttaacattcctccgtctattcaaatttcttgtttcctcgcaacatgttaaagaacgagacaaacttttctatggatttcaaaaggaatttgctaagggctgtaatccttctagtaacactctacacatccttgccatttttgggagatggcatgtcaatgaaggctttgatcttctctgggtttgcttcaattccttagtagttgacgataaagcccaagaacttcctagaggagacacaaaacgcatatttttttggattaagttacattccatacttcttgaggactgagaaggcctcctcgagatctgtactgtgctctttagatgtcataaacttcactagcatgtcatcaacatgaacttctatatttcttcttaattgattcttgaacatcttgttgaccaatcgctaatatattgcttcgtcattatgtaaaccaaatgacatcaccttgttacagtacacccctttatctgtctggaagctagtgtgttcttcatcagcaatgtgcatttttatctgattatatccagaataggcatccataaagcttagcaactggtaccttgaggtggcatccaccatctagtttattcatggaagagggaatcagactttagggtaaggcttcttaaggtccgtgaagtcaatgcacatcctccacgtgacattgggcttagggatcaaaaattgatttgccaaccacactcgatacaatgattctaggagaaagtcatttgcagtcagcttatctaccagatctaagggtctccgcttctgacaaactatcagcgcgtcttcattaatgttcaattcatggcacataatattacaattgatccttctgatgctaaagtggctccatgatagcacaacctaatttctttttacaatattcaaaatgctttctttcaccattggaggcaagttcttcccaccttgatagttttggtggggtcgacattgcaaatgttggcctcttctacatcttccattggttcaaacattcttttaatccccactcggtggtccagatcatcttcaaaatccttttagatggcttcaacttttgcttgaatctgtatttagagagtaatagttaactcctcccagaccacgaacacattctagatgaagacattgcaacaactccttccactcttctggtcacctctaagcattccaatgcaccctttgtcacaggagaaatttatacataagtgtcttatagaagtcactactccaaagtctacctcaatttatcatcctagtgtggcgttgtaagctatgggacaatccaccaccacaaaagtataatgcttgaaggcacacaaattgttttctcctttaaatgttatggggagtatcttccccattttaatgaaaacatccctattaaagtattttagctgaatgggataaggtgatagatctgcctcaatgagcccaattacctggcattgaaatttgaacggaacgttcactgagcttccattgtccattaggatcctagaaactctttgtttgaaatttgcgcttcaatgactaaagggccatttatgggaaagtacacatgtctggtgtcctcttccgtgaatgaaatgggtaggatcattattgcaggatgctgagctggtgattccacaatggcacaagtttccctttcttcatctatcttcctcaaatacctctttttagagtttctagtggttcatgcaagttccaatcttgcagagatcgtggccacatgtctatatacaatcaacggagctagacctgaagggtaggggtttctaggtccttgagttagtacagctactgcagtctgagctggtggatgagggggtgcttgaagttgtgatcttagagcttgagggtgacctactccttgtggaggatttatggtaacatattgtcctagaactatcaactatctatgatagatccactgttcaggattaataatggggatagtttttggctttgtgccctaaataagactctatgtcaatgtaatctttatcatttaattatcaataaagagatagaagtattttcatcacttatttagtgtgtcatttagttcatgttacaatctatttgtttatttgatttataaattcatccaaaccgttatcacatttatattcttgtttattgggtcgtcatcacaatggaaattaatcaagattgtgtgattaaatatattcctagatttatcagtacacagggttgaacttatacgataatctacaacatagtttactagcaccttggatgagtgctatgtcctttccaaggcattggttaatgtaaagcttgggttggatgcatggagtatgcattggaggggaccgatattgaacttggattagatatgataaatttaccgta

SEQ ID NO: 295167 - DNA, 2939 bp, Cannabis indica
atatacgtactttaagttttttttttttttaaaaaaatatttttttagttataatgttaaacaacttaatatttaaaaatatagttgcaaaacatttaattatgttttaatattttactttaaatgacaattttgcatagtacataataaagcaaagaaatgaagtgtatagaccatttgattgcattgaacttccaatgttgcatttaaccaactttttgttcttcttatctctaccattattttataattacatgcaaataaaatgaccttaaattaattgaaaagaaatagaaaaagaaaaaggagagtgaagaagtctatacaaaagcattcaagtgtttgttatgaaagaagtggcaaacagcagtgcagtcatctattttaatagaatgtgtcgaccttttccaggccgccctggccgccttaaccaccgcctttgccgccgccgcctcagtctttgcttcccaagcaaccttagcaacttcatcattactcaacacatcccaaacctattattcattcattcattcaccaatcaataaccatctgaagtgtttaatatagttaaacttttacattaaatcataaatacattgttcggagtgttaacatgattcaaacataacatgtcattatattacatgaatattatattatttacaatttgctaaaaatattgtggttggtgattgatgtaattacagttgtttcaaaagataatttatttttttttaataattttattttttatagttacaatatcttaaaattttaaatttatttttgacacagtaaattatttaaaattttaaaaaaattacaaaaatgatatgaaagaattttttttttttaaaaaaaaatcgatcacaaatcaacatcaacatgaaattaacatccaaagatatcatctatatctatatattgatattcatatctatgtctatatcattatccatatctataatctatatcaatatctatatctaatactacttggattgaaacacgaagaaatataccaacatttaaccaacacgagtaaatttgtataataagaatgaaatgaaatgaagaagaaattaagagttagtttgaatagtatttggggtttagggtttatgatttaccccatcagtagcgagaacgatgaattgatcattgggagtgagtcgacggtgggtgacatcaggaacagagatgaccccataaggtttgagtatgaaatcaccaaaagcacgagacatggctaatccaggcatgtactcgttaggaagccataccctcttgctctctggttccctcttcaacccaacaactctcccattcatactccttattcgatctccctcttctacacaatcaaatcaattatcaaatcaatatcagatattcaaattcaaattcaaccaaaatcatttacacattctttcttactggttaagcttggtttatgatcagtactcaattgaacactttctatactgttgttattatctccaattctccctaaaatagctcttgaatcccccaaattcgcgatgatcagatcttctccctacacacacattaatcattgtcaaatacataatatataatattaatatatatattcaaatctgatctaacattgaatctactctacctgagtgattgcgacgacggcggtggttccactacaagataaatcaactttacggagaatctcaagctcagcgtccattttttggaaagaactttcgatcgcttcattccaaatcttgagatccatatcaaaattaggcggtactgatttcaaccgatcgattcgttgattgagtaaaagcagaggaagacgattcctcacttgttggctcactacatggccgtgaggtccgtggccgtcgaaaacaccacagagagatgcgtctgtcattccgaaaccctaacgaaagccaaatcaaatcgttggaatgaaaatgcagaaaacaaatgggagtagttgttattggttacctgagagtgaagtgcggagtcttggttgataggtctggttccaatgtgggagtagagagagtagagagaacggtttccatggccgtggttgaggtaatcggagctgtagatctccgatgatggaagcttggataggcagactcccatggcggacttaactcaataataataataataataataattactcatttcaatttattatatcaacttaatttaaattaaaacaaaataattaaatattattatgaatgattatctatagaggattatatagataatgaattattatttatttataaacacttttgatatgagtaattaaaattattagattatgagtaattgtgaaaataaattagctttttgttttagtgtgattggatggtcattttaaaaaagaattataaaaagagaaagagaaattattatgcttgtcaaacattccttattataattattatgattagaaattgctttacttttttttttctttaagagcataaggaatattaataataaatgagataaataattaattaatatatatatatatatttattcgtccaagaaggaccacctacacactacacttattattgttttctcactactttgtgtttcaaattcataatgaaaaactctaatagaaaatcactttgttgtgtgtaatttaagatagtttattgctaaaatatattattagtgactagcaaatttctgggtgtaatattcttagattttatataatttaagaaaataatttttaagtaatattgctaactaagtgtaaaacgccacttatggaagatattagacaccactaatgtctaattgttataaatattaataattatgtgaatgtccaaatcttttatttattaccatgaattgtaatgaacatttctcttttccttagtttccctttttcttagtttcttaat

SEQ ID NO: 295168 - DNA, 3595 bp, Cannabis indica
cccactggccgcacaaggtactcagtacccatatcctaaattttaaatgaaatgtcagataaagtttaatacagatatataaagtgtaccaccaaatgaagacattatgaagaaagaaaaaggaaaacgtaacattttaagctccaacaacagtagtagtgagcagcaataattaaaaagttcattatacttatagggaaagtataaacctaaagcttaagtttataagtattttgccaaacgaatcacaaaccaaaaacttaagagagtcccttactaaaaatatacggaaacagtgacttaaacctacaaaattgtagaaactttttattaaaaaatgtaaactggggccagttggaagtaaaccagttaaaaaaatagttctcgtttttttttttttgagagaataatcaagatgcttgaaatacaaatttaaaaggaaaaagtcagaaagaatgatgctgacaaagtaacccaagcttcagatcgtgcaacaaatgatgaaaaactggcctaagtaatataggacacagtactgaaaatcattgaactaagacaaccatgaaaacaatcaaccattttcaatagccaaaaaaacccataagtggatctgctgacccaataaaaaggaagagtaagagcccagataattttttttttggataaaaaagagcccagataatttgaactcaacaataatcataaaaaattccaccccttattcacttttataacactaaaacaaaaaagggaaaaaaaaacccaccaaacaaaacaaaaacgttacactatggtcagaaactatcctagtcaagatgtctgtagaatcctcccactaaacaacaaaactgaaataaagtaaaactactatatgggttgaatttttcttctcttacgtgctaaacttaacaaagcttctaaagcttaagatcttaagatccatggagcctgatagtgtacagtagtaaaccatctgttcaagataacaaagacaggaccacaataattaattccccgctgaacacttatagtttgggttgacctaacctaccatcaaaattatgcaattaaaagcaggcatgaacctcaaaaaccctaataaagtcattctttcaaaatcaaattcaatgagataagagtaccaattcaatcctcgttttggaaactttaaagaatatacttcacaaaattatgaacaaatctgaattatcactgttaaaaaatcgaatctccttcaaatttttttcctttcaacacatatgaaatttcgtatataatttcttaaaagaccagatctgaaataataataataatagcagttgaagaacaagtaacaagaaataaaaatcacaaatatattgtaaataaaagttgagctctttacctcttcggggtcgacttcttcttcatcatcgtcgtcgcttccgtcatcgtcatcatcgtctccatcaccttcaccatcatcatcttcatcgtcgtcctcatcgtcatcatcatcgtcttcatcgtcatctactgagtgaaccggaggaccaccggaggattgtacaacctcctgaacatcgtcatcgtcgtcatcttcatcctcatcatcatcgtcgtcgtcttcatcctcgtcctcgtcctcgtccacatcgtcgtcatcgtcctcctcctcatcgggactaatgtcttcgtcagttgataatatgctgtcagccgtgacatcatcctcatcatcataaagaactacgttttcgtcaacaacttcctcggtaatcttcatcttcaaaccctagcaagaattttgcagaccaaattttgaatttcacagggaaaatcaaagcacagaagatagagaagcaagagagaaagaagcttcttcgttcgctctaccagtagctctgcgtcctgtgatctcagccgtagaaacaagcattcacgcggattgctgatgtggcagtaaatcgaacggctgtggtttgagaatttgtattttttgcgatttcaagagtcattgcggcgctctattctgcctctttcgagtcagctgcttgtcacgtgctacttagggatgtttgggtatctatctagggttagggtacttctttcaggaatattctattgggctcagtccattaacaaaaatctggcccaaatattagtaccttgttctgggctcaaggaatatagttttgggctttcttttcaaacatgaaaactagtctagacacatatattttttgaaaattctaccatattgatatactcttatttattttagtgttcgaaaagaatcttttaatctaatttttttaatagttatatacattatagttatttaagatacattgaaaatttttgagatattcaaagaaatttaacacgccaaaaataagatttaaacagtctgttgcacgcttgactcttttattttatatgcgtgtgaaagagattgtttgaatattgttttctatattataaattattttgagaattatggctgcatgcaggcttcgtgggcgtgaaatctcggttaggggctcgttcacatagcctcatgttcgagaaatctcagacaatggttgtctgaagctgtgtcatgaccgagtgatgtccttgtctccgcacgcgtaagggtgaaaccctaacccctgattttaatattcttttactattttttacaattataaatgttattaataagaagtttaggtaaagagtcaaaaactagagaggtttcattttggttgactctatcataaaaacactctctccatagtaatagtattggtagaatttgtgacaatgtaacaagttgataaccattaatgtatgtacttcatagttcatactttcatgtctcaatcattttctgtgacaactcaataatgctttccaataacaagaacaaatatcaagaatataagtttcaatttttgattaattatcaagtaccataatttgttttattgcttgattacatcaaatggatcaattattgcttgattacatcaaaatccaaaatggattgatatgatgatgaataatgtagcttattacaaagaaaatccttcaacctctaattaatatcttattttaagaaaaggctccaacaagatatgagtagttgaagagctatgaagccctgtttgcaatgctttggttattctttctgttaacctcgaaacaacctgagagttatggttaaaattgttgcaattgttaaaatcccaatctttaaattgaaaaatgtattcaaaccattaagtcaaatttttaagtactaaattattcctttttagtctcaccttttcaatcctgacgctgagcgtcttgtgctacaaaattcaaaatgtgcaaattaaattagttttgatgtaaattatttatttttatttttagaaaaagaaaagaaaacaaagagtaataattttttgatatattatataaaggaaggaatagtatagtactagctcccttcatattttccacttgcacttctgagttacattatatatttgggtagttaacttttagtggaaatacttagtattattcatacatttattttgatgtttatataatagttatatatatatattatattatatca

SEQ ID NO: 295169 - DNA, 4236 bp, Cannabis indica
atttatatatttttttaaaacttactttgtttttttagggtcaattaagaaaaaatactccacttttttcagttcatttgaaaaaaatacaaaatatatatgatgcaattaatatatttatttatatgtacactcttctctagctaggtacttgtggatagggttggcacctacaacttgtgttataaataatattaaagttttgtttgttgtttttttttttttaaatatataaatatatattatataggaactttttatttatgagaaagtgattttttttctttgaaaaataaacaatttttttttttatttcttcttttatgataaattatccaaccataccctggctgtcattggtttgtgatatttttttttttactattttagaagaggtgaactgtaattgtttagtattaattggtaattaatgtaattaaagtaatttctttagtatgtaaatatcctcataaatattaaacaaggaaatcattctatatataatccttactactacacacactcaagtcatataatattattcatgttaattttttttccttattaataatttacaattagatgctatgttatttttattttgaacaataaattataagggtagattttttatttttttttaattaatagacaaactttatactaaatatctaaatgaaatgatttttttaagattaatagatatatgtttattaaaaaatttagttggaaattaaatgatacgaggtgttattatcatatatattcaaatgatttgtttgaataaaaatagaaaattaattattagaatattgaaaatgatctctatttttaaggaagaatatatactccttataatttccattttcaatttattatattttatattaatttactcaatcatttcctccacatcaatcctcatcacgtggttaattaatttattaaaaaagaaaaataaatatctaaaaatagaatcaaaatacctatttttaaaatcccaaatttccaatctaaaattttataaaaattctaaaaataaatagtaaatattataccaaccataagaatagcaattttttagaatctttccaacagaatctttcccacgtttgaaattgaaaatttagtcttatcttttcaatttcaagataccattttttattttcattatgattattttaaattttaaattcatcaataaaaaataatataaggtccccacaatatcccataatttatttgtttcttcattttcaaccacaataaagttacacagaagaatccctataacaagtgtttcccttcttcacactcactcataaatgatacaataaatatattcacactaataatatattatttaaaataaaaacatatatatatattaaaaaataattataataattatattctatttttatatatataataatttagtgcaccttagctgtatttccccctaaaacctgataaattccatgaaaacctcatcaccataacttaaattctcaaaaaccaattaattatatatattttaaaaaaaaatgtaacagtctatattcatatatataattaagaatctgtacagaaatacatataaaattccattaaaatccaaaaaaaaatatatatatatattaactttaacggaagggctaatatagttccattgaccaatataattatacagaaaaaaaataaaataaaaataaaaatgaatttttattttgtttttattttcagtcattaaatacatgaatatgacactctgtaatttgtaactgttgcgtactaagaaaaaaaaaaaaccaattagagctgtcttccttcttcaattttctctctcatttatatatagccatatatatacaaacatgacaactgtatagatctatatatatatatataaacatactacacaacatttgtttaaggagaggagaaaagggatcaatttctcagaatctgagaaaaagatgacaggttacgtcgatgaagaatcagcgacaaagcctcattctcacatcgacgtaactggtatgtatacatatacatatagacacatataatattatatgtgtctatgtatatgcaacacattttgtttttgtgtcaagcaaaaagtgtcacaaaaaggtgttgtaatttaacatgtcgggttttgcaggtgtagaagatgaaggaatagaagaaagcccaattgaacaagttaggcttacagtttcaactgatgatgatccttctttacctgctttgacattcagaacatggtttcttggcatattatcatgtgttcttcttgcttttgttaatcaatttttcgggtatcgtcagaatcagctctatgtttcatctgtttctgctcagattcttgttttgccaattggcaagttaatggctgcaactctaccgaaaaaggcggtgtctttaccgttcaccggttggacattttcgcttaatcccgggccatttaatcttaaggagcatgtgcttattactatctttgctaattctggtgctaatggtgtttatgctgttagtattattacaattgttaaggctttttatagaaggagtcttcatcctcttgctgcttttcttctctcccaaacaactcaggtaatgaaaattttgacatttgatggtctaatttcaaatggggttttgtcaaaatttgattttgatgatttgggtttgtgtttttagatgcttggttatggttgggctggtttgtttagaagatatcttgttgattctccatacatgtggtggcctgcaaaccttgtccaagtctctctttttaggtacattattctcttttatattgtcaattttcaattttccaaatttagtttcaataggcaattaagacaaagaaattgctagagtttcgagtaatttgacctatttttgagatacgaacaggagtcttcgagaaaactagtcttttctgaattacacgaagattattgatattgattgtacttttgtttgttttgaacaaaaagggcattgcatgaaaaggaaaagaggcctaaaggaggacacacaaggctacaattcttcttcttggttttcatatcaagttttgcatattacacaattccagcctatcttttcccttcaatagcttacatctcctttgtttgtttgatatggaagaattctgtgaccgcgcaacagattggttcggggatcaaagggctcggtgttggctcgttcggccttgattggtcgacggttgcagggtttcttggaagccctttagccacaccgggtttcgccatcattaacatcttagttggatttttcttgtttgtttatgttgttaatcccattgcttattggtctaattggtatgaagcaaagaggttcccaatcttttcatctcatacatttgactcaactggtcaacctttcaacatttcaagaattttgaatgagaagaatttcaccattgatcttgattcttacaacagttatagcaaactctatttgagtgtgttctttgcactaagttatggcttgagttttgctactttaatggctacaatctcacatgttgctctcttccatggaaagtaagtagtaacaagttacaagttagttactttcttttgttgttaaaaatgtcatttttctaattttgtatttttcttaaacagaacaatttggacaatgtggagtaaaaccaaagctgagaaatctaaaaaagctactgatatacattcaagattgatgcagaactatgctgctgtaccagattggtggttctattcaattttgattagtacatttgctctttcaatttttgcttgtgaaggttttggtaaacaacttcaactaccttggtggggtcttttaatggcttgtggtattgcttttttcttcactttaccaattgggattattcaagccacaacaaacatggtaagtaacaatccaaacacctcaattttctaaaccaaacatgtgattttgactttttgactttgacttttgaatttgtagcaaccagggcttaatgtcattacagagttaatcattggttacatttaccctggaaaacctttagccaatgtggcctttaaaacctatggctatataagtatgacacaagctcttatgttccttggtgatttcaaattagggcattacatgaaaatcccaccgaaatcgatgttccttgttcaggtaaaagtataagataagtataagttttgacttattttt

SEQ ID NO: 295170 - DNA, 6292 bp, Cannabis indica
ccaattgattttgagatggaaacccatgattctcaataccacaccataaaaagatacccatccaaatccagtttatacctattttaactctggacttgtgtttctagctagtttttctttcttttcttacctaaaatggaagatcttgccaactctctctatggatctcaatttgacagatacgaaaagcacagttcatacctttcaagattccacacccataaatgaccccaataccccatccccgaacatttttctggtggctaaactttttacagtaaaatccttcagtaggaaacacttcaaggaagccacgaccaaagactggaacaagttgtgtcaatttccagttactatagctggccgtccctccaacatttttctcgtggaatttggatgtgaaggagatcgaaggagagttatggttcaacaaccatggccttaccttaataatgttgtcattgttgatttcctaagttctttggaggctcccaatggagacagccttcaatcctagccctttgggttcaggtccataacactccctttcttaagaggagtgaagagcttgctggactcattgccacaaagatgggaccactcctagaggtggacaagccttctctgagggagacctggggacaatacttttgtgtgagagtgatgttgaatatttcccaacctatcctaaggggaattccaattgagttttagagcataaataaggttgtttggcttaatttgaagtataaaatgctcctagatatctatttttattatggccgaatgaggcatagttataacaaaggttgctttgagtatatgaaagcttctgatgaacctcaacccctagtacctttgttataatgaggacatccgaagtaaggtttgagtttttactaatcccttacttcaaagttctaacaattggaattttactccactcacagtggtcactttcatgtccaccaacccagctagtgttctatgtgtctctaaccaagctagccctgccactactgcccctctctatctcgctacatccaaagctttgactgcttccactcagtaagcaagtttgttcatgtctaataatgtcaatatggagcaagacctcccacattagagtagtgccagtcctaccttggattcctcaactgtgcccctacaagcttgttaacatgtaccaactttcacaacacttcttaatgccactatgcatactctatttggaaaacatgtcactacttcaagctcgagccattcgtcgcactccagtacccctggcagcttaagcaacaacatttccagtcgctctagggcccttcttcgtgcttccattcctcttcttgacactaataatgctcttgtggctgcgtcaaccacattctctttgggaattacaaattcttaaccaactaagcccacaaaaaagaagacttcaagaggaggtaaagagtcctttaaaaggcagtcaattttagttgaaggagtgtcttaaaaggtgatcaagcgtgcccaaaccagtctgcctcttgccctaaatgttgattttttagaggcgggtcctgctcaagaataggcctgcctagagccatgaagattgttagttggaatgcacatgatcttggtagtgattgtgcatttcgtaatctctcccaactgaacattttttgtaatcctgatattctgtccatttctaaatctagacttgcttcttgttgtttggacattgataaaaataagtattctaatggcttggaagttagtagaataggttgaggggggtcttttgttattatagaattctactgtaactttaactctttcgaaccaatctactaatcatttggattgctatgttcgctcttcttttttcaaattttcatctttttcatttaacttatttttatggagcttcaaacaattgtgatcgaccccacacttggagacttcttaactacattggtcaaaacattccctcggccccctggataattattggggacgtttaatgcattcattgacatggatgataaattgggtggtaacatggataaaggctcctctaatgattttaaaaattttatcacttactttaattaacccctcttgatttcactggtgacaaatgtacttggaataataaccaaccaaatgagggaaacattcaataaagaattgactggtgtgtcatcaatgacccttggaaagaccattttcctcaagctttgcttaaccacagtggtttttttgggtcagaccacagcgctatcatccttagtcttttccctcaaactcccacccttttccttaaccagcctaagcagttcttatttgaaaatatttggcttcaaaacccaagatgggacaaaaatttattggatttctagaaatcttctgctgatcactagaatctaatttaccaattattagatgtccaggacaattgtgcccagaaccttcagaaaaggagccacaaatcttcattctaattcaaaaagtatattgaaggacactccatggagcttgagctggcctgtactggtcaatcctggagtgaagatacgattagtaggattaagtgtcttcagatctaactggacaatctcttgctcaacgaagaaatttattagaagcagtgttccagggtaaattggctcaatcatggagaccgtaatacgaaaattttccataaatttgcctcaaacaagaaagctagaaaccaaataaaagagctcctggacgctcaaggtagaagactcttggaagaataagaaatcacgggaaaatgaaaagatattttcatgatctttttacaacttctaacccctcaaccgaagtcatcaactaggctctagctagtattgacttgactgtcaattctcaagactccctcatgttgcaaaatcacttcactagggacaaagttcaaagagattttttccagcttcccttgataaagccccaagaactgatggctttacacaaaattctattgaaaaattggggtttggtcaagttagatattttgaaggtagccctcaactttcttaactttggtggagatattgctaatctgaacaaaactctttactttgatccccaaagttaaagcagccagaaccatgaaggattttatacctattagcctttgtaacatcatctataaaataatttcaaaggctattgttaataggcttaaatatattctcaattagctcatttgccttaaccaaagtactttcctctcgggtcgtctcatttatgataatattatagttgcccaagatgtagctcatgccataaaacaaaggaagcgtggcaagaaagcctggatggccattaaacttgacatggcaaaagcctttgatagggttgagtggcaattcatcacaaaaaatcatggataagtttggctttcctcaaggtttcactaacctgattcatcgttgcatcttctactgtctcttatcaatttaatcttaatggtaggatggtaggaaatgtgactcctacaaggggaattaggcaatgagatccactttctctttacctctttctcttgtgctttgaagaattttcctccctcattcgtaatatgagcagtctggcaattttattagcctgaaaatttctcgtaccgcccttaccatatcccaccttttcttcactggtgataatattttgtcatgtcaagcaaacatccattcttataatgatgtcaaagagattctccttcactatgaacaagccataggccaatgtgttaatcttgataaatcttctctttttttttctccactaacacaactctgagagatcgaactcttatctcagattacatgggaatgcttgttagaaatgagtttgaaaaatatttgggcctccctcaatgcttcagaagaactaaaaaacaagccttcaattataccagagagagagagagaacttggaatctcatcttcaattggactcacaagtttttcttaaaagggggaaaagaaatccttatcaaagtggtcttacagtccatcccctcctacgctatgtcttgctttcgactccttgtcaatatttgcatgtctgttgaatctatgagtgataatttttggtggggcactaatgcaaataagagacctaagactcattggcatagtttgacaatgctttgcaaatctaagaaaaatggcagtctgtgatttagatctctggtttattttaaccaagccatgctggtcaagaagtctttgcgtctctttacccaacctaattcattggttgctcaaattctcaaggagagatatcatcctcattccttcttcttggacgattccactggccatgcccttcttttttcttagagaagcattagctaagggaatttttttttatttgaaaaaaggactcgttacaaaaattggcagtgggaacaatacataccctttgcataattattggattcccaatgttagacttgtgcttacaatctaaactcctcgtacccaagttactttatttataagtagaaacatgacctggaacatctatacttccctatcaatatagttaatgaaattatagatatccctctccccattgaccaatcccaagattctctcatctggtagcataccacaattggtagctacactgtcaaatctggatatcacctaagcttcaccccagacaagtaccaataaacttccacaagttcccaaccctcaaattggtggtccactttgtggtcctattccttaccctctaaactaaaatactttgcctatagagccaccaaaaacacattctataccctttcaaatctctataaaaggaaagtaatggcttcctcgatttgtttcagatgcaacaatgggctggaacatatttgtcatgctttattcttttgcactagtgtcaggcagctttggaaaggtacgatattctactcacatctcaaattttctaaaacatattaatttttttgatttaattataatgcatctctctaatatcttaactaaactagaactggagttgcttatttatatgtgttggctgatttggcatgacaggaataaattcattcataatggctctatggcatgccatcgtaatcttcttaaggatgctagttcttttatggataattatcgtcaagcaaggctaaataactacattagtagttcaatggccaaggatcaatcaggacctcccaacatttggatccctcctccctatggtctcgctaaactcacaatagatgctgcaattgatagacgttccaacaaattaagttttgcaggaattcttcgaaacaacgagggagccaccattgcacatttctacccctttttcagtagtgagggaagcccacattcaagaagcaaaatctctaatcatctccctccaatggttccataaagaagcattcccaattcacttcattgagatagattgtaaaactttagtagatgcaatggcaaacaccacgaacatcaagtcagtatttggagatctcgtttcccagctaaggtaacttctatccttcttcttaaatgttcatctcagtcacattcaaaggaaagcaaacactgttgcccataacatggctaagaatgctcttggaattaaagaagctacttgctggattggcgatgaggcttgttgttgctcttctgatctttcagtctaacagcctctttactctcaaaaaatcaataataataataaataatgtataaatatatgtaattaatttaataaaattaagttttccatcaaaataaatacttgattttcaagaaacaaggtatcaaaatcgtattatttgtacattaaaaaagatagctcctccttatttttgtgctgtctgtttgtctctgaaaataaaattaattaggtgttctttggtttagagaatacaaatgtttagtattgtagtgcctagagtattaatgttcaaaaaattgcttaaattggccttctcaaaccattccattcatattgtgcagttcattttgaactctttatgatgcgattgagttgtatgccatgttatacatttgttgttgttaagaaacatgaggttccatctcaaaactaattggtgatgagtggagtggccatgttcctatgtgtgactcaatttttttacatttaatctatgtgggatatttttctccaatatctccccttaaaatggtggctatttttgctcaccaatcttgattcaccttatcacaagtcatgccatttgctcgctttatttttgttcgaatctcaaatatct

SEQ ID NO: 295171 - DNA, 1844 bp, Cannabis indica
atgtaagcccaaataaaagtctaacatttcttacatttgaaaaacatcaaagtgggaaagcctggtaagactttaacagatgcagaacagcagaagatgatgaaaaatgtaaggaacattgttctgacaattgtaactgtactgcttatttattcacaactgagggcagaagaccctcgtgctggatatggaccgatggactagaaaatattcaagaggataatgataatgatgctgaatcttacatcaatgttcgtgtggaattatctaaaacaggtatgtataaactcccctttattctccttttctcacgctgagtgaatcaatatatatttatatggacttcatattcatgtattaatcatcaaaatgttcattttggttatttcattgcagaaacatttaaaaaaagctgtaaagcttgtggtgcaaatataattccctatccattgagcacaagttctgattgtggggatcctttgtactccgatttcacatgtgacacaaattctggagaggttttctttcaggctctccatcacaagtaccgagtaacaaacatcgatccagtgcacagaaaattcactgttcagttgactgaagaattgggttgtacagcttccgtgcaaatgctcaatcagtccttaggctataccgtaagcaggggatgcagtagtttgcagagttctatcgttcctaatatgtttcccttctttagtagagcacaaataatagaactagaaattcagtggaataaaccactaagaccaccttgtaagacaacttcggactgcgatgagattgtaaactcagattgcaatgatgcaaaagaagatggatcaagaaggtgcacatgccttaaacattttacgtgggattctgagagcttaacgtgcatatatgagggtactatcttaatacaaaactatcttgacattttctttgtatagaattatatattttctttatatgttagtaaagtaatcaagctgaaaaaatgataccagaagaaaagaatatttctatattattaaaaaaaaaaacatggctgcttgtccttaggctaacctctatctatatactgttaaatattcattaaaggaaccgacgtttctaggcaattgtttgagggatcttcatccaaactcaagtattatgtagtgttcttggggtttgtaacgattgctttgatcatctcctccactacttgttttgtatatttcctgagacgaaaaaatgtagccaacacaacaggtgagtactaagtatggaagtcaatataaacaaattgaatttctttcctccaaatgataatgagtaacttgttttatttaatcatcttaacaaacaggaactggcggaagaatcgaagtaaatcaagcccttcacttatatgacagtgagaggagtattgtagactttatgcagacaggtcaatttaaagaagaagagaagaaaaacattgaagcaccatttgttgttttggaaagcatactggttgctacaagttacttttcagaagataacaagcttggacaaggagggtttggcccagtttataaggtagataaaatgattgactcattcttagcatagttaccacaaggctaaaatatgacctgtaattgttggttggtttgaactttccctcagggaaaatttccaggaggacaagaaattgccataaagaggctttcaagtggatcaggacaaggcttgttggagtttaaaaatgaggttatgttgattgctaaacttcagcatcggaatcttgttagactgttaggctattgtattgaaggagatgaaaaaatattactctatgaatacatgccaaacaaaag

SEQ ID NO: 295172 - DNA, 5151 bp, Cannabis indica
catacatgatagtaaatagatcctggtaaaataatttccaacaataagtactctgcatccaaaccagaaagcacattataaattagatgtctctcaggatatggctcacctgctgacgccaaagagtcagcccacatgcgtttcatctttaaataatcagccatggtttgagaccccttgcgagttttttggattttggttctcaaatcatccatgttagctcttgaatgagctccatacagttcttccaaagaattccacagggcaagagcagtttgacaccccattacttctgaggcgatagcttctgtcaacgacccgtataaccaccccataagaagttggtcataaaccagccaggtttcgtactccgggttcacatccattccagatccagtgactccttcaattggtgtgcctgtcgtaatgaactctggtggagttggtcgagatccgcttataaatccatcaagtctgtgtccgcggatgatggtgtttaccatggttttccagaggggaaagttgttgcggtcaagtttcaaagaaaaaggttggcttagggtgttactgaaggggttagaaataggaggagtagaggatgaagatgaagttggcaccattgtagtgactggtacaggggtctgtccagttggagtctgatctccctgatttgttgctccttgagctgttgaagaatggtcttgaggagtcgacatttgcgtaggcaaatccgccctgataccaagtcaaatttctaagggattgagaattaaatgatcagctcaaattatggctgatgccgagatttccatttatagacaaagtacagatacaaaggaatgtacaagaggcaatctcagccttacacgtgtataacaaatcattacaaagatggaatctttaaaatcaatgcctaacggaattgatgtgacagctgcaatgcgataattgcctcgggattgctatatgctccaacagattaggggacacctcataggactgaaatacccctgcataatttatcctgtaacatatatgtccaactaatagttggttctggcaagtatatataataagcattactattctatatatctctacagaagatgattgaaggttgtataccatttttagcgaagcaagatactgaagtttctaaactatattctgcaagcaatcacccaccttttatatctcaagatgttattgtttagttgtgtaacatctcaatgtatttattcttatgtcttgtgccactatactggttttgacaaatgatcatatatacatacctattatgaaatgctgatttagatgtttaatatatttcaggtttgaaagttggttcgctacctttctgtttaccaagatttagtgatttcaagcaaatatcaattacaaagaaaagccaagtaagaatttcgttcttatttgtttttctaatattgtaataaatatcagtgaagatcttcgtagtcttgatcatcccactcaaacgtctctattgagcttattgaaattacctaattgaaatgcaatctctaacttattgtgaaattataccttattgtgaaattacctaatccaaaaccaatttctggattctccatgaaaagaattcaataaactcccatcatcaaataataacttactctgaaatttcctaatcgaaaagcaaaaaagttttggattctctgtgagaagtattcaataaaccctcatcatcaaagtatacattactgtagaaaaatatcaatacactacataaataatatttttttgttgttggaaagaaatgcataagtagtgttgacttgatcaaataacaaagtaaattaatttaaagaatttacactattttttccaaattacttttatattttctactattaattatcaatttatattaaattatttatcttttacttgcatatgatatttaaaaaaaaataacctaacataaaacataaaattaagcaatattaatctaatatatatacatatataatatatgaagaaaattttaatggttacatcaaatatatataatcatgatagttatatttacttttaaccgttagatcactatttaacgattgtgattaatttaaaaatttacgaaaaataattcataacttgcttgtaacttaatactaatctaattttatttattttctaaaaataaaaaaaaataaaaagaattataaatattaatttttaaaaaggttttattaaacattttaatcaaaaattaattcattttaaatacataatcgatttaagtttaaaaatataaattttatccgttagtaatctattatagcaagtcataaacaatgtaactatcataattatatttttaggtaactattaaatacttaccctatatatttataaaaaaatattctctttcctaaaaaagaaaattgcttaaggaatatgtttatttacatataaaaagtatttttttaaaataataaattagaaaacttatatgtaatttactactctttatttgtatactaagttgagattaagtgcaatatacaagtactaaaaaaaaaattaatgtataataattttaattgttacaataaataatgttttttataatttaattttatgaatagtattagtttaaatataaaaaacgttaaatagtataagaagaaaatataattaaagaagataatacataataattaatattttaaaaagaaaattaaagactatctaaaatttaaatataaaatacatttgctgaaccgtgtagaacttttatgtgaatcttttgagttattacttcatgtaattttgtggatgatttcataataaaccagcatctagcccggttgcaaggtaaggtttataaatatgagtaatagagaatgtaatgtttgatctacaaaagctaacagagaagaaatgagtttggcttatggtgggtacagataaagccattgctggtgcagcacaaaattgaagatgctcttattcggagaagaacctatatgttaacatgttagagactagtaaaagtgaagtactgataaaaacagcacgcagtgccatcattgttagtctcgattacaagattctctatgagtttacatagaaaatatttgttacatgacaatggccaaaattgataaaaacagcaggaagtgccaattgattgttcttgaagcagaagttgtgtattcctgcaagatggcaccattacattatttcaacttcaacagaataattcttaatctagagtggctaatatagagatcgggaacgatgacaaggacaaaggcaatcatgttattgcatagaaatatgaacacattgtggacacaataatgtatggccatgattccttgacattggatgaattatactccaaatggacaaggcagtgatgagttttgaagttagtttgcaatttgcaaaaatttcataaatttttagctttataagaacctgaagcttacttgaaattggggtcagctgttactattgttgttggaacaagatgtaatgctaaggcatcataaatctcttcaatagactttcaagcaatgaaatcaaaagagtcaataatttttaagttgaactatcaatctaaatagcttaaaatatcaataatatggcgaacctgtcctctactactaaattttccttcttttgacaacaaataacatgtatacactttcagatagcgtcagctcaaaatcccattgagtatgagtaatttatacacgacagagagagattaacacatagttatccttccgagagagtgaaagagtgtgatgattggaaaatagagagttttacattgttttgagtgaagatagatctgcatttatatagaaaaattcatcgtttaattttagattcatcaaagctataaaagtaagtttttcatacacgtatacataagaacttccactaatcatccaaataatgattatataacgtttccgctgataaaaaatatgatacaagattagagaaaaaaaatcaacaaagtaaaaataacaatatacaaataataaatcaattcaaaattgaaagatacatgtttctcaaaaatgaaattataagcaaatggatatcaatatataaatttcttcacatgagaaagctcaaaccctctcaattgtctcacctataatcaataggtatacatgttatatttttcttcttttgccatgatgatggattttttctccgattattggtattgatccagatcaaaatcagttaagaaaacaaaaacaatttgataatctgagtaagacttttcttttgattaaggtggcatcgatggctacagggatttggtttctcgtagctctatcgttgtatgaaaccaaaacaacaatgatggcttctggggatactcggggatgttaccttaatgattttcgtggaattaggtttgtgatcataagtttttaattttttaccggaattaaatttatagttagataatcacttttaatatataaagatatgaaaaattgttttttaaaaggagaattacctcgtatactatttttttaatttttttttcaaatttacggttttgatttctaaagtagttgcagcgctagttgcaatatgagtttctattttttgttacaatttaggttgcagaacgctagttgcaataggagtttctatatagaatttcgtaaaaatacaaaaaaaaaatgttttgaaatgtaaaaatgaaaaggcactatctataagtaaaatatatgtggaaagaattattgttttttttttagaaaacaaaactaaaaattaaaataatttaattgtaagtaattgttattttttgtaataatgaataataagaatgtgaatcaaaattagtctattaaaattagggttgtttatataaattaaaaaaccgtggtttaaatccggaccacgatgaaaattcgaaccactgccgtaattggggaaaccgtttttggtggtttggtcaatccggaccgtttacggcgtaatggttcagttgcggttcgtaataaatagttaacggttaaaccggattagaccgtttataataaataattaattttatatatattttatatataactatatgtataattttgaacttttttgtgtgtcaagttttttattgca

SEQ ID NO: 295173 - DNA, 2945 bp, Cannabis indica
aaagtaaaattaaaattaaataaaaaaaaaaaaaaaatgagtgaagttaacgccaagcagatgcgacggtgagagtgcgacccatccaaccaaagcaaattccttgattttcttctttaacggaaagattatggaatcggttacccgaactcagccgagttttggcgtcttgactcagtggaatcgactcgaacccggccatactcaatcgggccctccattttccaaacacctcgcatctttcaaagcggtccctcccttcgcacgcaaccgagttacccaccttccgactcaccgcttcctctaccctaactcgttccgagttatccctaccaccagctgggtccaccgagtccaacaacacactgtaatacgcgcacgtctcgttcacgcgcgccataaacggcgccgtgttggtgttcagctcctgctccaccaccgtaaccacacgcggcgccatagacttcacgcgccgtagcagttggtcccttggattctcggttgatacgctctcgtccggcatcatatataatttgaaggcgaaattcacagcgatcgactcgtctggttcgcaacccagcgattcgcgactcagctccgagattctgaggcttttgacagtgagttcgaacactacacccaggctacgggcgagttgactcagtttctcatccacgctcttcaatctctcttgggtaacgacattatccgccagagtagttatcttcaaggacgaaagtatgccgttttttcgaccggccagctttcgaagaaggtctacgtactgtccgccatagccgatgtcgaagtcaattacgtgaatcttggccgaatcgtcggttaatgtggcatcgaggattgcgaaattggctgccgagaaactcagaccaaagcaaggcgagagatcgtagagagactgaatcgcggagccttgttcctgactatagagctccgtcacaggcggcggattctcttccggtttgattctcgatttaagagccgacgatatgaactcgagaactctctgttcggaagtgggtcttgggtttgagacttgagtggaaaggcgcgtgaggatctcattcgcggattcagttttcccgtccgagatagctaaagcagcctccataactgattgcttcgaaaaagtcaaaattgcaggagaggcgaccgaggatgaggaggaagacgaagaggaagaagttggcgatggcgaaacaggtttctgtgtctgatttgggctgatcaggttctgtatcgtctcagaccactcgctattattggtaatagcagagacggggtcaccttcttcgtcttcgttatcatcgagaagctgtttctccagctcttgaagacgggtgttcataatcttcttttcagaatccacaaccggaataacacgattctgctgaaccggatttacatacgacataccttgaatattaggctgttgtggacgcagatactgctgctgcggtaagggcaagccgtacctctgagaagaagctggtgatgatgatgaacaagaggaagattccgagaccgtggttgccgttggcgaaaattccatcggagatagaggagatatgggtgaagattgctgaaacgtcctgggcttgactgagcgaagatagttaggctgtacaagcccaaggttcggattgtactgctgctgctgctgattatgatgatttgattgaaactcggcgagatttctttttccgatcaaggttgtcgggttctgacgagcgatccgctgtgtagttgaatcgatgaacaagcccggaagttgaggtcggtggtatggaggctgagacggaacgttattcatggttgatcgaccggtggtgtagaaatccggcaaaccaccggctccggtatacccagattgcattttagctttggtttcttctttttctctctgagattttgtagagagagaaggaaaggagaaaaaactcaaaagatatgggttttgaagaaactcataaggttaaaccagagaaagtggaagacggtttctcttatggcattgaattaattaataataataatttttataatcaaaccttaattaaataataaataacaaaaaatataatactgaaatttcccatttcaaaccggtacttaagcttcttttttttgtttaaatcgttaaaaattataattatttttcagctgaatcttcacgagaatatctaccatgaaatctacaccgttcatttaaggtgaccctaatgtttctaaatactctacggtgattaaatctgtcatttaaacactttatacacacgaaatcctcactcatttaaattaaagccgaaattttcaacaaaaataataataaattaaatcagaaactatggtgacgcttcttcaaaacgcgtggaaaacacgaaccaactaatgtatacgtaaattacacgcgttgtttcttgttagcacgacatgtattccgttttaagtgaaatgagcttgatcttttatgcggcagcgatcatctgactggacagttacgaagtactccgaaaaggctatcgagagaagcccaggaatgcaatccagaacacaagtgaaagcaactcatgtgccacgtgttccaataggcggaagcgttcacacaatgttaaaataccaacttgttactttataatttccttcactagttcgctcgctgattcgaattctagtagctgtgttgccttacccgacgattctcggtagattctggtaagttcaccgacacgtgtcggtcgctcaatgagtttacgtctgattacagaatttaaaaacccaaaggtgaaagctgtctacgtttacgaagaggttcttcaaaataaataaataatacgcaggctaaataaatacccaaccaatatccaaaatgactaaaaaggacaaccttaattttttttttaataaatcaaccttatattagggat

SEQ ID NO: 295174 - DNA, 2701 bp, Cannabis indica
taatgttgtttcttcttgttcttattcagggaagaatgagatgcaagtgtgttgcacagtggacaaagatttcaaatcaaatgtgacagtagatgatgagtttctgccacgccaaaatggtgatcttacaattatgtacgatgtgatcagaacatatgactcaaattactgggcacaagtcacaatggaaaaccacaaccctcttgggcgtcttgataactggaaattaagttgggattggatgaaggacgagtttatctacaccatgaaaggtgcttatccaactgtgcttgattcttctgactgtgtttttggggtacaaggtcaacactacaaggacctcgatttctctactgtgtttaattgtgaaagaaggccaaccataatagacctccccctaactaagtacaatgactcaatcctcggattcaaaccttattgctgtcgaaatggtaccattttgccaccacaaatggatgcaagcaagtcaatctcatcattccagcttcaggtttttaaaatgcctccagatgtcaaccggtctgagctctcaccacctcaaaactggagaatcaatggcacactgaaccctgattataaatgtggccctcctgctcgggtaagcgctagccaattccctgaccccagtggtttgcccacgaacacaactgctgtggctagttggcaggttgtgtgcaacataacagtgcctaaggattcatcgcccagatgttgtgtttcgttttctgcttactacaatgaatcagttatcccttgcaatacttgtgcttgtggttgttcgcgtacaacagaccgtacttgcagcacaagtgcacaggccatgcttcttccaccagaggtacttcttgttccatttgagaatcgaactgctaaggccatagcttgggcccaactgaaacatctaccaaatcctaatccaatgccttgtagtgataattgtggagtaagtatcaactggcatctggctactgactacaataaagggtggagtgcaaggatcacactcttcaactgggatgaaactactttccctgattggtttgctgctgttcaaatgaagaaagcagtccctggttaccaaaaaatgtactctttcaatggaactaccttggaattgaatggtgtcaataatacccttttcatgcagggcaacgagggtttgaactaccttgttgcagaaacagatgccctcaacccagagagggatcccaggattcctggaaagcaacagtcagtaatatcatttacaaagaagctaacccctggaatcaaggtagctgctggagaagggtttcccaccaaagtattttttaacggcgaagaatgctcattgcctaaagtatttccgaccagcgatcagagaaggaactcggtcacaatttcttcagtactcatgttggtcttggtgctcatattgatatagttacatctggggatgatgaggaactgggtaatttcgtagctgctctgctgctgatttttttatctttcagtgattcagtttaacattttaggctcaatcaggagtttggcagcctctttagttaaactggttgtgaattgtgattacagctggtggaacttgctgcttgcttagttttgcaggagtatatataccatactaaggaacagcatgtcataatatatgtagtcgatgtaaaagtctattttgtgtaaaacattgttgaacaaagcttcttttttatgtgcttaatcttttttcatgtgtacctttacgaatggtgtattgaactttatgttcaatgtccgagtctagtatggttaagaacagtttttgtgagtatatataaattattttaactaacctgttaacttatagaattttgttaaacataatcaagcttttaataattaataaagaaattgattataaataaaaataaaagatttttacttagtttcgtaattaaaatttacaaaatacaatttagcaaaatttctgtaagtctgtaattttggccaccccttctacaacacgagccctgttatttatagaattatgatagcaattgtttcattattatctaaaatatagttattaaatgtggagatttctagtgtattatatatctactaattggtgggtacgatttataataaataactgttattttatgatctcgatattcattatattttactgagcaacttcattattttttcgggatatacactaagtgattgacacatgttattcacgatcctccacgcgaataacttgaatagactagccctttttgccgatcacttacaagaatgaagtttggctaaagaatttctctcctcataagtaagctttttcaagatgtaagctttatgcgagctgagttaacagtattcatctcacaacaagcttgtcctttctatttgtgcaagttatgtcttatatcttgtgatattcgagatgagcctcattgatggcacattcgcctcgttgctcattctgacatactcaatgtttgtcgagaagacttccttcatgttttctcttcgcggggagatcatttaatattttgtacagtatcacaaaaatagacctatacacaggggcggagccaggacctaattactaggggggccaactattaatttctatttgaaaaaatttatagtgcaccccctagctaaaaaattcgttttgacatctaagaaagttttt

SEQ ID NO: 295175 - DNA, 5063 bp, Cannabis indica
cccatttcatttttgacgtcctttttccatctcttacagtattggtcaatagactgtgcctggtcttctaatgctttttttcatgtctctgtccttcccatggccattgacatcaatatgattattgattcgttgactttctacaccaccagaaagaggaccctctgataataccttcttgctttcagacattttctcactgttcctgatcttgaatctgagctatctagaacatcttctggtggggtagcactagcaaatccattttcttgagaatcaaacttgataggctctgttttgtgctcctcaaccactgtcctgtgaagacaaagcagtaaaccactggaaatttttaagactaatcaagggatgccgcagagcagaaatcttgtgctcaaagatgaattttttaaataaaatctggtgctcaaaacgaagattctctttcccagtgtttaacactcttttttattcatagtggaagctagaaaggcacctattacacaagggatactggaaatttataaaggtcccatttaaagtctaagttccagttactagcctacagcacatatgacacactagctaaaatcagtgaaagaaagagagaggtcaaactaaccttgtttctctgcgtcttatttggcggcaagatttaccgaaatgatgtctcgaagaagaagaagaagagcccagggatgaaaaagcattccgccttcttgtagatggattcttgtatttttcgtgggaacgtggagacttactacgacctttccaagacaagcttctaccagataccggagatgcatcacgatcagaaccagaaaactcctccaagttactttgtctcctagaagtgaagtgttcctcttgagttgggtaatgatcaccctcatgggattcccggtgggcatcctgatcagaacttgaatcaaatgcctcagaagtgtcactaattccctgattctccaaaatggtgaggacgtctactgtggctttctcagccattcttctttgaatagaaacaattctaagttgttcctccagctcctctacctaagttgtaagaaaacaaacaaacattgtagcacatgaagcaagaacagaagtccatttctttgagcatcaaataaaggtaacttcgtagaatttcctagaaaagcattcagcataccctttttgcgagttcttcagctctttgtctagcacttttcgacacagacctctcagcaagcaaccgtgcacggaggaattcaattgtcatagaggaatcctccatactagaattactcctgattagtaaacacccaatttattcaaacaaaagaaaaacaaaaccaaatatattcaataggcaatctgaatgcaccaccaaagggggtatatcacagaattcacttttctaatcacatgtaaaacctaacagagacatggggaagtccagtcctccaaaaataaatatgcatctttcttcaagtatctatcaatcatgagaagacaaaaaataaacagtagagtatgaaaagtgcagaaacacacacacaaaacaaaaaataaatagtagagtatgaaaagtgcaaaaacacacacagagcaaaagattaagaaaaggtgttctgaaatattgtttcaaagtttaaccatttcccagttgtcctaaggcatgagtagccgtttaatacacagaaaatcaacacacacgagtagccgtttaatacacagaaaatcaacaaactttacaagaaacataagtgttcacacacaactaaagccacaaaactacataacccaaagtcaatacaaggatttaagcaggaacacttagaacatgtgtacaaacagttcagagtataaaaataaagaaagaaacaaaaattgctaaattaaagaaaacaaagatagagagatgatctatacctttgatcttgcttttcgtgattggatttaggcattgtcaagaattaaacaaaaaagtcaaaactcccagcttgagaaatcagcgtctacaacaccaacaaataaaaggcagaatcactttgaactacagtgaattcagcctcggaaacatgaaattgaactgtgtaagagtctcatgaaaaggcaaaagcaaaagcaaaatggaaagaagagaggatttggccaatcttgcagaaaaaatcaaaataaaaagaagggatatagaccaataaccctaacggggtaccctgttttactctacacactattgagttgagattgagaaataagacaaagagagagagaaatagaaagagtttgggtttgggttttggggtccgttgagaatctttggattcacagtggtcatactgccgtcaatattggaaaatcgagattcgcgttttgtggcctcttcgattaaaaaatccttagcgatatcattgttatgatataggtacttcgttttatcttgcctttgtaacgattttgcatatcttgattcaattttacctcggtatggactcttgattggcattgctcttttgactctttattagtttgtataatttcttaatatttgaatatttttatgtataattgatttaatttagtatttctggagtatgcagtcgagtttgttactcactatcactaaaacttaactgcattcacagtcctaatagtttaatacattgactgcaatttgcctaattcatcgtaagtgcacgttacactaatgtcgacaattatatcattggatgaaaattgcaaaatgatgaacaaatcaagtatggtgatatattgatttagctaaaatgtaactgatgtttgccaatttcttctaaactttatcgtctagtgaaaattccacaattataaactaatcaagtatgtgatttattgctttagctattttctctgaactaagttttaggtacttgtgtttttaagcattcctttgtatttgtttttctattcttttgagcaacttaaatgccttagtttttaaactttgttttcaggtaatgaaagtttaatttagtaagagggataatcctcttgttttaaggcaatgttgatttagactccgttaaatgttttctcactgtgaggtttagttggtttttgatcttcttattgtttatcagagaaaagattatggtttcacccagagtgcactggcagtggctctgatggacaagtaggcccaagtccacgggcatttcatgttgctgttgctattgattgtcatatgtttatttttggtggtcgtcttggtagcaacaggtatgttaatatcctctatattttctgctcaaaactttttatccctttttttcccctctccctctctttgctttcattgaaccggtgttaataacaagattgcatattcactatttaggttcggtgacttttgggtcttggatactggtaagaatatatttaacttaacatgcaaaagaaaaaaaaagagcctctcctttacaatttgacttaattcttttaagcatcaaggatcaattgaatttgatcttttttttcttccagatatttggcaatggtcagagttgactagttttggagacttaccatcaccaagggactttgcagcagcttctgctattgcaaataggaaaattgtcatgtgggtattcatgtattacatggttttacttataagttgttgtaaggattctctagtatttacttgtataatttgttttaaatgtcaggtatggtggctgggatgggaagaagtggctgtcagatgtatatgtcttggacacaagtaattattttctctgtcgcttttgatacatgaaggagtatgcatatgatcatggatctgaaattagtttctgttatgctcttctttattttacagtgtcacttgaatggacggagcttcctgtgactggaacattaccgccgcctagatgtggccatacagctaccatggttgagaaacggttactggtttatggtggaagaggtgaagtagcataatatttactttttggactttcattcatttaactaatataatacagattaagatggattcctttaggtttatacctcacatggctaatgttactgtggtagggggtggaggtccaataatgggtgatttatgggctttgaagggtcttattgaagaaggttaatagtcaaactccttaattattgtatttcattagttgttaatacatgcaaaattttctttatgattttgtgaatgtaagaattcttttggtagatgcatatctcgttttcttttgctaatgttttgctctggctgttatatgcatcatgcacatatatcatgcaaatactcttgtcacagagagcaatatgtatcgtctatgtggtattatgtgtacattgcacaaatttggatatgaatagctgtgttagcttcatttagaaattgaagaagtacattttttttttgtttgactctatactttgaaggaattacttgtgagcaagagtaggaccaagggagtgctgacctctggaagttcaggttctaaggttgtctgtttgttcttatacaagttattaaggaatttgtttaaattgtgataaatatggtcacggggaagtatattagatgaaaaccagacaatttgagccttagattttataaattggattctaatagtagaaaaaaaacatttggaaaataatttagtaggattatcttgttggttagccttttttttccgccctatcttttctgtcttgtcttgttttatttttgttgtttacacgttcattttataatgacattcttttttcccttgtaacaattacattgacaaccctgatttatattaaaatagtaaaattacaagcaacagctgggcaaagcttattaataatacatctcttagtgctgagaaaaaccttaaaaatcaatcaaaatttcaccacctagctaaaattcattattaggctatgtttggtaggaagggagggagagtaggatggatggagagcttaaagaggattaggagtaggagggatggagaagatagatctcctttgtgttagaatgatggagagaaaattaattagtaaaattacaaaattat

SEQ ID NO: 295176 - DNA, 2750 bp, Cannabis indica
ttttttttaatttttaaaatattcatagtgattaataataataaaaacttgtgggactaattgtagttttttaggtatgttaatataatttatttaattttcaacatgataaaagtaataataattaattagtaattgaaatacacatctaggagggtctgttcccacttttgccaagagtagttgatctggttggagagagagatatacctgttattgctgctggaggcattgtagatgctagtggttatgttgctgctttggcccttggagctcaaggagtctgtttaggcacaaggtatatatctttttcatataaactcaccaattcattttatcatatttacaaatgaatgataaccaatactagagaaaatcgtcatgacattgtgaacacgcaggtttggccctagacatagccttaggcataggccttaggcataggcgggctaggcccgtgcttagggtccactcttttcggggtctaaaataaaaaaataaaaaaataaattattcggcttttattaaagtaaaatttaagtgtattgtaaataataaataggtatagcttagttggttgaggtgtattgtaaacacgtaaattcatttgcattggtttggttagcaatagtttctatagcattggatcttacatttcaagtcatgaccttattgctaattttttcttagatttgttgcaactgaggaaagtaatgctcatcccatttacaagaagaaattagttgaatttgataggaccgagtacaccgatatatttgggcgagcaaggtggcctaatgcaccgcagcgtgttcttgaaacgccttttttcaatgaatggaaatctattcttcctcatgaaaatgaagcaaaccaacctgttttaggtagatcaacaatacatggaaaggtaataataagactagaaattgctatagtaataatttttatgatgagctcatgttgttttggtttcactttttcttgatcttgtaggagagggagattcgtcggcttggaggcactgttccgaattcgacagcaacaggtgacatagaaagtatggccatgtatgctggccaaggtgtaggtctaattaaggagattttaccagctggtgaagttgttaagagactagttgaagatgccaaggttttgatcaagaacaaattcagttagatatatataaatttgtagttgttgaccaaaatgttttgcaaatgagggtaaatttggtgttaggaaatggggtttgctatgtgtgttaaatgtgttagtgtcttggacttttgttttatacaattgtagttgatgttagtaaattgaattataaacctgtgaaataatgctgagcacattattttggtgattaatgacaaatggctaaaggtgtatgtggtgtctcgaacactaaacaagaaacaagttaaacaaagaacaattaacaaagattaagaatgcataaaagagatccacaataaaaaggacataggtgacttaagtggttcaatcacaagtaatccaggagagaagaaaacccttgaggcttgaaactttattgatcaaatgttgtagaaactaaacaatttcagagcttagaaagcaagagaaattgatgaaaacctttatactaactaactaatctcttaactacggaaatacaaaaaaaaaaaaaaaaaaaaagaattaacagctgttgactaactaactaatctcttaactaacagctacttagctaagtgacaactcattaagttgttgtttaacaccgccttcaaatgaaaaggggtggaagttatttttagtttggacttgagatagagaaacctgtctgtagattgagctttagtgagagcataaacaatgtgatcatctgcaagacaaattgaatagacaattctttggccataatgtgattcttgacaatgtgtaaattaatttctatgtgtttggatctagcatggaagacaagattaatagtaagagcaattgcactttgattatcaacacacagagtaggacactactgaaaagagaactgaagtttagataggagagacaccaaccattttatttttgcatcagcattagctaagacactgaattcactctcagtacttgatctggccactacttgttgtttcttagctgaacaagatattagattaccaccaagatacatgacatagtcaccagtaaaccttctatcatctatacaagaggcccatgaacatctgagtaaccctgtagggagatcaaattcttggtgtgaaatgtagtccataaaaaatagtgcctttcagataccttaatagccttgtacaagcctcccaatgaattgtagcaggagcatgaataaactggctaagtttattgatgacgaaagttacaataggccgagtaagggtaatatattgtaaggccccaatagtacttctataaagtgttttgtcttcaaatggttcaccctttgttagagattgtttagtagctgagctagtgagatttggacaactttgggcaccttccatatggagcttgacaagaatatttgtgatatatttgatttgagagagatgcatgccaatagcatctctaaaaatttccactctaaggaaataatgcataggacctaaatcttttaaagaaaatgacttgttcaaatctgagataagttgatgaatgagctgaggattaggacctgtgactaagatgttgttgatgcggttttttgtcaacagatctaagaa

SEQ ID NO: 295177 - DNA, 2425 bp, Cannabis indica
ctaagttgccccagacaaaggagcaatagccggtggtagatctcctgtccgtagaacttccgccccaatcagcatcagtgaagatctccactcttcggctcccattctttgaaaacataattcctttacccgggcttcctttcaagtaatgaagaatccgatgaacagccttggagtgtttttctgatggacaatgcataaactgactaaccaagctcactgcaaacgcaatatctggccttgtatgcgccaaataaattagtttccccaccagcttctgataccggtgcttgtccacagccttagcaccatcttctttttcgagtttctgattcggatcgataggagttgccactggtttacatccgagtaatccagtctctttcaagagatcaaggacatactttctttgcgagataactattccttttgaggatctagccacctccattccgagaaagtatttgagctgtcctagatctttaacttcaaattggttggataagaagttcttcagtgactccaactctactatgtcatctcctgtcatcacaatgtcatctacatacacaattaaaatagcaattttaccatgattgtgtttgtagaacatcgtatgatctgaatgagcttgagtgtaaccatgttgtttcacagttctcgtgaatctttcgaaccatgccctcggagattgtttcagtccatatatggatttctttagcttacatactctgccatccttatttagctcatcaaagcctggtggagcttccatatacacctcctcctctagctcgccgtttaagaacgcgttcttcacatcaaactgtctgagaggccaatccagattagcggctaacgagagaagaacacgtacggtgtttagtttggccacaggcgcgaaggtttcctcatagtcgaggccatatgtctgagtgaagcctcgtgctacgagtcgagccttgtatctctcaaccgagccatcagcatggtattttatggtaaacacccacttgctgcctacacattttttccttcgggtaaagaggtaagatcccacgtgtcattcttcttcagggccttcaactcctcaaagaccgcctctctccatctcggaacctctagagcttcatgtatcgacttaggtagttcattatccataatcctggtggaaaaggctttgaaatctggtgagagcttatgataagatacaaaattggatattggatgttttgtggtacatgatctaacacctttgcgtacggctatgggttcaaagaattctatagaaggttctaaatttggaagagaagtaggagaaagagaagtcgtaccttggacctcggttgagtccgatgattggcccacctcgggagctggtggaatattacttggttgagtcctccttctagaatgaacacgaagttcagtaggtggttccaagttgttttctacctgggtttcacgaggttgtgaatttataggttgtgaaatcctaggattagttacagaaataattggttccactgaactattttcaaccgattttggcaaagatatttgttcccaaaaacttatttcagaatcattctctcccggaattgagtttttctcaaaaaaaggttgtttttcaaaaaaagtgacatccatactcacgtaatattttccagatttaggatcaaaacatttataccctttttgtgttggtgaaaaaccaagaaatatgcatttatgtgcccggggatcaagctttcctctattatggccgtgtatatgaacaaaagcaatgcaaccaaaaattttaggtgttaaatcagtgaatgatctattttcaggaaacatattttttagtgcttgcaaaggagtgatgtaattaagaactcttgtaggcattcgattaatcagataagctgcagttaagagtgcttcattccaaaaacgattaggaacattcatagcaaataataacgccctagacacctctaataaatgcctatttttcctctcagccactccattttgttggggagtatcaacgcaagaactgtgatgaataattcctttttctttcaaaaaatcacctaagattgcattaaaatattctcggccattatcggttctaagaacttgaatattagtatgaaactgagtattaatcaaagagtgaaaatttttgaaaacatttgcggcctcggatttttcctttagaaggtaaatccatgtgactctagtgtgatcatcaatgaatgtgatgaaccatctagaacttgaggcagtttttactcttgaagggccccaaatatcactatgcacgagtgaaaaaggttttgatggcatatacttcaaagaaggataaacagatctatgatgttttgccaactcacaaacttcacaacaaaaagatgaaatgtctttatttttaaaa

SEQ ID NO: 295178 - DNA, 2659 bp, Cannabis indica
attaaatgagaagaataaaatcaaaaactcatataagctaaaaaattaagaaaaagaagattaggaaaaaaactcatataagctgccacataggaatcgtttgtgcattcctttaaatcttcttctatagccacaaatatacaagaataagttgctttggtactgactttgctgaatgttatatttcttctatgaaaaattattgctttgtgaagtggaatttttgtaagatataaataagaattttttttttcaaaaaagttatatatattttaattataaagatcatagtccactaattaaactcactctaataagtcacaaattagtttaagtccactaaaagaaagaaagaagaaagcatttactcatttctctaacgttttcaaatatgcaaactgtagatttatgtataagatctctgagaactatgaaaagaaaaataaaattgcagtacctatcaccaatcaccaatagattatttgttagaaattagaattttttttttccaaaaaagcttaatctatagattatcatataaataattttaatcctacagctattaattagctttgctctaaaaagccacaaattagttttgctcataaaacattattccttaaactaaaaaaaaaaaaaaaaaagtatcaatcctaagtactagagagtataataatttgttaaatatataaaaataattagactgtaaatattttaattaaaaatattaagatgatgccacaaatggtggagcatatatgcatgttaatgttatatcttaaatttatagagatgtaattagctagttaattataaaacttatttatatctatatatgtaatcttattattatattcactaaacatatatagtaatattatatttcatataatctctctttaaatataaaaaggaaccagggtgtttgatcgtatattaattagatctcaaagttgatcatcatgaaccgaatctgttgagtgtattacgaaagggttataaaataacttattaagtgttttaagaaaattctctaaaagaaataattatttacaaaaatataacatttactatttaattttatcaaatgtatatatatatgaattggtgaacggcagtattcaatatcatgttaaatattatatattatgggtacgtaaaatagttttgagtcattcaataatataaagtataatcagttactccaatattcaaaatatatatttataaatatatatagatagcttgtaaggcaggcagtatatagtctaaggatcgaaaaaagatgaatcttctaaaaaaaaaaaaccaccgacactttctattatgtgccagaaattagggattgttattattgggtcagatctagtcttgttgaatccatatatatatgtaagacccttatcacttttttcttctttgttcttcgtatgatgcatgatatatctttatcttctgcactttgaatctcttttgaattctttgcactaagaatatatcgtcaagcctagagactacttactaacattgttaatattaatattccctacgtacgtacatcattatttgaaatggaatatattaatattatgcaatcataactgcacggaaatgattatatatatagctacagtatttattgcatgccctttcttagcccggcctgattccctctatgcaccacgaatatatcttgcccgaaaacagtgtatatatctatacatattacatacaccatatatactatatatatttagcaacctggatctgcatatatatggtagtataaatatattcaaatctttgatctttctctttctatgcttgtgttttaattttttattttttttttgaaagaatgcttgtgctgtgtttaaattagtgatattcttccttaccaaaaaaaactagtgcattcttttgcataagaaaaaaattagtaacaattttttaactataaggattgtgaatatacattgtcaaaaatttatgttaccaaacttattatcttaccattaaaaactcagtacgtatgtgaaattttatttttcaatatgattgggcaaaaatgatttattaatatatatatatgtgtcacatttctattttaaatttaaagttattgaccaagatttttagtaacagaacaaaaaaaaataagagagatttaaagatattaaataagataaaacattacgattttatgcggttataaattgtgtgtttacagcaatgagagttcctttgagatttttattgcatttttgtgaaggaaaatttataaaaatattagaattttagttaatttttacaaaaatattgtcacactgaaatattttcaaaaatactgtatatttataaaataacattagaacacaaaacagaacaactcaaaactagaacaactaaaaacaaaccctagaacaataacgaaaacttaacacaatatagaatatagtgtcttatataattatccctacaaattttgtgatttttttcgtacatatattttttaagtaatagagtactatcacatcaatttttcaaataatcaactgttattatcgaattaattgttttaaaattatgtagtagtcatatatatatatatactaggtgatcgttacgtgccaagtcacgtactgttagttttatttaa

SEQ ID NO: 295179 - DNA, 5216 bp, Cannabis indica
ttttgttcgctaatcttgaattaccttatcatagaccgtgccatttttgctagctttattattgttcggatctgaagtttctttgcaccatctggatttcatgcggctcgctaaccatctagataggtgtgaatcaaaaactcgctagagatatggatctgataccatatcaagaaacatgggatttcatctcaaaaccaaatggtaatgagtaaagtagcctatattcttacatatgactcaatacttttatatttaatcaatgtgaaataatgttcttcaatagtctcattgctcaatatcaagatgaatttgtttatggtagatttatagaccacaatatatggagaatataatttagtacatgaacaaataaaattggaagaatggacaaatgttttttaatctaacaattttaataaaaaactttaactgcctttcaaaaggtacaatttagtgcatgtaaaagctcctgcatgcaagtgaaacatatttagctgtatataactatcatatatatatatatagctatataaatatagcaagctagacacataatcattttatgattttggagatgagaggccaaatatatatcattatactgatgatgtatatacataaacatcattaataaatctgtagaagaaagactaattaatgtccttgacttaagaatcaagataatatccaatccatgaaaaacagtaatttacatgtattaaccagtgattgcttgtggcttgttcaaaaggcaataacaataataataataaataaataaataataataataataataataaacccatataaatattttctcgataataatgtaataagtaattggttttgacttttgtcaacatcgctatccatgcagagcagatcatgcatgacgattgcacgggaatatataccaattaagacaatagttcccaattacaatttgaatttctatataaaaatatcttaattaaatttgggaggccccccaaaccttattaattaattaattaattaagttggtatgcttaatctttgtcattgaaaattgaatctacaaacttataatacacactgctaattatcttataatggtccatctcacttttacctaaacataaccaaaatgatcatgatgcatatatatatatatgcattgcatggactatatatataaatatataagtgtgtatttatgaactaataataactacaaggtctaataagataagacacgtccaactagtaagtagatcaaaacacatgatttgtttataacctgtcggttcccaacaaaactcaaatcaatttttgagaaatttgcatgccaacaaagaaaaatatatagatacatattattaaattatacgagacccgataaaccgaaagtacagattttcttcttattattataagatatatatgtggaatttagaaaggacaagcaaagggtatgcagtagagtcagctaaaaacacattatacatgttataaggagtgtggtgacattaaagccattataaatacacataataataataataatataaatagccatatttatataaaaagtttttctcccattaattttttcttttctttttttgttatttgttgcagtagtcccaattgaatgccacgcggtttcaagagataatattgctaagagctgactttagtatacccttgagttaatgaccttgctgtcaagttttgactctttagttttctctatattttaagtcaaactacccttcttagcctttccccttctttagttttattttttctataaatgaagagtgaacacaaagcaacacaagctagtcatcttaccctttactctcatctcttccacaaactaattttttttttcctctaacaatttttacagtacctgttttttcttttccttgaaaaagccttagtttgtaccactatacatatataaaatagtactatagtggactgaataagaaaaaccaagtgaaatggggagacctccttgttgtgataaagaaggggtcaagaaaggtccttggactccagaagaagatatcattttagtctcttacattcaagaacatggtcctggaaattggagggctgttcctactaatacaggtacaaatatttctatttttttttgtgtgtaaattttttcctaataaaatataaatcctaattattttgattattatcaggtttgcttaggtgtagtaagagttgtaggcttagatggactaattaccttcgaccagggattaaacgtggtaatttcactgacaatgaagagaagatgattatacatcttcaagctcttttgggcaataggtattttatttattttttaaaaaattattatttttttttgttatgaacaaaatgtttatgtgagttttgtttggttataataatggttttagatgggcagctatagcatcatatcttccacaaagaacagataatgatattaaaaactattggaatacttacttgaagaaaaagctgagtaagattcaaaatcaatcatcatcaagagatgatcatgaagaagggttttcatcttcacaaccaagtatgtcaagaggtcaatgggaaagaaggcttcaaactgatattcatttggctaaacaagctctgtctgaggctctgtctcctgaaaagtcaacatctttgactcatcatgatcaaaaaccttcctcttcttcatctgatcagacactttcaaccacaacaacatatgcttcaagcacagaaaacatatcaagattgctcaaaagttggatgagaaatccaccaataaagagatctggtggtaaaacaacaacaacaacaacaacaacaactactacaactacttctagtactaatacaacattaccaaataataatgttgatttgtctgaggcatttgagtctttgtttggttttgagtcatttgagtcttcaaataataattctgatttttctcagtcaccagatcaagatcatgagagtaagcccaatattggtaataatgctcatcaattgccattttcattgcttgagaaatggctttttgatgaaactgttactactacaactactcaaggcaaagaagttgttcttagtgatatgattttagatgaaaatcctaattttttctaattattttatatataataaatatatataaagcttcttccccttctttttgtattattattggtttttaattttgcttacttttggatctacaagactactactaatactactacaatattatcttggaaattgtttgatgaataagctggaaaagtttggtggtggtagttataatttgccttttttttttttaaagcttagaaccaaaagaaaagtgtaaattttcatatattattattaatttgtgttacgagtaattattccttgttgatgatgatgagatttataaacatctctctttttcttttttcatttcattcgatcaaaatatgtgatcttggatcgatggtatgatttaacataatgtattaaagagagatattaatgttgtaatgtagaacaagaagttgaccttattactgtagacacttgtaaagatttacttttttacttcatatatagttaatgcttttatagcttattaagatgagaaattctaaaacacatcaatagtatcacacattccatataatttaataaaaataatatctgtaaaataatagtaattggtccatatagttttaggaatggacagacttaatttatgtgaataaaaacagtgtaacaaagtcaaaatattgcagctgcttaattaaattaagtgtaccagtactgatcagtttataactatagagtattcctcagttttctgttgaaagctcagtgagtgagtattgagtatataaatataaaatatatgagacgattgtccataaatatttaatgagaaattgatgtctatctactcccctacaaaaatgataataaagttaaaaccttcacctattatatatatatgtataaatatatatataacattatatatatgtggatcatcatgtggccttagttaaattgagacataaatgctagattattttatttttcattaatttaaacttaaatttttcccattgtttagatataaatatatattaaatataaatagagatcacaaaattcatggaagccattattcatgatcatcaacaagagtaatgttagctattgtaacttttttcgctctcgtgggacaacttataatcatatatatatatttatatatttaaatattaatattgatagttagatcgtatgaaacttaacacatgttttcctttattattgttataataaatgagatataatttgtggcctaggaataatttacaatgtacagcttagaccaagctatagtgtgaagctttttaggtttttgttgataaatttcaccataaattataaagtaaaaagataccaaaaagggtagagaggattcttaatatagcttttcactcagaagtagtgaagccattgtttcagatgaaactttagttagtgatatctgtcataacaactaaggttcacaggatactctttattgtattcaagcctttgatttaattcatcttctctttctctctcataataatattcacaagttcattgggaaaaaaaagctataaatattgtataataaattcaagagaaacgttaaaagttattagtggtttctagcattcctcgttatcatattgttatttatgttagctaatcgtaggagaccacttttaggaggtattaggtactactagtacccaatagcaacgctttaaaatcaaggctggccctgagtaataatgggcccaatttttctttttgtgtcatatataaagtaaagtgtaagtattattgagtctttttttataaaattttacaaaaaatatcatttctttaatgtaaaaaagtatattatagaaaaaatttgggttttgggtttgggtgggccctaggcacgggcctagcctaccgtagcccaaggtccaacctatctaaaattaaaaagcattactattgggcagcagtggtgcccagcactttctagctttacaattggttaatgatatttcttaaaagttatgggaaacttacaaaaatactggaatttaggttactttttacaaaaatactgtcacacggaaaagttttcaaaaatactg

SEQ ID NO: 295180 - DNA, 2162 bp, Cannabis indica
ggcataaaacccaacaggtacaaggttactcgcactttatacttaacttttaagataatttgggattcacaccttttatgtttttgtagtttttgaacactatatccttcaagtatatttataaacatatttctaatttatatgtggtgtatgcgttttatgctattacaaatgcaactttgtgcatctattatttagcattttatatgatcattattgcagtttagtgcgatctttattgatgcgatttgttgttatagctcggtgcaaattattgctcatgttatttattataatttaaatagaattactatgtaataactacaaaaatgataaaagaaattaaaaattatgcaacaacgtgagtaatcactatgttttattagtaatactaaggatacatacatcctccatatgtttaggtaattaaaaaactaaaattgactaagtatatacatgggagtaataatgataataaaacttcagatgcaacgtattgtacgcggttgataggttgcatactttacttgagcttgatcacatttttcttccaataaatctagttgaagaagttaccctagcgcattgtcctcgatgttgaaaacaccatgatgaagggaaccaacacctactttaacagtgaccaaggcttcacacccataagaaagcaagaagagggttttgccaatgtttgatctttgtttggtattgtacgaccatgatacctatggtaattcttttagccatacacattttcattcttcaagttttcctttaatggtatgcttgattatcttgttgagtgcttcagtttgcccgttactttgaggatatgtgactacaaaaaaaagctttttgtatccccaagtcatcgcacaatgaacgcatttctttacagtcgaaatgcttaccattgtttgaaattagtttgtagggtatgtaaaatctgcatattatcttttgaaatacaaactcgtagagctttgtaattgtgatggtggcgagtgactctactttggcctatttggtaaaataatccactgcgacaactacatacttgactcctctcttgccttttggcagttcgctaattaaatctatgcctagattgcaaatggccatgggatgatgatggagtttagattgcttggtgagctattgaaaaatgtagtagtgcgcggacatttattgcatctcttagcaaaacttatcgcatctgctcgtagtgttggccaatagtacccttgtcgcataatctttagggccaaggaccgctaattccccaatgcacctcacgaaggttgtatttgcattcatcaccattgatgcactttagaagcagttgattaaaacttctacaatatagtttgtcgtcatagataatacatcaagcaactttatagcgtaatcttttggcttcaagcttatcagggagtttgccagttttcaaatagttgacgatcaaagtcatccatgtaattcgctcgacaacatctattttcataacttcttctcgattgatggtgtatttaatgagtatatcgacatgaattatgtcaagtaatttgacttcttgagttaaggccaattgcgacaaagcatctgcataggagttgcaagcacggggtattcaattgataataattttcctaaatttagataacaaatcacaagtataggcgaggtacttggctaatcgcccacctcgagctaagtattctccattgacttaggagaccatgatttaagagtcattgaatgctttgagatattcgaatttcattacaagtgcaagttttagtcctacaatcaaagcttcatacttgaattcactgttagaggcatcaaaacgaaaccttaaagccgcatgaactttaaacttatttaggttgattaacataattcctcatcttgaccctttgctgtttaaggccccatcaacatacaaggtctaacctgcaccttctagtacatctaggttgactcgctcttcagtaatggtagctacctctgttgggaatatttttccaggatctagatttactaataagtatgtttcattaacatcctaaatatgaatttttctaataagatgaaattaaacacataagagttttagaaaaccttacattgattgcagcggaataatatgactctttctg

SEQ ID NO: 295181 - DNA, 4269 bp, Cannabis indica
aggttcaggagctttatgattgtccatggcaaagagagttatacggatttcctcattagaaggggccaagaaaagcacctcctgatcctcacgtgagatcctctcatgaaataattaactggatctaaagtcctggccctgatcggacccagagaagatccattggaagaaatcaacaaattcatgaccaattgactcacggctagagatccattcattatccttattgaataaactctcaatagcgtttctccttcctgaaaaacttagaacatttatccccgtctttaatccaagaaatcattgccctttgtttctagtataaagcttttctttctaaagcctcgttcagagatctctgaaatctacattcaatatcttaattccgagcaccagccggtaagctttgtaaaaaattaagttgtttctctatatcaataatggtagtatccagcttaccatttgagatctacgccagttaagaagagaaacccgagtagcaccaagcttcttgaaaactcgaacggatgcccaagggtgaacaactgatttccaggcatgagcaaccactagcctgcttctatcatccctcatccaaccttttaaagcactttttaaacttggtagtcaggccatcagtgtaaagtcatagaggtctatgatcagaattacaagtctgggtagagcaaaaagttgctctcggaaataaattaagcaattccacgttggataaacccttatccagcgccaatttaacatggttcctcccagaacagtgactatcccaggtaaacttatcgtcctgaataggcatattaataagcatccgagcatccacaagacttgagaggaaaggaataaatgggtactttccagacgatccttctctttccgaagcactaagaacaaaattagtatcaccgaatatcaaccacgggccaccaaatctatctccaatcttcattagctaaacccaaaaaatcttcttaggggccataaacacaagagagaaggcaagggtgggacggaggatccgagtaaacaagaccaaatatatgattacgagagcaggaaacacactcaaaactaaaaccatttcttccaggcaaagatgataccaccagcagcacccagacccgacacataaatattaaaataaaagtggagagatttgagtatatgtaccagcagagcggcatccactttgagcttagatagaaagacaaaatctggggaccacaatctgaccagggacttcaactcacgaactgtagaggtctgccttaaccctctacagttccaagcaaggcctctcatggctcacgtggaggagttctgacaatctcctccatagggttatgagagtaaacagacacactagagccagagtcctcaataaaaaaagatccaatcagcgggttctttaaattaccatcaataagactcaaggattctgagttatcttctgagggttcttcaaaggccaccttggacattcgatccttctccttagagtcccatgggaaatcacaaataacaccggggtgcatccgaaaaatcttcggaggtctttcactaaaagaggaagagggctcatttaatttttatttcttgaaaggagtagttcttccactgatttcagaagttggcttgacacaaatatatcctcccaaggcccgagtctcataaaaatccaagctcccaaattgttttagttcttttaggaatgtttcttgagcttggagaaattagataaagctctattctaatcttgaagaacttgggcctcctgaccacaaacaatgttgctctcgggcccattaatattagatctctcaatccgtttctccaagtgcatgtgttcacgagccatatcaggcccacccacaaattgaatatcctccacatgcccaaggcccacaggatccaaatcctgcttctcgcccaattgttacactctctcgggcccatcattaaccaacaataaatgacttggcccatgttgagaaagaaccgacccaataagtccaagccctatatccttaattttgtcaatatgtccactcacatttgaatccaacggctcattcaacacacggtcagagggctttgtcttctccaaaataggtaaaacaacaggagacttttcttgaacaagacaactagcatcaacgccattaccagaagcagtaatggccaaaacacgagaagcaggcctcggcttaggtctccaaaaagtattctgacttttaccctacccaacgagcgttcgagaggtcaccatcctcccacactttgaaccttaagcctgcttagagattgaacgcaaggatccatcacccacctcgaccccaactgtcggtgagacacgagggagtttttgcatgatgcccggagacacagtcgatgcctcacaatgagaaacggctttggcactagtaaaaacatcataatacgatgaagcagggggaaaatccagggtccgtataggggaaaagggactccaacaccattttgcaccgttaccggagatgttaaagtacagccacgacgttggtggcccaaacaactgcaattatagtagaagatgccaattttttcaaacttaaactgaagccagcgtttattgcctgaaattaaatcaaagaagtaccccgaagcaagcggtttatcaagtttgatatcaactactctgagaaacttgttccacgttgctagtttgtcttcctccaagtccactttcaccgcctttccagcaagggcacccaagagatttccattagcaatggagaattattcatgagggagattatgtatttgcatccacagtcttaaagatacaaacgagacatatcctgaaatgcttggagtccaaacctggaggacaagagaacagcctctaatgcaccaagggccattctctagggcccaacatctatcctcatcactactgaacccaaacttgaaacagttagagagtaaaaagtcattagccaaaagtaccacagatactggttttttttttctagatttttgccacaaactcagagaccgtggcttcatccacaggcatggagccaccaccttaccatacaagcaaagtgaagacagagctttaagagaagaggcacacggggacaaggaaaccgatgcctcaaagccagaaaagcacttgcctttaagaggggagttggtagcatttactaactccataaacaacccaacaggaagggacaaaaaacacaccaaccacttccaaaaaaaacacacagacacaacaataaacacaccaaagataaagcaaaaagaccacccacccacactgtaacacgacacagagaaaaaaaggaaaacacatcaaaaagacacaaaaaatgaagggaaaagagagtatcaaaagaggcagagaaagatagaaagcacaaaggagagtaaaagaagattactagcaggaacgagtagagttaaaagttgaagaagaaaacaaaactaggaaagaggaatagtaaatgaccattcttcccatgacactataggcacatgtacaaataactaagcctctgcaacccatttggttggtggaaataactagcccttcaatcatcattgatttgattacgacgaccttgataatactacatttaggttcattatatttatttatttcttctttaaaaaactctgagaaaggtgaacaaaaactaaaataagatacaaaaatatttaaccatttttctttattttattaattttgaactaaatcaccactcattaggctcacatgttcgaactaataaaaataaaaaaatacggttatatatattatttcaatctcattcttctaatttaccatatagtagtggtacatagacttagaaactgaaaaaagggagtgtgatagggacagttaaggtgcttagcttgtggtcggaggaggttgggttttcgaatgagattggacttggtggggtagtcgaagtaggtatcaatagaggggagagcgagaaacaattattaaaaaaaaaagtattatcttgataaattagttttattattaaataaagtataattggatagaataattaaataaagtataattaaagaaaaaattttcaatactatgttttaaaatcattattcataggtaaaatacataaggaaagaattattattttttttagaaaataaaactaaaaattaagataacttaccaaagtaattttatttttttaataattaataataagaatcaaaattagtctattaaaa

SEQ ID NO: 295182 - DNA, 1850 bp, Cannabis indica
aaaattttaatataataacaaatatactaattaatcatcaagttattatattgaattgtatctaaaaaataatacactatacacataaattataaatatttgttctatatagaaattttttaaaattatattaatgtggtacagttttaaccacaattattaaatttaaaactttaaatcgcactgcatcgtgaagtttaataaaatagcaaaccatatcccactataaaaaattttaaattatattttttatacagtataatacagtgcaagtaatttatacgctctagacaagttgatgaacacctagtgagttcttacaggatgagaaaacgttaattattaattcaatattaatgtattcaaacaaaattaatagtttgattatttgtattattgttgtcattaatactttttttttgacgtagtgataagaatcacaaatgaatttacgatataattatctacaagtcattaatatttatataatcttaaaatcttaaaattaattgacagggaatggtgattctaactctatcggtttcaattccatcgctaaaaccccctccttgcctagaccctaacttgaacaattgcaagaaggcttctaccttacaactagcagtgttttacggcgcgctctacacactagccctaggaactggcggcaccaaaccgaacatttcgacgattggggccgaccaattcgacgatttccatccaaaggagaagaagcaaaagctttccttcttcaattggtggatgtttagcatcttctttggtacattttttgctaacacagttcttgtttggttacaagataatattggttggacacttggatatgctctcccaactcttgggcttgctatttctattggcatatttttggctggtacaccattctatagacataaagttccaacaggaagcccatttgtgaaaatggcccaagtcattatagctgccatgaggaaatggaaggtaccaattcctcatgatcttaatgaactttatgagcttgatttggaagtgtatgaaaagaaggggaagtatagaattgatcccacaccatccttaaggttagcatatatgtacaatagtataatttatattatatttatacattcatataactaattatagagtagactatggggttcttatttgatcaagtttaaaaggagacctttctctatgtataaacaataaaatgtaatttaacaagaaatactacaccactataaaaattctacttttaccgacaataaaacttattaataaaagtaaaaaaaaaatgtaattaattataaaacattattcttatattgtgatttaaatgttcatgtgtaaaggtataattacaaaaattataattttttgtgactaatgtatttttttttacaataattattgcgactaaacttaaaataatgacaatttgtatataaatactgttttaatcataaataattttttactgtgactaaacatatttagtaacaaaaaatttatattttaactaaaaattgatcaataaaagtatcttttttttaatgaatttatgagtaataatgtatatacatacaaaattttacacatcaatctgattaataattgggattttttatttttacacttcaaaagagtttattttacatttttacggaattctacattgaaacctttattgcaactagggctgcaacctaaagtgcaacaaataaaaatcgtatagaatctcctattgcaactagcgttgcaaccactttaaaaactcaaaccgtaaatttgaaaaaaaaaaaattaaaaaaacagtatataaagtaatttccctaaataatttcaac

SEQ ID NO: 295183 - DNA, 4532 bp, Cannabis indica
agataggtatgataaaccttcaactggagacattctaaattcctattctttctccagtgttaggaccttttcccctctccgtaaacctccacagaaaagtaagcaaataaggcaagttaatttttatgtttttttttctctctgagttgcaatgctgacaccaactgtcgctacgcgtagctgctgacttcacaaactctgttgttgctgcgacacataagacagtggtcgcgacgcaaaatattgattttgcactagatttcttcttttgtcctcaatgtttcttgcatatgactttttcttgttctaaaattattgattgtattaacactacaaaattattaacaatcaataatttcttaggtattatagtgttaatacacagcatcgaattccccaagcttagcggtttgctggtctcaagcaaacaaaactaaaaacaaacaattaactcgttcaacaaacatgccttaaagattccataatgtatatagtgaaagatcaagcaaatgctacaatagcgagaatattgcttcataaactttcctcaacaatcctgctaaattccttaaatgtgtatgtgtaataaattttaggaaacgacatgatatataaaggtgcatttccctcaatgtacagaagtagaaaagagaattaaaggtaacaagagaggagaatgattgacctgaacgaggatacgaccatcgctagtttcccgcttgctttgatgcgcatgagatggtgggacagttggcggcattgtgtacccaaactgaagatgtgcgcacaaaggtgcttgtggtggtttggttgggaaatgaagccctgttttcttttagaaagcatgatgatattgtgacctgcaaggttagtgtcacaacgcttagccattaacttggaaagcttagcaatttttgccaggtcttcgtggcatcaaacactataatgctggttcgtattttgatgtcacggcgcctttaggtgaacttgtcatgacgcctaagcttgaaatggttttttttggtacttttgtttccatttttttaacaaagcaaaaaattaaacaaggaaattatagaacaaaaccttagattggcggcttaatttaatccttgacctgacgttttcttcagaattcttaagctattccttaataccatcaatgaaccagcccaatgcaccaatgacccgggtctgattcttggcaacaatgctaaaaacttatgcatgttttaaacagcgcaagtgcacgttatcacaataagtaataaagtgttgagtaccactctctcatcaccaaaagttgttaagtactaaaattgtttcttctcgctcttttccaagtaatcaaagcaaaatgagtgaaacattatttcaagcttaaatcaacactgctcgttgcgaagcttagctgctaatttcacaaactctattggcgtcacgacaaaagacagcctttgcgttgctgaacgctgattttgcaatcgtttttttctttgttcctcaatttttcttgcatttcatttgcttgctccaatgactccaaacaacaaaacacaattaaatttaagtaaaacaaactacaaaacattaacaaagaataaattctaaagtacttgatagtgttaacatacggtatcatgcaccaactagtcagttccgcccaaattatctgtccatagtgattttccaattagcgaatgtgtttctaatgcaactgtcgttatcagtcattttctgtgtggaaaaatattgcttggcccgaacaatccaattggcagcttcccctctgtcaaatcttgacgtttgtcgtgttaagagtacattggaagttgctatcagcaccaaagatcgttggctccattcccacttgatatacccaaagctaagctaatgagcgtatgaaagtacacgacaatgagaagaaccaggcagatctggaatgtcatagaatatacaaaacgataagaacacactagaataatgaagtattagagagactaaatctccctagagcaaatctatacaaaatcaacatcaacatgtgcttagctttctttatatatatatatacatgtatactacccgtgttactacaattatccacaattaaccgtgtaccctctactacatttattctctcagtttcccactttaccactctataggtgtctattaaattaatgttcatcgtgtagacatttagtttgatatgattctttgttccttgaattccgcttcttaatttcaggcttacaatttatctagagatcacaaaccagatctagaggttgagaaggaaagaattttgaaagctggtggtttcatccatgctggtcgggttaatggctctttaaatcttgcaagagctataggtatgcatcaccatgccacttaaggcatatacatgcgtgctagcaaatttaagtgaccgcaagtacacaccctttagtagatatatatctgcagtggaagcatattcttcctttgtcttcatgctctgattattttctctataaacttcaggggatatggaattcaagcagaacaaatttttgcctgctgaaaagcaaattgtaactgccagcccagatataaacacagtatgtatacatgtacacattttaatcaaatatgctgtttatgaaatctttcctctggttttaatattttaattcttgatgttgagttaggtcgagctatgtgatgatgatgaattcctggtgcttgcctgtgatggtatctggtgtgtgctgttctctctttctttaaatttagctttagtctcacactctactagaactttggcgctgattgtgaatttagtttgatggtgtccctttgttggctatggctatgttggaacttgaaagttctgaaatcatttaaaatacaattgatgctcacaacaatatgaaagataaaagatgatcccgaccggaagttaagtttcaagaaaataatacaattaatgactagtgcgtttgttaattgcttccagggattgcttgacaagccaacaacttgtagatcttattcatgaacagcttcagttggtaagttattctagaatccagtgctcaacatagaaatcaagttagtctatactcaactcttctttctgttatttggaggcaacatatagaagaaatgagtggtgtacctgcactagcaaaaaaacttttaattataatatttttccctatgcattacaaaaatgcagctgatttcactccctctcttaatctaacgtcagtgaataaaccagacttcaatctcagaatcctgacaagctactttttattaaagcaatttaagactcttaatatttcaaatgtgaataagttcgttcttttaatatttatgtgaatatttccgaattatcattaaatgaatgcaggaaagcaagctctctgcagtatgtgagaaagtgcttgacagatgcttggcaccgtcaacagtcaatggtgaggggtgtgataacatgaccatgatcttggtgcaattcaagaaaccgacacagcccggttcatctgccaacgagcagcaatgttcatcatctaaagtggctgaaaatgactcgaaacaagctgaagcctgagtcaggcaaaagagttggatggatatttgattggattatattttctaattactgagtccatttattcgagaaagctggtttgaagtttacaacaacctctctccatgtatacatgttggcctctctctgttgtgtaattgtagatggtgcagcatgtaagtgtttgattagccacccaataggaaaagggtacgtttttgtgctcttttgtgtgtatttagtcttgaaaatagaagtaaaaacatctggggctcggcttgaacatctctgtacagctgatatacttagctccattagtctttttgcttaattacggcatgttgtgacataatagattttaacttttatttttttgtttgtgtagaaacctaagccatcactacattcatttcaaataatttttcagcttgtttttgccttatataagccaactccgtgtgcatgagtttgcagttatgtatatataggtattaggaaaatttgagttttgattcttaattttgccatctaactaaaataaatctttcgtttttatattatgagggtcggttgttccatctggccgagatagataaaaaagaacttacaaaaatattgtaaaatttgagaaagtttacaaaaatattgggacccagagatttttaacttttactgtaccaagtttataaaatactgtgttaaagttttaaaattataaaaataccgtatttcaataaaatagaaaaataactcaaaaacaactaagacaactaaaaaataattgtataacaacttaacaaacaacatgaaaataactataaaacaataaaaagataattacaaagccatagaaaaataaccaaacattgacctaattacaataagtaaaataaaattaacttctcaatatgtttttgtattacaatattttttatttagttttgacaacttg

SEQ ID NO: 295184 - DNA, 4153 bp, Cannabis indica
ttgtggcaatatagaccaacatctattgcaaattagtgtgccttggttaggttgatgcattcttatctgattataccatgaataggcattcataaagcttaggatttaatggtcagtgttgtatttaaaagtcgatcgattcttagaagtggaaaacagtctttagggcatgccttgttgaggtcaataaaatttatacacactcaccattttttttggcttgggtactagtacaagattagctacctaggctgggtaaaaggctacaattattagtctatttagttggagcctttctacctcctctctcactgcttgtgcacgttcattgtccaacaatctccttttctgcttgacgggatgatagcttggataaatgttaagggcatgagacatggccgttggatcgatcccagccatgtcttcatgtcaccaggcaaaaatattgaggttttctcttagaaattttattaaacctaattttacttcaagcaacaaacctttatcaattttgagcttcctagtcaccatggtgggatcaacttcaactttttctagttcttctatcagcccaatatttgtgtttggttccccaaggagagggtccatatcttcatccccgccttgagtatattcttattaggcaatgcttttatccttctctaaactctggtcgaaattatcttcctttttggccttagataaaggaaggctataacactcccacacagttctttagttttctttcagacatatatgtgaaatactgaggtgatggcctttaagtcatataaggatggtcggcctaacattacattgaaaggagaagaaacgtcgatcactaagaattgagccataactgttgtgcttgttggaacttgtcctgctgtaaatggtaagcaaatctgtctgactggagcaatactttggccgaagaattcatatactagctaagtgcaaggaaccagatctttaagttgaagcctcatattttcatatgttgttttaaatgaaatacttgagggagctccattatcaaccattgtctgagccgccattttatttataatttaaacatcaatgacgagagggtcgttgtgtggataaataacgtggtcagaatctgcttcgttgaaatatatgattggttctccagcacatgactacttagactttctttcctttacggctagaactgcttttgtcttttcatactgtaagccccaagcatacttctctctagctttgcccaagtctccaacaaggcgggggcttccaatgataacctgaagatgtccgtccactggtggaagcatcaattggttttgagtgttatctagttgggtgaccctttgctcctaatcggtcttgatatacttttaaaaatgaggattgtttttcctaatgaggaattctatttctcgcttcaagttattatatttattagtgctgtgaccgtagtccgcatgaatacgacagaacttggtggtatctcatgccttttttcgtgggaggaggtttttcacatggcaccacaaactgagtagttacgaagattgtctctttatcttttgttaggatagtccatgtagtgaactttaaggcattcttctaaggttgctgtttggagtttctattgaacctgctaagtggcctgggataggagtgtttgctaactcgagtctactgagtgtgtttagctagtcgttcttctagcccgtggtgtggcccaagaggaatgtaagcatttggcactggctcttggccagtgacctggtaggctctcctgatcagcacgacatcttgctcgaattaatttcaatcgttgctttttgaggtctcatgatctccatctcttgatctcgccattcttcaaactggagtctttgtttggcaaaggcaaaatttatggctgctctagtatcttgttgatcatgatgaagagtgttattgtggccttgaatttaccccaatgcagctcataagttctatagctcggtatcatcactggttggcctttgagaattggtagtagatgagatctcagtacaagggtggtttgttcgatcacaatactagtagttccagtttcttgcacaccaggagtgaacccagccagagaggttttcactccttcgcctacagtttgtgggcctattgatggctgaggattgatcaaggcaggttttgtcctgactgaatctcttaggtttgcaggcgtctgcacatttggattcgcagccattggattagttgtatcagtctgatttcccctccatgtctgcagaaccgtcacgtgtcctaaaaaagacttaagataaagacttgtgtttctttgctctcaatgaaagtactaaaatattaacctcgcttctaaccgataaaagtgagttaaattaaagcgattgagaataaattaaataacaaaatataaataacataaagcaaggaaaacacaagatgtatagaggttcgatcccttatagttggtaatagcctactcccatttgattgtattaacttgtggaaaagagtgaacaagaatgatatgatctctctcaaaatctcttacaatgaactctaagtaatttactcttaaattgagtattctctcttgaatgttctctctctgaataaacttcgtatccctgaatagtgagatgagtccactatttatagggattaattacatgaaattagtttccctaaatcaataacaaataaaatagaaaagtagtttaatttctataattacaataagaaaagtaggaaacttaggctgattgccttccttctctaaaggtttgaatttattgcatgaatgtagggtttatgttgtgacgtgcaattgcaagctcggaaatatacaagatatatccgtgaaatgcccactcgcattgtctggtcggtgcatgcgaacaacctgtgtgatggaagctgttcagatgtagattcttacactgcttaaatatcacaacttttgtctatgagcttaaaaatcaattcttcctttgcagttcactaagagtagatcatccgttcacgttatgaaatgtactccacgtgttgcctaaatggatgccacatcattgtgcaaaaatttggataataattattcttgcgcccatttgatgaataaactggcgatgttggtggggtgtgaaaattagtctaatgttatctacttgcgggaaaaaaattgaaaaattttacttctcaaatgttgatcattatttatggatatatgaatacaatagttttagttttttccctttaatttttaaaatcatttcttttaatttcaaaattttatagtgtctttagattatcaaaagagatattagtggtaaaactacatacactctatgattagtgacacttaaccacacatatcgattttttggtggtgaaaatctccaaaccttacttttgttaactatttacccatttcgttcaaaaggctttgttaagtgccacagtggacataccacagtgtatacgcaaaaattttttagagggggatattagcggcaaaattacatgaactctatgattagtaacaatcaaccacatagatcgatttttcagtagtaaaaccctctaaacctcacttatgttggctattaccccttcctttcaaaaggctctgttaagtggtttacgaatggaaccatcagatctccccttcccttgttccttcttcttctgcgacaaacccactagaccatgataaacctaaggacaaacaaggaaacccagtgaacccctccaattgcaggtttatcagtgaagagttgcgggagtgggagaatcagatccggcaaggtcgagatgagaaaaagaaacttcaaaaaagggttggttctcggggcttagaaggaggtttaagggttaagtttgtaaggttaggaagtcagttttggggttcgtttcggttgaaggtgactggaggtgacttggcggagctgtatgagaaggagactggaagagagagggagtgctgctgtgatattttgcacacgtaagtgtacgtatcgttacaagtagtaaactcaccaagagtgaggtcgatcccacagggattgtagttaagtacattaaaattaactttacttctattggttaaataaaattaagagagaattaaaaataa

SEQ ID NO: 295185 - DNA, 5046 bp, Cannabis indica
aagttcagggaaaaaaattactaattaatcttatatttttaagtaattatttattataatacttaacaaaaattaaattagcttcgactatattacctagtactcattatacataccacacatgatatataacgtacgtgtacagtattcgtaatgtaacatcatatttggcgatattattgtagttagtacagttagaaaataagaaagtatctgttgttttgttttaaatgtagagagaggtcgtcgatgacttgacataaagaagcgaacatttgtcaccattcatttggaagagcacctagttttgatggcatataatctgaaccgaacacgtggccacttacgattgctttgtaagctctctttctctctctctatagtcctcgatacgaattcttgttaagcagggcagggcagggcagggcaagggcaagggcctagccacccatatccccatatgcatctatatatatatgtatcatttttttgcagaaacagcgggcgcggactgtgtgaagcaaaaaccaaaaccacttaattggattgatctcttaaatagaaaaatttagagagagtacgtggtatttcattttggaattggaccccatccacatcaaaatattgaacactacacgcacttttgttttatgttgcctataattaaacttacatgtattatgtctctatttaagtacatgcagttccattttcaaaaaaaaaaagtacacagttcatttcgattctttttttctgaggctgaccgacgttgacgtttatatgtctctttatctcgatacatatatattaatacgaaatattagggtaagatttcggtattgtgcactttgaaaatgcattattattttaatttttgcctatgagatagaggttcattgtaatcacagattattcacagtgagctagcttcttgctggttaagcatgattccaaacttctagtacaactatcaatgcacataattatgttctttcaacatgtttttaacaatataaatgaattataatatttaaaaatatatatgggagtttgtataatattagtatgtgcatttacaactacttcaaaaaactacctttacttatcaatgtgaatcaaaattttcgttaaccaataactaaatcttaaagtaatatcgaggattgtagaggaggaagagaaatcttaaagtaataaataataataataaatggtaagaagatttttaaggtggttaagtttatttttcatacttcatcactacacaaaacatctagttatagtaacaactttttagtcacaacataaattttttgtaactaaatttgactcaaaaagttaattgtgactaaaacatattattgagatacaaattgtcaataatttagttttagtcacaacaagtattgtgactaaaaatacagtcacatataaattgtaattttggtaactaatatctttaatcacggactttttagtcacaacacaataataatgattataattagctacgactttttttatctttagtcacatattttgttgtgactagaagtaagattttttgtagtgcgagtccatcttattatgtgattttataaattgtatacaaaatataagaaaatatttgtatgattctcgtttcttctccaattggtcgatgttgccccggttttctcccaatatacgtggtaattccatgacatgacatatggcagattaagcttaaggatctagagatagttgagggagaatattacccaggtaggggattccatgacatgacctaacactccctcttggagccatagctaggtctggagggatcaatctttttttacctctgggagctaggttgcatccagctcctttaggctcaagatactggatgtgaactatcaattagcatttaatgcaatatggaggatatgtctacgaacaaatatgaaaagatgtgtcaaacgcattaaacctattttttaacaattacgcacaaatcgaggatgtaagtgatgactacataattactatcacatcaatcaaggaagaataagggcttatctagcctaaaccccacgcatcctactagtaggggcacatgccctacttcgtcgatttgggaacttgtgcatggctaagggggacacttaagacaatagaggcctttttcccctccaaaaaaactgctataaatacccccaaccacatttgtaatggggatgtaaaaaagaaagaggagggcagaatattctctgtaagaaatacctacatgttaaatatcagagactcgtggattaagactcattaatgccccaatcacgtaaaaatatttacttttactcccttcaaatcattcttagtgcattaatgattcagttgccgaaaaataacgatcaatattttggtaatttcattgagagttgtaaaaagctttacttacaaacaataatataagaagatttagagtacaatggtggagactagaaaccatacacgtcagcctcgtcccccctagggtctcaaagaattgggggacgaagaagcagcttcacgagtagacgtagaggtagaagaacaagacgaaacaattgatgtggagtatgaggaaaaccaagaagagtatgacgcctatgatgatggcaattacaattattggccctgaggcaaagaactgctgatcacgaagccgacctagcaacatagaaagagcaaaataggaaaatacaagagataatggctgccatgcagaaggctatggagacggtagggattctcgtgcacccaaaagctatgcctcacggacaaggcaaaacaagacaagaatcttcaccaagtaccaaaagacataaaagtcaggaaccaagccctatccggtatcccttaaaaggttatcccaagaaaaatcccacatctttcctaaaaaagaacaataagggtcaggatccgcgaagagtctgctccaaattctcaaaggaaaaaggtccgtagagggacaggctccctaatgacaacattggccctcaggaccgggatgaccaaaaaagcgtatccgtacatcaagagcctggagaaagaggaaggaaaaactacaaacaccccctattgatttaagacaaaagctcaacgataggcacggtgacctcatgaatcacttggagaaaaataaacaagcaatgacaataactatattaatacaatcccaacattacaaatattcggtatttgaaaattatttttgaagcctttacgttttacaattattattagtcatatgtaaatttaaattaattaatattaatacttaaaatatgataatcaatataatgatttagtgttgaaaaatattatatttttttataagagttatatgttcatagaaatcaattataaaatttatttattgttttattattaatataaatttcaattaaattgtataaatataccaaatataatataaactctttttttttttttttttttgttaaattcagcaagaaatttattattttaaataaaaattttacatcttaataggattttcaatataaagacctaaagaatcatcatttatacattatattgattgttaaagagaaaagctccctatttttattttctcatttgttattttttttctttcttacatcttagaaaacttacagtagtactatgctaacacttttataccaaacacaactaattctttattaacttcctctttgatcctacacaccacttgatcttcctttctcacaaccaaattctatagagtatcatttctagcatgtcaaatatgatatactagagctgcagtagcagcaggtagaacttgcttgctaaacttgtcgaattttgcatgttcaatcgccctcatgagtttgcacaatgagctcatcaattcagctccccaacatagccagtatttcacctattttagacaaaccagagagaaggaacaagtaaagaaaagatgctccattgtttccggttgagacttgttgaaaagacaatgatcttcatcgataatgttgtgtttctgcagcctctcccttgttcataacttgtcatgaatagatatctacaagacaaagctatgtcttggaatattgagtctaccccatacttcttgacttcaattgaccttattttgaaaagggtagaggagctagtaaccattataaattaggtatcaatcattagtgaattgttgaacttcaataagacttttgatttgatttttgacaaaaagcaacattctccaatacttgcttccatgtgcaggagcttgataactcacaaatcttctctattgatgtagacacaatgaatccatctaatctacaagttatcttatttgtttataattgcccaaacatacttagtaatggctgttgtattcctttctgcaagtctcttaaaatcaattctccctgatgccttagatcgacaaacggtatgccataatgtaggtcctaatccttgaaacatatgttggcccttccatagataagctcaaaaaatagcttatatacccttgagtaatttctttggtaagatcatgatttggctccaatatgaatgaatggacatcaatattgaattaataagttgtgagaactccatgcttttattctatttgttattttgtcagctagaatattacattccttgcttgaaatttaattggcacgaattggaatgcctaagtatttgaatggtacctctttcttgcaaaagcctaaaatatcaataacacgttggatttcactgtccttcattccacagcaatagattgctgactttgaaggattaggttataatccagaagaataggaaaataacttcaagccttacaaaatataatatacttttgaaatcacaatgaaaaataaaatatcatcattttcaaacatcaaatgatttagtttcaactccacacacctgtcttggaatttgaatctggtttggctcctatacattgcatgattctagacagatactctaaatataaattttaatttaatatttataaaattatatcct

SEQ ID NO: 295186 - DNA, 4044 bp, Cannabis indica
gaggaactcttcggctttgttcttattcgactgtcctcatgcctacccttgttaattacagtggtacgtttcttgggttttctttcttttttttttttttttttttttcttttttttatgattttcttgatttgggttttttcttttggtatatatgatgatgatcatgctagttttattcaatgatttttggattgttcatagttttgaatatgtgataggggcatatgcttagaatatttttagatcggattaaattctctgatatctaatcatttgaaattagctataagaaatctgatcctgtatatatgtatatttattttctttgggaggtgggagggtgggaaggctatgattttaggtctatgagttgttaattctggttaaattttttatggcagaatatttagaatagaattagatcaggaaaaaactaatcatgaaaagaactgtgactgatattagattgctattgggttcaggtgatgatgaattttactctgggagctcttgttacccaaaccaggggctgtttggttcctatgttgatgtgtattgtccccctagcaagagagcacggatcagtgccccattttccttcgaagggagcttcttggagcaggtttcaaagccctccattgaagtactccccgatgagtgcctttttgagatcctaaggcgcctgcaaggcggtaaagagaggagttcctgtgcttgtgtttcaaggaaatggctttcaatgttgaccagtatccgcagaattgagatgccatcaaagttagagaatgaagtggtttcctctagtgacattgatatgatcagttctgatgaagatcaagagcttaaaagtgatggatatcttacaaggtgtgtggtgggaaagaaagcaactgatactcgactagctgccatttcagttggaactagtagccgtgggggtcttggaaagctttcaatccgaggaagcaacactgttcgtggtgttacagatgttggattgtctgctattgctcggggttgtccatcattgaagtccctttctttgtggaatgttccctgtgttggagatgcgggtctatacgagatagctaaaggatgccctatgttagagaagcttgacctttgccagtgtccttcaatttccagcaggggtttgatggcaattgctgagaattgccctaatttgacagctttgaatattgaatcgtgctctaagattggtaacgatggattgcaagctgttggaaggttttgctccaagctgcagtctgtgtctatcagagactgtcctcttgttggggatcatggagtgtcaagtctgttatcatcagcttctttagtactatcaaaggtaaagcttcaggctttgaatatcacagacttctcaattgcagtgataggacattatggcaaggctattaccaatcttaatctcattggtctccaaaatgtaagtgagaaaggattttcggtcataaaaaatgctcaaggtcttcagaagttggtgtcactagcaattacttcttgccggggaataaccgataccagcctcgaggctatgggcaagggttgtgtgaatcttaagcagatgtgcctccgtaagtgttgctttgtctctgataatggcctggtagcttttgccaaagtggctacatcactggagagcctgcaattggaggagtgtaatagagttactcaggcagggattgttggtgctctctcaaactgtggaacaaagttgaagtcccttgccctagtgaagtgcatggggatcaaggatatcacttctgaagtatccatgccctctccttgcagatctcttcgatctctatccatccgaaactgccctggttttggtagtgttagcctggcaatggtggggagtttgtgccctcaacttcaggatatagatctgagcgggctttatggaataacagatgctgggattcttccacttcttgagaactgtgaggaaggacttgtgaaagtgaatctaagcgattgcttcaatttgacagatgaggtagtcattgctttggctaagtttcacggaggaacagtagagtcgttgaatcttgacggatgcaggaagatcaccgatgcaagtttggcagcaattgccgaggattgcttgttactcagagacctagacctttctaaatgtgcaatctcagattctggcatttcagccctttctaatgcaaaccagatcaatttgcaagtgctctctctttctggctgctctgatgtgtcgaacaagagcgcatttttccttaagaagttgggtgagactctagttgggttgaatctccaacattgcaattcaatcagcagcagaaccgttgagctgcttgtggagagcttgtggagatgtgatatcttggcctaattaagagattgaacagaacaatattctcttatctctaaaagagaggcagatatagagatgctggagatagcagagtccctgaattctggctttgatttttaagttgttacttgataggtggtttttagcacttatggtttaaccgatatggatagcgcaacgttcagcatactgtttttgctcatcatgagtgggctttctggctggcttggttgtttcccgggtaactttggccgatacttcgttatcattttttagcaggctctcatacctgttttcactgtttagcccctgatcagcaggaggctacatctttcatggccatggttccctgcgaatattaccaactgttagtcccaaggttttccacttgctggagctttttcttactgcatgctttcggctcctgctattccatctggtgtttttagctttcctgcacattcctccaatggtgtgtctgatcaagctttcttttttatgtttttgcctttgcgaaaacccagttgtttgaagtcatttctttgtagtagagtgactagagtcaaagtgtgtctgtttcagggatttgcatagttgtagtgagtttgtttttccctttcatgaagtgtttatcagtgttgggtagttgatttaggcagttctttagtgaagggtacctcggatctatgtgggctttgatggtggcattctcttatgtgtgcctttacaaccttgttttggttgttttttctcattttatcatctttgtccccatatagtttttgctggtttctcattctactttgctgtactttgtcactacttaaataataataaataaaggtaatttagctttaattttgtgttctgaattatgatgcacttaccacactgaaccgcgcaatgatatttattcaacagtatttataccatttgatacatgattagcattttctataggtagcctatgcttttttcatttttagtgtcttgaaagatataatactagaagacaagtcacatcaattactattatttcgaatgattaccttttacattcgtcggtgttaggtaaaataaattctaacatataattcttttgcttagaatgatttaagcactatttggtacgttgaaaattttccacgcatgattcatcatgattcatgtgtggtcatttggctgaaaatgagattagaaatgtatatctatattattacagcctgacaaacatttttggggcactgataaatatgttgtattggatttggaaatcaattttcgagctaccaagatacatacgattctcaaatagatttgaagtattattttaacagataagatatagattttacatgtgaattctaaatatatgcatacatttttggaagggtatatattagatttaggaaggaagttgtgttatatattattgattgtagagtgataacgtggtgggaagaagcaatagttgacaatggaagttgagtgccatgtgatggtcggttgggatgaaatgatgatgtttagaacgtaaataagtgcactcaactagcttaatttgttcactctccacattaccattttcatatgttctctctctctttctatatatatatttatattgatgctcgtatgtactttgtaccatatatctgttggaaatattt

SEQ ID NO: 295187 - DNA, 2492 bp, Cannabis indica
ctgtttgtttctggatcaaggtccactttaggtcgtggtttacgcttcttgataaactcgaaacccccatacggaacaactggaccatttcctttgtataagacaagtgcattttggctggccttagtaattcattgctgcttccattgagattaaggttctgaaatttgtaaatgacttcatctattgctgtaagatgtgtttgtttcttctttggacctacataaaaaaattgatagaatgttaggttacttaagttaacctaataaaatcaccattcaagtattgtaaaaccagaaatatacctcttttcttgggcaaggatgtgttcaatactgtcaaagatgattctatcagcggggctcttacagtctgctttatctctgacatggcagcataacgagcttgaaataattgcccatttccaagtgtggtggacttctcaagaagggatgagagatgtttacttttctcaattgtgattccagtggaaagtctgttagcataattatgggcccttgcagaacctatctttcctgtttgtgaatgttgcttcatattatgctctgaaggggtagagtaatcataactgttgctgttgaatatgctgacttcattcatatctctataagcaattctgcttgattcagtattcaataatgtgcaattagcttttgatagtctacttgcattgacaccgtgtgcagttgttgtttcaacatttcctaaaccctcagctgcattgacaatagaaggaacgttcacgatgtctctgcagtcatacccaatcttctttttcttagtggtttgtgaaaatcctgagcaaaactcatatattccttggtacaacaatgtactagcatctatatgatttgcagttgagagatgtgcatgttcagtggtgtggcaatggtccctttttgacccctttgcttcattggaggagggggtctttggaactggctgaggcatagcctgcttcattgtttctctaatcttctgaagtttctcacaattatctcttccttgaactctatcttggactactgctactgcacatgcatgttgctgtttcagaacattttcatcttccttcctctttagctgttgatcaacatttctgtttattttatctcctccagttacattgaaatttttcatatgcatatcttgtattgaatcaaactgaggaacagttgcttgcctttcaaattgactaacatgtccatttggcatttgattcatgaaatggttttctaccatatgctcaacaggagtgccactattcattgatggaattgtatttgttgcttggtagtccaaggtaacacttggagcttttccattcatgttgtgcatctcctgctgagccactatgttgcccagatttgcatctccaattgtttccgaatcaaaatctaagactttcttgctactctttttgggcaatgcagtgttagaatttcctggaccctccaaaatatccaccatttgagatgttgactcctttgaaacatttttgcgcacgtatttcctctttggctgcttaggttctgtattttctggaactttaggctttcggcccctttttggtttgccttctacaattaccttgggcctgtgtttcctacgttttggtgttttctgctgtggtgtctcattcagatcaatgcccagatcagttatctcctcggaatctttattttctttgtatggtgtagaaatggctgtggacgatgagtcgacaatcttttgcaagagttcgtcactatgtagttgaattgcttcaccttctctgcattcaactagattatttgctgtgtttctttcctgacttggggtttcatcagttgtggactttagtaatgcagaccgctggttctccattgcaacatgatttggtgttactggtgtgaaataatgcgagttcacaacatttgtgggagcattaaagttacttggtgagaaattcaaatcatagcttggcttggacgttgtgaagggatcatctgcagagatagttttgttcatcaatatggtgatgcatcaaaaaaatgcctctctactgattattacatatttgtaatcagtttcagagattttttgggtaagactctttatgctttcttatttaaatgctagtttatctagttttcatgacatcaacataggtatattattcatctatagcttactatttcaatgttcagcaatttaacaagaaaccttataataatctaagataggaatcttcatctgattaactcgtaattacttttatggtcattttgcatgtgtttattaatgggtgtatacatatttagtaccctatattttatctaaatacaagtttagtactttgtatttttcatattatttatttggtaccctatattttaaaaatatacatttttggtactttaaactcaaagttttcaaactgtcttcaattttacaaattttagattcaaatttaattatttaattatata

SEQ ID NO: 295188 - DNA, 6060 bp, Cannabis indica
ggagagagaaagggtttgagttatgagaggggtatttttggggttttgaaaaaagtgtcatatttttttagtgtaaaatgtattggtttaagaataaaatattaaggttttttaagtatagaaaatcaaatttccctatgaaaaaagcttttgacagggttgagtgaccttttctcaaaaacatcctcgctcacatgggtttcccctccaggtttacttctctaatcatgagttgtctttccactgccatctaccgtttatcccttaatggtaatttgtctaacaattttttctcttcccgtggaatccgtcaaggagaccctttatccccatatctctttcttcttgtggctgagggactctcaactgccattagaatcaaggagatgactaatgatttctctggaatcaaaatttgccggggagctcctcccatgtcccacctcttgttcgctgatgacagtatgttgttcacccctgtcactgctcagtcaagtactgccataaatgacttcctccgtatctatcatcaggcaactggtcatttagtcaatctgtaaaaatcctccatccttttctcacccaacactcctctggactcccaaaatctgttcagaaattcactacatctcactaacgagggttttattagcaaatacctgggggttccacactgtgttggcagggttagaaactctactttccattaccttatccaaaatgtttcttccaagatgaatgtctggcatggaaatttttttctagggctggtaaggaaacacttattaaagccgtaattcaggctatcccctcttttgccatgtcttgttttaagctccctacatccatttgtcgggctattcaacgtctaatttctaaattttggtggggctcgacttcaagtggtaataaaatccactagaagaaattgtctgctatctccatttcaaaattttttggtggtcttggatttagatctcttgtccatcataatcaagcgcttcttaccaagcaagcttggagaatttggtctaatccagattcctttcttcattcaattcttaaagccagatatttcaaaaactcaaatttcttgtctgcacgcccccaacagttacaacatctcttcacttagagaagcattctcgggggtcgtcaactccttaaaaagggtcttgtctggaaaattagtagtggcaatgatatccctatttctacttcaaactggataccaaacataactcacccaactcttcttcatcccattgatccttctctttccactgtgtcttttttcataaacccaaacaatacctggaatatgggaaaactacggcattatctcccacattaccaagcaaagtcagttctacaaatttctcttgacccaaatcccgtgacagcctcatttggggatatcaccagtctggcattcttactgttaactctgcttatcaccttgcttcctcatcctccaatgtcaattcaccatcctcatctaattccaatgcctttaagcacttgtggaaaactctatggaaccttcccatcccaccaaaaatcaaacactttacttggaaagctttcaatcacattctcccttgtgctcttaacctgttccataagaaagtcctcactgatccatattgtcacttctgtggaggcacaatggaatctgtaacccatgcacttatagattgcaacagagtatgtttggaagcattcaaaatttaaggatttcttcacattcatagaggccaggacattaaagaatactatctccaaggcctcgccattttagctaaagaggatcttcctctgttcattagcttaatatggcatatttggaatactcgaaactcagtgctgtttaataagtcttataatactgacagtgtagaagagtttgatatgcattatttgtaggaatatcaggcggctcaaagaattaatggaacagattctccctcggcaaacacaagacagcagaaatctcaatccaactctacatcacagcacactatccctactgataatactgctttgtttgtggatgcaacgctggatcaatctagtagtgttactggtttatgcttcgttttcaagcaaggctctcaccaagtcttagcttctgcatcaattcgtaaaccaggagcccctactcctatttttgctgaaggccaagctttattggagggtctctcttgggatctctccctccagttgcagcctgatctcattttcactgactatcttaaccttgtttcgaaagttaatggcgagtggaatgataactttgccctatcaagtcttgtctcaaagatcagacaatccttctccaacttccctgcagcttccttgcatcatttacctcgacaattcaatgctgaagctcatcacctagccaaggaagcgctcaggcagagagagaggatagttaaggggaacactcggtgtttctttttcgtggctgctgtttgtattgttctatccttgcagctcttcttaaaaaaaaaaattatatttgagaattaatatcttgattatatcttgaccctattattatgctactcgaatatttaatatgtgtaaagtgaataccatctcagatatttcactaatcggatcaataattagttgtgctttcttgtctaacttctaagttttattgtggtgattatctgatttaattatggtgtcctttgttctcccacaacaaatacaatccttcgagattatatttatgttttttcatatgatcattttggaaagatactttggacttctccttttgtttatgctctattagtttgaaatttatttatttaggttacacttttatttataaaaatgtatgttgattcatcgtataaataaattaaatttatgtaatttattttaaaataaggtttataacttaagcgtatgattgtcatgattttaatatgtgaatatcattaaataatttataatttgatgtgcggctaaattaaaaataataaataaataaataattattgtttttacaattattaataaaaagatattggtctctattttttacatcccatcatattttatcttttttcattcgtgaatccctattgtcaagaaacttaggtttcagaaaaaattttgatgcaaaaattaaaaaatcatatcattctaaagtcaattttatgactccagtatattaacatacttcatggtccttctagtactagtacgaagttactaactcgactctttttattattttcagcctaaggtttatttttttaactatttcacccctgcgaacctactttttaactacttcacggtccttcaggagttttaacttccgagcctatatgttccctttttccacccctccaccaccgcgaactagcctaacctcagtggcttacttcttttatatgacccatcccatttacttctttatgaaaaagcaattacttttcattttttaacaaatgaaaaaaaaaaaaatagagtatattattcttgtttgtcagcactactgcactacttactaacttgacattgcaaattaacgtgtcttgcttcaggaacttgttagtggatatataattgcttttaccctaaagcaaaagcattataatttcctttatgcttaaggaattaaagctccaatttgcaactaaatattatccaagtaaacctttttatctttaaactaaaagggttatgttgtgccactaactctaaaattaaaattaaatatacatgattatgtgtgacaaatatataattatgagtatgaaaactagcactcttactaaaattgatttctaacaataaagtttggctccgtgactcaaacaaatttgttgatttgtatttggtagtatttatgcacgtgactatggtttagatatttgattctcctattgatcgtcttccaaaaaaaaaaatgttcaaataagtaggattagtacgtgactttgaattcaatggaaaacaaaactgagcatcttagactggccatgtatatcttaacttgacaatatataaagagtactaaaataaaataagacacacacatggtcattgggttactaaacaaccaagaagacaacaaaactttgcatatattattactggcaaatatcagtccccacaaaagtatttaatcatatttttaataataaagaaataattaaataaaataaatgatcatgcccttctttgtacacttcttataactttgtgacctcaggatttgatctgcctatatggccagcacattgagtgtttgatttgatacaatgcagataaggcataaagagacaatacccaaaataaaaatatagttatctttcccattcagtaatgtagttatatagttaaaatagatttggaagaacaaaacttcatgtctatagaaaaacaagacactcctcaaattcagccttagcccccaaaaaagggttccagattaaactcaagtagtcaactccttaattttcactctaccctttctgtttaagcaatttattcttattttatttctcaataatttgttgatcatctctctgcatatatcaatgggaatccaaagtaaattcttgtacacaagtacagaaactagcccaactccaagtatttgcagcatagaagagagcatgatgagcttttatagtgccccaactagtcccacatcggaattttattcaaccactgagtcaaccacaccaataagtacaactacatatacaacttattatgaagactgtgccaacttcaacctcgaagactttgaattcgatacaagtcaccgtttccttcatctcaacgattttgaaccaaagattccgtcgccggactatggcgatccatggcgtggagattcacttccatcgtccatgtcttttgctgatgagctcttttgtgatggtaaagttgtgcctttagctcctactcctccattaaaacttccaccgcgactttcagcccaaagtaatggtaaagtggttagacccgtctcgccgagaactccacgttcggttcttaataaggtggccttttcacgccagtgcttgtggaatgatgattttgatcccttcatggttgcaattgagaacgttagagggaaaaatcacaagcgtgctcggtcgatgtccccatcatcaagggcccagcctggtgaatctgtgtctttgggttggcccataatggacaatggtttagactcaaacgagcttaggcaacccaatcggtcagtttctttgagatgggcaagcccacgagagaaagccagagaagaagaagaagaagaagaagaagaacagaaaagccataaggaacaacaactgtatggattggtttcggagagcaaaagttggaaagttgtagctgagcccaaaggagttgctatggcgagacgcgtaagaaagcccgctgatcctatttcagcaccagcccaaattaagaggcaaaagaaattgtggtttcctttaaagggtccatccaatagaaaagtgagcgatgaagagaacaaggtaaaagatcaaaatgtagggttgttgtctaaggcaacctttttgagtagattaataagttttaaatccattaacaaaactcagcacaatcaggatgaaaaggcaatgacccaagctagcaagatgagcattgtacaatacaagcctaggctgtcctcactttgcttgggatatggatcaaagtatttggactaaagacagccaaatttctaggaacttgaatgtaaacatatcgtgacattgtgtagattttattcaattgtgcaaaatagtgtttttattttcatgattttaggaaagaaaaaggtcatgtaatggtggtgtagtgtgagtgtttttattgtttgaaatgaatatatagcggctccataatctagtcttatttgtggataataagacttggaaatggcccaaatttctctgtagtttttagcgattcattcgaatcattccatgtttgaattgttttttctataactgtgaagatttctaaatcaaccaaattacacttttccaaatcaaaaaaaaaaaaaaa

SEQ ID NO: 295189 - DNA, 5041 bp, Cannabis indica
aattaaagtttaacatagtattatataaagatatgatatataatctaattcaatataatacaatacaatacaatacgacttaatacgacgttccaaacgaaccctaattacattaatattttttttggctaattcacactctcaaaaaatatatacctatctattgagaaattaacatacatttatacatagtcttgtctttgtgacatggtgtgaaagttttgttcttttgtgctttgtgtttgcgtacttcttattggtgcttttggttttttatggctacgtcgtctactctcgttgacactaatgtggatcgtttattgattatttcactagaagaggaagaggaacctgcagtcagttatgaagggccactaatagaggatgctgaagtcgataccagatggagcattgtgggatattttttaactgatacgccaatcgatttcatggcgatgcaaaacataatggcggtgctttggaagcctagtatgggtgtgtatgtgaaggagttagggggaaacaaatatatttttcaattttatcatgaaatagacatacaaagggtgattgataggagtccttggacatttaagaatgctcaactcatttttgaaaggttgaaaccaagagatgtccctcgggatgtacctttgcatcatcttgatatatgggtgtaattatatgatattagatcagggttcaaagcggaacgagtacttcgagatgctgggaattatattggtagctttattaaggccgatgagaataattttaatagtatttggagagactatttctgggttcgagttcagctcgatatcgaaaaaccgttgaagcgtagaatgaagttgtagcaggttggtggcgattggttttggattaatttccagtatgagtttgtgtcgactttctattccatttgtgggttattgggcatacagagcagtattgttcccgtttgtttatttagccaattaccatgattgttaaaccgtatggcacctttatgaaggcgaaaccaaaaagaacacattatgtaatgggggctaaatgacttcggtttggttcgtttggtacaactaactatggaggtacggtggtggccgatctcagtcggtcagggccgagtgaaatctcaaatttctagggacacaatgtggctatcaacccgattttcacaagtcaaggagaaaattgtggctttcatttatctcctgatattatgcgagaaaattgtgagagtaaagggtgggaggcggtagaggttgtcaattaaaatttggaagaggagggaatagtttttgtggactccatacgtaaaagaataggcaaggaaattttattgggcctgtttggcctaaggagagtattgatgtgtacatgggggatactaaagctactgtttcaaaaaacattataatggcaggctaaaccgatcgcactcgccagtcattatgagtacactaagttggaattgacacaggcttgggaacccggggactattcaattccttaaagatatgatttatcaaaagaagcccacgtttattttcctatgcgagacactctgtttgaaagcaagattggagcttctgtcttctcagctaggctatggaagggctcttttctgttgatgctcagggaaggggaggagggttagcaatgttgtggaagaataaggacgaagcttaggtgctcagttgttctcaaaaccatatcaatatggtggtgtgagaaggtaattctcaaactttgcatcatacgggtttgtatggagaacctaatcgttctttgtagagaaacacttggaatcttatgcgcttgttgaaagaagaaaataatcttccttggtgtattattgggaatttgaacaattttcttagtcaagatgataaaaagggttgcaatccttatcctagttggcttatagagggtttcgaagaagctatctcacattgtgatttagtgaatttagagcttgtgggtcacccgtttagttggaaaaagagtagaggtactgatagttggattgaggtgaggttggacagggctttatctaactcttcttggatgagtttgtttcctaatgcaagcttgactaacctagttttttccacgtcagatcagtgccctttatttttagacccctattttcattttcaggcagcttctaaggtgtttcggtatgaaaatgcatggttgagagactctaattgttatgctattatctagtagcaataggaagcttgtttgtcgggtaatatattgttgataaagtggctactctttagggtcctcttagtgtgtggagaaagagcttaactgatgattttaaggagaggattcaaagctgcaaaaccagaattggagttcttaaaggccggttggatcatgttgcttctattattgagtacaaggaggtgagaaaacaacttgctgaaatttatcatcaaaaaaaaattttttggacgcaaagatcaaagcaatttttgcttagggaaggtgaccgaaaaacaagatacttccatgctgcttctagctctaggcaaaggaataatttcatccatgaattaaaggatgaaaccggttcttgggtccaatgggagtcggggttaccccagataatgataaattacttcactgatatttttcactcaatggggacgcaatgtgctgaagttcttgatgttattcaaccttcctccattaggaggacaatgttgccttgttacagtcggttctggaggaggaggtccggcaagccatcttccaaatgcacccagacaagtcgcctggacccgatgggttgactcctgcattctatcagaagtgtaggcatattgttggcaaggatattgtcaagctagttcaggattttttccaatccaaggtcatgcctcgagatctaaatgctattaatcttgttctcattttgaaaaagaaatctccttccgtcatgggtgatttgacaccaatttctctttgtaatgttttataaaaaattattttgaaagtcatagctaatcggctcaaaagtttattgtcgaaggtaatctcatagttttagagtgcgtttattcctgaaaggctcattattgacaatgttcttgtctcgtttgagatcttacattatctgagacgtaagcaacatgtgaaaatagttgtatggctctaaaattagaaatgagtaaggcatatgctagaatgaaatggtcttttctacaagctattttagttcagacgggttttgcagaggcttgggtcgatatgatcatggagtgtcttcgaactatttcttataacattgttcatggtggagaaattatgggtcctaatatcccgtctcggggtatctgtcagggagattcactgtctccgtatctgttcattatttgtgcagaaggtctttctgctcttattcatctgtatgaggagaggaagtggattcatggttgtcaggtggctcgagcggctccttatgtctctcatatgttgtttaccaatgatagctttctttactataaggcaaatagggaagaggcacaacatgtcttggagttgcttaacaagtttgaaagagcgtcggggcaaaaggtgaacatgagtaagtcatccgttttttttttgaattctaatattgatgttgggcctatcacactattttttcaactcatgcaaggagaactcgtatgttatctctactcatgtggctcttcatgattgcagggtcaacaattattcactaaaaattgattcttttgaatcggacgagggagtgttagaggacttgtttgaccaaagggaggatgagaccattttccatattatggtcagctgctcttttacaaaagcctgcatcgacaggggtctgggagtttcttttggagggggtgaaggtgctattttttgtagctagttcgataatttttgtaagtctcatctcgtggagtatattgataagcttgctatgatactctgaggcatttgggtgcccttaatgatttggttcagagtaacaagattatgtccgtggagagggtggtgaatgctgcaattacttaccttgattcttgaaaaattgctcagcttgaaaaggtgttgtattgaaaatttctggtctgaatacaactgttaatgagcactggactaaaccttgtattggtgagataaaggttaattgcgatgctgctattttttatagtgataatagtctcggattgggttagattgctcggaatcatgaagttgtgttcatggaagcttcagttgttagaacttgcggtcaacttgaccttttttatggcacaagctatgtctttaaaggaggctctgagttgggtgaaaagcaagtgggtggacggtgatgtgcctgctggtgtgatattggagttagattctctgctgctggttcaagctagccgttcaaaagaagaaacagtatttgtctcctgtgggcctaattatctaggacgacattgctcttatgcagtcctttgttttgttttcaatttcaatcaattttgttaaacggtctaggaaccaagcaactaattttttagctcgttcttctggttctattcctgaccgtatttcccgcggagggtttgtccctactagtttggaagctattttgataggtgattaaatttaaggaaaatttaatttatggtgaaaaaaagtacaataacttttttttacaaaaaaataattaagtccaattttttcgattttagtaatttataaaaggtgacttaatctcttttatataagtgtaagtgtgtaactcaattcttaaattactaaataattttgacaacaaattaattgccaaaaaatacataaaataaaattatacatttcattaattaaaacttaaattttaaattatatattacacaaatttcttaattaataaactaaatattaaccatattatataagttcttgcaaaattacaaattatacatgcttttaatgttggaaattattttaccaagatcttagatctactcacaagtatgtttattaacatcctaaa

SEQ ID NO: 295190 - DNA, 2672 bp, Cannabis indica
tgcacttgcgagtataaatattaaaacactcacttttgggtacaacaaggagtcattatattcccctgcaaccaatgtaaggttttctaattcttttacgtgtttattttattgttttagagatattcatattgaagatgttaatcaatatacttgttagtaaatatatatcctggtaaagtattcccaacaatacgatatgtctcctttgcctttcactggtaaccgttggagacatggtggtcttcttgaacgccttgattgtggtattgctaatcaatcttggtctgactctatcccactgctaacattgtccatcttctcttttatggttccaatcaccgggctattaaaatgatctatcatagtaataccattaccaataaaaagaaccgtagatttttctttgaaaaccactagcttttggagcctaattttttcaatctcattaaagaaagttggacttctaatgtatcttcgactacctctactcctaatcttcattgctttctctgcaagcaaagtaactttatcaattccacgaagacctcgtctaaaagtgaaaacactttctagttccaaatcaataatattcaatctgccattgatagtgtattatccaaaccctctatctctaggcttgactccaatcatattaattctctttaatcctctcttgatgttattttgcttaaagaggaagttttttggaagcaaagagctagggttaattggctcaaaactggggataagaacactaagtactttcataataaagcttccacgaggaaaaaaaaacaatgtcattaatagtctcactctcaatgataatttcattgttaacaatctcactgacatcaccaataattttgtccagttttattctactctctttacctctaacggtactgatcttgactccatcaacatggttcttaggggtatttctaaacgtatcgatagcaaccattttagtttccttgctagccctttcactttcatggaagtaaagagtgctcttttttcagcagtcttgtgataaggcccctgagcttgatggcatttaccctctcttctaccaaaaaaattagtccactgctggcactgatctttgccatgccgtccttgatgttttgaatcatgaggccaatctggctcccattaattagacttttgttgtccttattccaaagaaaactcacgcttgtaaagttcgtcatttcagacctattagtttttgctagaccatttataaaattgttgctaaatcccttgctaatagactaaaggtcgttctcactgatctcatttcccataatcaagggccttccttagcatctgttttattcatgataacatcattattgttaatgaaatcattaatgccataaccactgaaaaaaaaaaggtaaagtgggttggggtgctttgaagtttgatatggaaaaagctttcgataaggtggagtggaattttatttacaaaattctctctcatctcgacttccctaccaagtttgtttccctcatttataattgtatctcaactgtttctttcaaactttgcattaacaacagtctctcctctcccattactcgttctaggggaattaggcaaggtgacccaatctctccctaattattcctccttgttgctgaagggttgtctggtctcattacttccgaaactcatgccaaccttttcaaaggaatcttcatttgttgtgttgcccctcctatttctcatcttttatttgccgatgatagtttgcttttcacccatgtcaataatcaacattgcaaaactattcaagacattcttagcatctataataaggccaccggtcaatcaatcaaccttgccaaatcctctgtccttttctcgcccaacactccacctcatgataaaacttcttttctcaattctctccatatggaggataaaccatttgttgacatatacttgggtgtccctgaattcttctcttgatctaaaaaatcttccttccattacatcctccaaaaagcttgcaacaagctttcagtctggagccaaaggcttttctctaaagttggaaaagaaactctgctcaaggcagttatccaagccattacttcatatgccatgtcttgttatagaatccctatctctacctgtaaacgcttgggggaaaatgatggcaaacttctagtggggatctctgggtcaaaattagcacaaattttttggaaaaaatggtcttccatttgtaaatccaaattttatgagggtctaggattttaggatattgtttaccacaaccaaggtatgttagctaaacaagcttggcgtatttttacaaatcctgactctcttgttgcttccctcctaaaagctaaatattttaaaaataatgattttcttcatgccaaaactagtcatcttccttcatttacttgtcgtagtctccttcaggaaagcgatctccttcttaaaggtttagtttggaaggttggggatggcaaatctattcacatcactagcccaaattggattccaggttcaaattctctttatttcaagaacaacaacactcctccggatacattgttgggttttgtgccctaaataaaacccatatcaatataatcagatttacttattaataaagatcagaaataacattttatgtt

SEQ ID NO: 295191 - DNA, 1709 bp, Cannabis indica
tttttctagggcccaagaaaactcatgatggacccagactagctgatttgaattagcaccattaattagttacaaaattataaaattatgatagcctttgattatctctttatggaaaatttattttgccaaatgtatggagcgcataatatacaataaaagttatctttgtatgagaagttaattaataagttaaaatcatattttgatattttatagattgcactccaatttatatatgaggcatgcatgttatatatatattgatacatatatgcatgatgttgcatgtgtagtggatatatgcataatatataagatgatatatatacatataataatataattaaagagtttttgttatggttcaagttcatatatgaaactgaattaaaattcgaatttatattatcaatatcatcagacgcggtttctatatatatccttataataacatacgtaaataaagtgtatataattattacttaaggaacaatatttaagatgctacgtacgtagaaaagcctcatcaaatcaatttatatataagtatataattgaattttaattacccttataaattataatccatatatatatagtccattcataagaatattatctttgactaagactgtactgtagcatattggaagccatataatgatataaaaaatgtgtatgtacacttgtcaaataattaataatatacaatatcatcaaataataagatatagaattttctgtttttgtattattaatgcgcatgcatacatttatatataggtcttctctctatattctcatctcaatgattaaagcataataatattattatatgcctttttattaacttttttcttctcataattaatcacatatatataattattacaaaacaatgcaatgttaagtttcgaagggtgtgatataatatttttatattttataatattcttttgtcgcgtggttagtttttgtgaaattttatctcaaaattaattgataaaactagagtgaagtagtccatgttcttatatatgattcaatatttttatatttgatccatgtaggataatattgtccaatagtctccattcacctcgattagggttcgacgaccattctcagagtttgggagtgactctagtcggggttactgatatacacagatgggttctttcccttgcactactgttttgctcaacaacgagatgtgcttttggtttcctctccttggcgatcttcttctcaagccgttggaatcgtcaaggttgtggtgtttctagggctttggttctgctaaagccacaataaaaaaaataaataggatatgctttcatctgcttgattacatagaaaacatttaacatctgatataatattgaatcacatcaatctgtccttagtttgtaactagtctacatgaaaaatcgatgctttggaattagaaatctcccccaaacttctccatgccagctattgcattcataagatggtgaaaggagagtagagtagttgaacaccataaactagagaaactttcttctttcacttggactatttgacgccactaccaactgtataagttgtttacagatctttattgaccatttattatgtgttctatgctttctggaatgagtattataacacgcagggttggtcttaggcataggtggactaggtctgcgtttaggccctactga

SEQ ID NO: 295192 - DNA, 3122 bp, Cannabis indica
cttttagtcacaattttttttttctgattaaaaataagattttttgtagtaacaatatataactatgctcagactattgtacagtaaacatagagctagaagaaaatatgtcatctacatataacagtagatatacagcgatttttcacatttctcacatagaaacaactgtcatatgagcttcttttgaaaccagcttttatgaaaaactcatcaagtcttataccattttcttggtgattgattcaggccatacagagttcttggtgattgttttaggccatacagagactttctcaacaaacacacttgttcttccttttctttttcctcaaaacctttaggttggctcataaagattgtttcttccaaatctccatgtaaaaaggttgttttaacatcaaattgttcaagttctaggtcttgtatagtaacaaagacttagtaatagccttattgatgtaggtttgactattagggagaaaatctcattttagtcaactgctttcctttgcctataaacccactaaatcagtttgtaagctgttaggcaaaagattgtaagctactaacttggccttgtatttagccttctctacttctaaaatgccttctttatgcttataaacttgcctacagcttacaatcttttacctaacaggtttcttcataagtgtccatgtcttattccttttgagagagtccatctcatcatccatggcctggttccattgatctttctcagttcctggtgttcagttacttattattttgagtttgatctgatatctccacctcaaactgtgatctatctgaggtttcaagatgcatctcaggttgtgtcttaagagtatctctgtattccaagaatccatgtgatgtgtaacttcatgcacgcaacaaactttaatctagttaattttccaagtacacactgttcatagaattcaagttcctaaatctgatttgctccaaacactcctctcttgctcagaatttgcacacctttttcacctgcatgggctaatcttctatatgccatttcatggattcaaccttagcacctttggccagtcactacgtcacatgatcccttactatatttccctacattacatagatgccatttacctttgttcccctcatgataacttgatctaacatagctactgagataaagttcctcttatgtccgagacatgcctgacctgtgtcaactcaacaacagtacctccatcaagattcaacttgattcttccagccttactatgtgacatgctcgatcatctcctagccttactcctagaactaattcctatcaggactattggagaatattgtcccacatggattaaatgtgaaagtactgagccatatataagaacatgggctactccactcatcaccaattgattttgaaatggaaccctatgattcccaacaaggactatacggaaacaacattctgaatcagaaaccacataagcattttcatgtttatgattgtaatccttcaatataggacaatccctcttgaaatgatctactttgttgcatacataacaccttttcttgaacttcgatccggtcttcccctcttcttcgttgtttccctgtcgattcttgctacctttcttggatgatcttcaatcaacatattggccttaaccatttttttttaaaatattttttggggatattttgttgttttctaagctccaaaattcatttatgatagtttacaaaagaatacattaaatgttggcaattattagtttctatgataaccaaccatttgcttatatattattttacctttaaatattgacttaccttttatatgttttaagtgagatttattttatgttcattggtctgttcaactaagttaagatcgtgttatttagtttatgttattttttttttcaattattaaaagtatataatttgtatttatttatcaattttcataataaaatgtgatataacgatcatgttaatgtaaaaattatatttcgataagccgcataatttatgaagcacacaatttagtagtgtaaaaagtctagatgctaattattgtaaaaaaattaattactaactagtatttcttaaagagacaattaattgatcgtatttgattgattcttttatgtcttttatatgttggtaaccctcactaggtacaagtgatagtgagtatagtagtagtagtggaagagacgatgatgagcaacttaagtataggccattcttcaacgatgtgattgctggtaaatggaacaaggttgaagagttcattaaagaaaacatgaaggagaagaacaatgcgatgaaagtgacaatgccgggttcgggaaagaatgctctccatgtagcaatcagtgctggacaattacatattgtgaaagaattggtaaatataatgagtgatgaagaactcaaaatcaaaaggaaagatgatttaacagttcttcatgcagctgttgagattggaaacattgaaattgcacaatgtttggttaataaacaaaaggacttacttacattttgctctaaaatagtcaagattgaaagtcaccctaaagaaataagtagatttaagaggaaaaaaattattggaagtgaaagtgatgatgatatggatgagaaacaaattatgagctatagtccagttgtgctagctgttatttatggccaaattcaaatggctcattatctttatcaacaaacgccgaaagaatttctacgcgagcacaacgacggcttccatggttctgctctaattacccaatgcatatacaagaaatattttggtaagaaatttaaactactaaaatatttgatttcgagggtagaatggggtgagatgtatgaggttagtctattttataaaatattatattaagttttcacatattatttacgtgagactctctaatactattcaattgtgtccttcagttaaaaattcaaaggacgtaattcaaaaattgagaagtataggtgtcgttcggtaatatttttgttttttaattttttaattacaaaatgaaagtaaaatttttgtttttaaaaaattaatttttgaaaaacaaaagcgttctgtaaccacttttgtt

SEQ ID NO: 295193 - DNA, 4683 bp, Cannabis indica
gtgtcatcccaatggttgtctgaacatttgttgttaaaggcattccagtactgcagcaccgtgtgtgattccaggcaaaggatatgtcacaccttgacccgcggtcggtggttgcgtgtttggttgttcaggattgacgactagtgggacccgtgcattccctagagtctgcagtgcaggatacgccaccaacggatccacctgatcaaccacgcctctgcgagtttgtagcaccatagtgtttctggtcaaacttaaagcaaagagcaaactttgattgttgttctcaatgaaagcaccaaaatgttaacctcgcttttagccaacgacaatgagtcaaatagtaagtgatagaaaatataattaaagtgaagtatgaactaataagcaataaagaacacaaggttttaaagaggttctaccccgttagtttggtatggcctactcccttgatttgtattaactcaagaacaaagaatacagtgtgtcctctcttgaagctctcacaatgaaatctctgagtatgctttcttagatttcgcttaagcaattctttcgacccctttaccagtgagaatagatcactattcatagggctaagtgcttgagggaaggtttcccttttgcttacaatgtctatagttggtaagaacatatattacatatttagtatacacaaattgtgggattcggacagcttgtcatatctctgtgataccatcgcaaacttatagggattgcttttgtgcttcacgatgcaagtcttgaaattgctaagtgttgatatgctgctcggattgtctactgctcggttgggagacattatccgtgctagtgtatgctaatcttcattcggaacatctcttcagccaaatgtagggaataaggtccatatgtcaccaatatatgccgccacatcatagtgcaaaaaataagataataccttgtaagtgaaatggattaatttcacctacttaaaacactaaaattaataggatatatagaattttataacttatattaataatgagacaatatatatatatatatatatatatttttttaaaaaaaaagcacaatgaaaactctaaataaataatttttgttgttggccactttatttttcaaaattgttttatgagaacgtaccatacattttacttctgctaaataaaattgctttttttttaaaaaaaagaaaaagaactttattaacatagatataaactaaccgggttcagtactctcataaaaaatttcttctgaaaaagaagatgaaaagcaaatccatgacatatactattagtggaacaataaataaaattctaaagccatgcccgaacaaacaattaagagttacaacataaatatttaaatttaagttcttgttgtaaataaatatctaaatttaattttagttaatacttaaccgtcaaatgcctaccgaagtcctataattataacttaaatattattattgttaaaaattaaatttaaatatttatttacaacaaaaatttaaaattaagtatttacagcgcaaattactcaataattaattatttacaatcttaacgacagttcgagccttaataaaatgttaaggtgatcacaagcaaccaaaccaaatccatactagtgagtctcaccgaataaggcactatccacatttatatggacttatgatccatatttaattatgaataaggcactatccacatttatatggacttatgatccatatttaattattctttcattacaaaaattttacctcttaaagaatttttaatacattaatagaaattatgtgctcaaagatactaaggtttcggttccaccaaatacaaaaaataatgtgcacaaactctttttaggttatttttttttcgcttttatttatatatttattttttaattttcctttaaaaaatttctttcgtcactgctttttttttccttacttgtaggtatttcagctctctctttccaaacaaaaattgacacttaaaaagataaaagatatcacattgaaattaaaaataacataaatgaaaactaggtacaggcaattcctctactgttgatatagctgtgtaccttcctcagtcacatgagtgaaagaaaatatcaaatgaaatcaacaccttgtcctttttttatcttcttattttctatttttctctttctctttcacctgtcatcttgtgtacagttacttaacttcttacactcttcataaatgttgtacaaaagggttttatcgtgttcccaacaatacccccttctcttgacttttcaacagtactgtccttgtgatatttctgttatttaaattattaatggagaactataaatatatacaatgctacattttcgattatctaatgacactcctcatatttgtcaaaacaaattaaatgttcttttctcagatcatcttttactgtattctttccatttttatgtcattgtaagacgatctattggtttcatttagccaaaagtacaatgaaaaattgctattttgaaatttaatcttcctctctattatatatgtgcttactaaaccgcatttcaaaattcaatatgagtcattgttatgttataaaaacaaaagcgccatacaaatcataaaaaagaagaaaaagagtgtgggaaaccaacctttctttctccgtttttggaagtgactttgaatgagatcaactcatttttggataatttgagcgttactaatttagacctattttccttttcagtgaatatgctaattgttagggttttatgacagtctaacttcttacctttattatctataagtggaattacgaaacattagaccccactacttgttaggataatatttaggggtagtcaggactttctttatttttatacacaacatgtaggtgtgtgaatatattatagtaaacctgtatcatacacatccatcattattatacttattgtgatatagcatgtcaatgtagtcgtacttttaatcaagtataatattattccgaataatactggattgctgtatgctatgataggagaaaaaagattaagataagtctatgtaatattatttagaaaaacatttgtacatgttatattatttaaaattatttctcaatttcttaaaaattcccaacatagttaaatataattcttaaatattttgttacatacatgtatgaaagcagtgatggactcaaaatattttctttgtggaggcttttaattattaaaaaatatttttacttatattataatcactcttactagatttatttaattttgtaggatttttttactattttagtctataattatcaaattaaaagaatttaattaaattttttaaaaagaaatattattgttattcacattaacacaagtgggtgtgtccctgcatgaatgttttttttttaaattattattcttttattcgtagtaagtgcctatttggacattaatactgtaagttcttttaaattttttataaatttatagatcgatataaataagtacaatgtacacgattataaaaaataaataaattaaaaagttctcttatatgctgaaacaaataaaaaatttactaaaattactcttttaaaggttataactttttaatttaagtaaatcttttgaaaacatatagtatatacacccccttttatagatcttatatttatttcggcatgcagaataatttgttcattaattttttttcatgatcttatgtgttacagataggactaccaataaatttcagaaaaattatgaacagtttgtggtgtccaaagttaaattcaaacaattgtttattaccatatgataagaaaaaatagtcaagcgtgtgcaattaaatatttaaattttatttttaatactgtaaattattcaataaaaatttaaaatttataagtgaccctaaataactaaagcgtacataaccattaaaacaaactggactaaaaaattctcatagataccaaactagataggagatctaacgaatgccacataataaatgtaattttttttaattataattttgcaattaatcattaatgatatatttaaatacagattttttaattataatattgtcattaattattttttaaatatttaatttatgaataattattaatgttgttttatttttttgtttttatctatattttaaatgttattctgcgcacaatagtaagtatagtttgtagcaaatataacatcaatttatattcttgtagcaaattatgcaccatgctctaccaaaaaaagttacttttagtaataattttttagtcacctcatatttttttgactaaatgtaacttctcgctacaataaaaaattacttgactaaaacacatttagtcactagaaattgtaattttttgactaatacatttagtcgcagacattttactcacaacataagaatgatgatttataatttgtcacaatttttattgtgattaaaagtaaaaattttgttgtgtacattattgttgctcctaaaatcgcccaatatacgtggaccagtcaggaagggacacgtggatcaaattacttgagaaagaactgctaagtccttgtatgacaccaggaagcgttattcaaatgggtcccggaagatgcacccggagtacaaggtactcccgg

SEQ ID NO: 295194 - DNA, 3548 bp, Cannabis indica
ggtgagccattgtcaactgcgaccaaggcctgttgagtaagaatgtagtcgaagcgtggagcccatttccttgatcccaatcgagcagttgttgaacagttatcaaccatgaatgcaactccacgggcatgcatgaaggggttcaatgaatccactgactctatcacactttcgttgatgatctctgagtaggaatgtcctttcttcctcaagatttcaatctggaattccaagtaacaaaagaaaaaataacattcagaaatgaaacatatttctgttttatttcttatgttaatatcaatttattatgtcactcgtggtaatcaatgaaagagaagtttctacctgagccatcatcaatgcaacatagacaccagctgtaaatgggtacaatggacctaagtcaccagctggtcgggctgatcggaccttctcacccaccttccacatccttgtctgatcaatgttacccatggggaaggctggaagaccctccttttcctgtaataccaaaccatatccaaaatcagtcacgtggttattttaactcttaaatggtaaagactttagcatatttcaatgtaaacaaaacattggtcttaaaatttgaaaatataacagtggacagcagatgagagcaacataaacatacataaaaccgccggccagccaaaacaacactgcggatctcgctacaactggctacatcttcgtaacactcgtacaagatatccatgcaagggtagaaagaggcactgtaagcagtctcaaaatcctttttgccttcttcagataatgagttgtacacagccaacatgccctgacataatttcaacagaaaaatcattataagcatcagctgtcaactccaaaactttaacaaatgcaaagaacgtaagaacgaaaataaggatgcacaagagatctaaagcttatagtagaattataaaatcacagcagagcattaccttagtcgatatggttcttgatatatttccagtaatacactcaacagtgttcttgtaagccagatcttcagccattccattttcagtgtaccttctgaatagggactccacaatgccatgaacagcaccaagtaaaatgcctataaattgttgtagaagtcagaaaacatgatattgtgaggtgctggaatagaagtgacacaataaactagatctacctcgctcgccaaagatgtcactcttgtattcctgttccagagtagtggcaaatgtgaaaggagagcctagggcaactgaccaccccaaggccacatcagtagctcgtccatcaacatcctgaattacagtagcacttatagatcagtaaaaaaaataaaataaaaaaaataaaaatccaaaacttcttcttttatcaagaagatgagatgcagatgcatcacctggtggactgcaaaactggaattaattcctgcaccgtttatctctttgccctggacataaagcctcctcacggaaggacccattcccttgggacacacagcaattacgctaatgttcttggggaaatccagcccaaccgactgcaaatggcccaaaagaaaaccatgggaaagaccaaggatgctgtttggcttcatgtgcgagaaaattttctcaaagttatcagcctgtatcatataatcatagcagataccacccgtcaaacaagattagttatgataaggaaaaaccatctgctaaaaaacaatcaattaattcaccaagaaacataatttaaccaaatacttcaattagcttggtcaagttaacaaacctgtgcagaatcagaaatgagtagcataacaagatcactgcttgagattgtttcataaatatcacccagagtcccactctcctcagtgaaaccagctgcacgagcttcagcaaaaagagcgagatcccttcctcaacccaatctatcaaacaaagagcaaaacatcagtacagtcgaaaatgagttgaatagccgaagcatgagtaaacacagcaaacaaagagaaaaaaaagtttaccttcaccacaatatcagactttgcctcagtaagagagtctctcaaattctgagcttgagcaggtccctgaacaaatagtagtacttccaaattaaaatatgaatctctttacgtatctacaaattcttacgatcaattacgcttaagagaatgaatatatatttatattaatatatgtacaagtcgtttttccttcagaagcacatatcattattcaacaaaatgaatgacatgcaacgcaagtttatagggataacaaaagagcctccatttctcaatcacataacaatgctttataagaacttgtagatcaatcagaacatgagtaaccaaaacagttaatcgaaatgctaactcatgaaacatgtattcagtcgattcaaaatgaaaagtaatacacaaaatgtgagaaattacctgtgaaccccaaccaattacaccaatctgcttgatgcccttaaaagcatcaggcaataaatggaacaaatctcttcctccttttacaatatactgcaacaaaaaaatcaagaaaccacgttaacaaatatattgaaaaaataaaaacattaacaataaaaagaatagttagtgttttacacaaataaaaagacacagtcaagttttaaacatttcagtacttctatgtaagctagcccaagttatcgtacagatatggtatcatgttgcatgtaaatatatttatagttaaaaagggtttgtttttctttatcagaaaacggaatggttcaacaaaatattctttcctctccaaaacccatttccaaaaatctacagaaaaactaaaaaaaaatcaattccaaaagacaagattaacgagttcataagctgaacaagagggggaaagagtgacctcttcgtgaccagcgaggttgaccttctccttcttgaaaacagaggtatcaaaatcgagagagatcggagacttgatcgcgggcgcagagaccatgcgagctccaagagctgagccggtagcgacattatcagcacgagaggctgcagtcttgagagacctgagagatttgcaggcgacggacacgaagccaagaggtttgggaatgagatggttttgggtagaaggagaggaggatggagcagagatggctggagagaaggaagatgtagccgccgccgccattgatgacagtagcagagtaaaatgaagagagtgttagagagagagaagagtaagggttttgtggcagacagagagcgtctcacctcaacaacagttctctttatattttgcagggccacacacactcgaaagtaatgttaaaataataaaaaagacaatttttattaaatattattcatttttctatttttctctccaaatttttaagggttttttcttactctccaaatttttaagggtttatccaatagtttttttttttctaataggggacttttcaaggccgaccctaggcataggcgggctaggcccatgcctagggcccacacctttcgggggcccaaagtaaaaaaaaaatattagacttttatt

SEQ ID NO: 295195 - DNA, 4161 bp, Cannabis indica
ctgttatggggtaggagagagagtagttgtgaggagtatagttatgcaggtttgaatggtgaagatgctaatgggaataggaatgatattcctaaagcgggtttgggacaacaaatgagagtgccccagaagactaaaagacaaggggagaccatttgtaaaggccataagaattatgaccttatgcttaatttgcagcttggaatcaggtattcattatttctttaaaaccaatgctctatctttctatcttagttaacattttgtttgtttttctgtctccaattcttgtcagcttgtttcttctttcttcatagggttgttcctgttttgatggtttgtggatccaaatacaattgttataattagaggcattgttgtggctatggttaacacgactttcttcttgttatgcagtttattagatttatgtttcatgcattggttctgtatagctgctgtgctgtatttataaaattctttgttctttatatataatgttgagttgaaactgatgtgatcaagtttcatcttcatttgaagggattatgttgatgaaaaaaaagttagtgttgtaattgtattagattttgcaattgatagttaaaggttttaacatttttgactcattattgtagacatgctgttggaagaccagctccaactgcatctcttgatctaaagccgtctgcttttgaccccaaggaaaattatggacaagatttcctccagaaggaactaaatataccccaccacaccaatcttgtgaatttaaatggaaggattactgtccacttgtcttcaggtcaggcattatagtacatagctcccacacacacacacacccctctctattttttttaattactaccaaaatggtctgtgctccccaaactattaataataaagctgataaagctggaaaacagactcaacaaattttgtctgaggatctttttaagtttctcatagtgagggaatcaagcaaatttgtagaaacagaaagctcgtaaaacaaaatttattttgtgtttgttttggatattggattttaccaaggaaaaactttgttagagaatatagtacacttctcttgaatgtatgttataattattttatgttttgtaaaattatacaaaatttaagttttattttttctataaacagctctcaattttttgtttgaattcaaacaaaagaaaatgaaatccatcaaaattcattatttccctctcgaaatccaagatccaaatagaggattcgtttacttattaattttggttctagtacttaccaaaaagtcatgtgtgaagcttatcacctattgatctttgccttgacatgttctcaggacattaaggaagctgtttaaagtagacccagctgattacatgatatctatttgtggcaatgatgcacttagggagctttcgtctccaggaaaaagtggtagtttcttttacttgaccaatgatgaccgttacatgataaagactatgaaaaaagcagaagtaaaagtgagttttgatgcatagttgatcttttccagttttgcctgaaattcttagctaatcatgttaccttgtcttgtggtcaaggtgcttataagaatgttgtcagcctattataaccatgttcgagcatttgagaacactctggtgactaaattttatggtctacactgtgtaaagttaatggggcaacctatacagaagaaggtaaaaaactgcatacttagtcttcttccaagcatattataagctgttacttagttttcttccaagcataatataagcagtgtttttcatgaagtgaggaggctgttgcttcttctacttacaacaagatagattgaccattattaattaattgatgttgtatttaaggtacgtttcatcattatggggaaccttttctgtaccgaatatacaattcacaggcgttttgacttgaagggatctgtcttgggccgaacaacagataagcctgagacagagattgatggaaccacaatcctgaaagaccttgatcttaactttatattccgacttcagaagtcatggtttcaggacttttgccggtgagaaagccaaaccaagcctccccaactcatagatttggccgaaaaattgaactgctttatgagttttcttcatcttcaaacagtgtactttatgtaaaatctttccaattaagccagcctttaaatatttccttttctgttgcaggcaaattgatagagactgtgagttccttgaacaggagaggatcatggattacagccttttggttggcctccatttcagaaatacatcagctgctggccatcttattccttctggagctcgaactcccggtggtaacttttcctcctacaagactttgtactcaaatgtttgctccatatctcattttgctttgctctgaacgcatgagactgtattttttactttcttgcaggtgatgataatgatgggagtctccaactttcaagggcagacatggatcagcttcttttagatccatccaggtaaaatgactctgccatagttgtcatttttaatatggttcaagaggaaggtacttatattgataaagctgcaacttttaggatgattaaaatcaacttgaagaattatacaccttttttaagatacattaagtggagaacttgaatcatttaaaacctcatttccttgacaggaaataatagaatagtagttatctctattacaggaagggacttttgatgttgaagcatatagttttctccacagattactattcatggatataataataatttaattaccatgaaatcatgattatcaatttggatgtgttgcaggtgggctagtataaaattgggtatgaacatgccagcaagagctgaacggacattgagaaaaaatgacttagaacttcagcttataggagaacccactggagaatattatgaagttatactgttttttggtgtcatagacatacttcaggactatgacattagcaaaaagcttgaacatgcctacaagtccattcagtatgatccaacatctatttcggctgttgatcccaaacagtactcaaggcgctttcgcgagttcatactcaaaattttcgctgaagacacttgaactagacattttaagcaaataaacggctgcattgtctggttaacatacagaatttgattctatttttgacagcaattcattgatttcagaagttgttcatcagctcgaactcaaatacaacatttttgcctttcacttttccaccattttgaggtaccatattagacctccaaaagcaaattacatcactttcattagtattttgtctcctttttttcccttatatataatgctacagctaaaatattccctatactatacactgcagcaaaaaagtgctgttataattagagaagcattgctagtgtaccccaattgtaaaaaatgtatccatatgtattattcttttctttatttctttttccaatttattttggctcaactgataaggagatctttggtctttttcttgagcttacactgaataaatttttgaatgtaaggttgttatctctttatttatttacatgacaaatgatgttctttttagattcatatgcttaagaccattgctacctccactttatacttttcacttgtgataaagttttccctagttacaatatcattcctcaaaatcgttttaggaacaaattaattatattctatggtaataagtaaataaaggtattataaaaaaaaactactttacaaaaatatcatctttaacaacaataataatagtaagaatcccataatcatcatttcgaaaaatatttatgtgcaattgtttggcacatcgatttactcttattactttttaaaaaataactttctaatacgttattttcatttatatataggaaaaaaattgaataattagtgattttgctcctgaattttttaaattccgccttcgaaaatatacggtttattaaaaattgggaaaaaaacaggaatattctaaaaagggaaaaatattacaacaatactgtgggccggcccaatgaacatttgtacagcccaaaaggaaaatattacaaaaataccacttgccattaccttcagccgcacgtcacaaacg

SEQ ID NO: 295196 - DNA, 1055 bp, Cannabis indica
gaatcggaaacattttctcaattctgtcaatggtagtagccggattagtcgaaaaggagagaagaagatgggccaactcagggatggcgtccatgtcggtgttctggttggccccacaattggtgttaatgggattttgtgaagcctttaacatgataggactaattgagtttttcaaccgccagtttccggatcacatgaggagcattggaaatgcgctcttctcttgctctttcgctggtgccagttacactagcagtatattggttactgtcctccatcgagttaccgctaccaatgaccgacctgattggttgactaatgatattaacaaggggaggctggactatttttactatcttttagctggtttgggtgtctttaatgttctttatttcctctattgtgctagtcgttatcgttacaaaggggctgtcatggaattggagaacaaagctacaaatgttttagatgtggagatgaattcggtgcttaataaagggctgagtacgtgaatcacttggtgggtgatgatcattgctcctcagaaataagtagtactactactatagtagtggtgagtgagtgatatatatagacacacaatgatatagacacacatatatatatataataaattaatatatccattttgtcatttaccctatacaacttcttattgaaattgaaaaaaatttgtaacttgttaatgacatgagatctataaataaaagataatgacaaaaagggaatatttctagctctatagcataattgatgggtcttctcactataagaaattatgcaattttgcatcgataaaagttaactgatttcactagtacacctttaccaatgccaaactgcgcttaccaaaagattgtcgatcgatgtagtttagttgaaaatatcacttttttcggcgtacaatgaacaatgccaacaacagttacatttgttgacctcaaaaattgattaactaatagcaatattgtcgtatagatctgatgtttgctacttgatacacaacaagaacaataaagtaaataagacaa

SEQ ID NO: 295197 - DNA, 1917 bp, Cannabis indica
gccaacattgagacacatggttttgattattgtgatcatgtgaagcatcctactttagaacctagctgggctgctgctatgatggaccgagtcgtaggcatggttgagagagacaaaaatcatgcctgtattatctcttggtccttgggaaatgaatctggatatggaccaaatcattttgctttagctggtatcaattttgtctctacgcacacaattttttttttctcaaagaagtatatatttgtgtttcttttccctttcaatttgtagttttagtaattaaatgaagacaatgctaacagagaagaactagcaaaaatagaaaaatgactcccaactgcaagattaaccaaagaataccaatgtttagtcattaaattaccttgattttttcaggaaactaaaattttaagatctcattttgttctcatctgggatacaatcctttaatggattttttttatttttgttattgatgttttcgaaagaaaatgctccctgctttttcttgattagtttatcttaaatttgtatgcttcaggttggattcgagggaaggatccctctcggttggtacattatgaaggaggtggttcaagaacctcatccacagatattgtatgccctatgtacatgcgggtttgggacatagtgaaaattgcaaatgatccaaatgaaattcgtccactgatattatgcgagtatgagtttgaacttttttttttcttgtcatcaaaaatagatgaaagcttcattcattcaaaaaaaaaaaaaaaaacaaagaaagaaatagatgagaaacccgcccttatctatgcttaaggtttctaaaaaattgaatggcaggtactcgcatgcaatgggaaatagctgtggtaatatacatgaatattgggaagcaattgatagcacatttggtctccaaggcggttttatatgggattgggttgatcaggttttgaatccttacctttagagatatttacacagtttccaattcatgatcaatgttttttcacctgctttctttggtcagttatttcattatattcacttccaatgctttcctgattctttgcgtcaaagtccttttgtttccccctttcaaccccaatcgtaatatgctaacgattttgtgctgctcacaggctctactgaaggatacagggaaaaatgtcaaacgctgggcatatggaggtgattttggcgatgttcctaatgatttgaacttctgcctgaatggtgttacttggccagatcgaactcctcatcctgcactgcatggtaacttgacgaattattatgtgtaccatgtaaataattgaattatcatgtgtacgtatacatataacataaattatgtattagttttcttacatggttttttgttgtttgcagaagtaaagtatctttatcaaccaatcaagattgcatttaccggaggttcattaaaggtaagtacacattattctttaagcttcatcatattctctttgaaaggtttttaacctactttaaacttgcagataacaaacactcatttttttgtgacaaccgaaggattggaattcacctgggctgctcacggggatggatgtaaacttggatctggagttttatctctcccagtaatagaacctcagcatagtcatgatattgaatgggagtcatctccatggtataatctgtggctcgtatcatccgcagaagagattctagtaacgataacttctaagcttttggattccacaatctgggttgaagctggtcatgtcatttcgtctgcacaagtccagcttcctgccaaaggaaaaaatactaaacatgtagccactctttcatttatacatcttattttggtgttgatactgaattttgctttttttttctttatgtatgtatatatatataaaa

SEQ ID NO: 295198 - DNA, 948 bp, Cannabis indica
ttaatttaaattaattttatatatatacaataaaaattaatgctttaaaatatgcaaatttgaatattaatcatgcatgtatatatcagggtaggtatggaggcagtgtatataaacaacgtacctgcatcatagccgcatatgtgtacgatgcagttatttcctgctcccattacttttttcattaaccacttgaggctagctcaagtggccataagaggtgttacctaattgtttcaaattattgaaactattctttgtatcttcctatctttctttcactctttaatccttattgtctggtttcttggaatatactatggctagaagaactacaagattcaacaaccctaataatagttataggagtagctatagtggtgccaaacaagctagttatagtttaaacaatgagtcattgcaacatagtgtatatgtttattatataaaatgtcattttcgtcccttaatgagcattgtattacgtaagtactacatacattaatattggaggagggtaatgttagaatactctgcattataatcaatatatctacataactaccattgatttaatattaaagtcaatacttaattaattgacaaaacattatattaattttaataccaatttaatttatttgtatataactactatcatcgggctttaatattagttatggtgttggtgttttaatatccatcatttgccattttaatttcttatctttcatatattttcttaatcatcataataatgtccactcaaatcttagcttcatcatcatcatccaaaaatgacaaaatacataaaattgttcgaccaacaacaaattatcatccatctatttggggagaccgattcttacatttcaatattccagaagaagaattggtaagtattaagattaatatacatattaataattatatatatatatatagtta

SEQ ID NO: 295199 - DNA, 2674 bp, Cannabis indica
tctattcagccaagctcaaaggaaatcatcgttccacttctaaatacctatagaagctatcaactccatatctatgatttccaatgtatactccatacatccgatactggtaaactttgcctatgccctggaaaggacataacacttatccaaggtgtaagtatacctatcgctgattattatgccagtctaaatccagtgaactgacaaatcagagaattaaacatttgaacatataatcatgattatattccactgtgttgacaaaactataatcaagaacaaatacatatgttcggacttaatagaatttatacattaaatacaatcatgaaataaatcatgtgaaccatgcaacataaaatgatttttgatctttattgaaatgagttttatttagggcactcccatcctacaaatgatctgatccagttatatgtttaaaatttatatctaattagatctagttataattggatatccaatttaattaattggattagttgtaatttgatggatcaattttgattgtttgtgttaatttctaaacaaccttaattattattattatattctatggtgatggtaagctatgtctttcaagtagatatttttgattttatacacaattagttgcttttgtgtgttatcaatcagtcttttattaccggctcctaataaataattagcgtcaatatccaatagtggttacttaatacttgctctcaccaaatttgatagccaatttcttcctttttaatgctctcaaaatttcaataaagaaaactcattcgaaaaaccatcaagcaatccaatgtccgaaccaatgccaatcgatccttaccaaagactccagattgtacagaatggcgacggaaccatcactcgattattcaaatttccagatgcacccactttacctgatcccactatgtctaccgcacctatagtactttccaaagatattgcccttgatcattcaaaatccacctggctcagagttttcataccccgtgatgcactggataataagctacgattgcctcttatagtctacttccatggcggtggattcatcctattcagtgcagcctcaactgtgactcataatttcacattcaacttagccgccgaaatctttgccattgtagtttctgtggagtatcgtctggctccggagcaccgtctgcctgcagcctacgatgacgccatggacgcactgtactatatcagaaccgccgatgatgattggctgagaaactacgctgacttgtcgaaatgcttcattatggggggcagtgcgggagggacaatagcttaccatgctgggcttcgggctgcagcggaggcccaacgtcttcggcccatgaggatccgtgggcttatattacatcagccattttttggtggtgtccaaagatgcgactcagaattgaggctggtcaatgattctgttcttccgctttgcgttagcgatttaatgtgggagttggctttgcctgagggagttgaccgtgatcatatgtattcgaatccgatggtgagtgatggttcaaagtcgttggagattatcaagtcgctgcagtggaaggtgatggtagcgggatgggatggggacccactttatgaccgtcagattgaatttgtgaaaatgttagagaaaatgagtgtaagtgtagtaggttattttggtgttggaggacatcatggggtagagatgtttgacttgtctaaggcaaagctactcatcttggctataaaaagtttcatatgtccttagagatgaatttgaatttgagagaagatattgatctttagattaaataaagcagcgttcattgtctatggctgtgttgtatatgtgctcctaaataatgattattgtgtttttcgtttttatgtctaatggagagcatgaccgtattaattttgtggattattgttaattagttcgttttgataattagcatgtattgtgctaagtttcattatgattggaagtgatgttactattagagatcaccaaacaattgagtgattttgctatttggttatgataattatatgaaagaacaaatgaatctaagataagcgaatggaattaaaattacaagaacaataacttagtttaataattaaggttatttatttatttagtggagttgggaagagtgccataagattataagatttgattgtggtatttctcaaagttttattttttttttaacaagggaataactttattcaaaaaccaaacaaaggcagtcccaccccacaaagaacaacagcagtcccgaacaagggaactgctctccaaaaccaactacccacactcaatgattgacttcatatacacattcatttagcttagtttgtgaatacccaaacccaatactctacattcaatcactttcttaatctccaagctaaggctaacagccgtgctacatttaagctcaaacaaataagtctttcgatttttccaaataaaatacaaaacaacattactaatgatcctgttgaaaaaacctattgcaattaaccacaatatttttcttctttgtatgtcaacaatgggatacttatcaaacaccacaacaagcaattattaaatatcaaccaaagcaccacaagcaatataaaatacacaaatcaagagtaaaagtgagac

SEQ ID NO: 295200 - DNA, 3025 bp, Cannabis indica
cgtgagcgtgggggtggggtgtggccgaagatggagaagacgaagatatcgatggtgggatctcattgaaccggagatgatgggggaggtgttgcgacagaggggctcacgacctgccatctttcttttctcttctcttttacttttttttatttttttattttttttagtaataagatagctaaataatttatttagttttaataatttatttaaaaaaaattaaataatgggccaatgatatttcaacacgtggtggttttcatttagtaaacggagcagttaaaaaaggactaacgaagcagttaaaaaacgtgacgttggggactattaccgctatttctcgaagttaaggactaatctgcatcaaagtaaatattttggggacttttgccgcaaatttccctatttaaatttgacctgaatttcttcagtcgaagctgatgttctctggatactcttcagacaaacaaacatcaataataaaccatgggaaattcaacctttcgttttgtttctgttgtgtgagaaatttaataaagattgaaacatgcaagtactcacttgtactcaaagaatatagtataaaattatatgtgatcagtatataaataataaaaaagacacacaatataaataataaaaaagacacaaaaaatatagtggtttagcaaaaagcctatctagtctattgttaaaaagtgatctcatatacactttgtttttttttttttcattctggtgagcttagtcccctttgaatagagagggaggcacctacttataggtagtaaatagaaattacaaagaaaatggtcataatgagatcgttacaaataataataggtgtatcgattatattgattaaatcaattataaagtaaatgtaacgctcactttaatggcacttgaatatttgactcttatcattattttttggtcgcacctcttcagttgatatcacagttttactcgaggtcccttttaataccgcgagttctcttttgtgtagtccttctcatgggagaggggaaagttatcccaataacacatgcccatagttcttctatagaaattgttctatgctgaagaactaaaaagtagcacgagctcgcgtttgttgttttctaactctgtgggtttcttataagaccatcgtataataataattatgttaacctcatggggttcttattgatgcatgaacctctcggggtccttatggatgtgtgaaccttttagggttcgtttcaatgcacgaacttcacgggattcttataagtgcatgaacctctcatgatttttatcgacgcatgaacttctcatgatttgtatagacgcatgaacctctcgggattcgtatcaatgcatcgtacgtgaacctcttgggattcttgttggtgcatgaacctctcagggttcttgaccatttatattaattgatggaacgagcgtaaatatctaggtcacatgttggacattcatatataggcgacatgcactcgcagggttcatacgagtcgtcgtgtatatattggatcttcaggccattcgtagtgaaagtgcaactgtcatttaggcgcaagctagggagaaatattaggtcatcacgtatactcagtatacgtcgtgactgtgcttaactctttacatcctgcttttactctatcttcatatgtgatgcatagtgtgtgattacaccttgtctcaatcacaccttatcgcattttttattacgcgaggtgtccatagggttttggtacccttgacatgtcatccttttcttaatttatgggaaatcaggtacctacgtgtcactcttatgcgagactgtactcgctagatgagaaaaaaatcatctaataacacatgattttagtttcgcgatgacagttgtatatcaaacggtaaaactatcgtgaggaacagttgagttgtcacattgcgagtgacttttgggtttaccttatcaaggttctatattgacatcactattatttattttttttaagacgtcatgccaacaaaatctttcaagatttgtgatgcttgattggaaggagtggtgcctaattggaaggagtggtgtcttttcgtgaataaatgaggctttgattgaccatatatacaatgtgctaatgcgttagaaaataacgagcactatcgcattcttgccataaacttgttattttatcatgcaaaaagtgagtttttaaactcacctaattgtgaatataaaaatatcatagtagactgactaaataatcatgtaaaaataaacacacattgagctcaccaatttacgaattaaataaaaaatgaactttggtatgtggtagccttgtcaattatttttatatgcatccatattttttatctaaattagattagataaaataaatatgtaaattaaaaaattgcagctggtataatgagaagcttaagttgcttgaagtataggattctggtcgattcgataaagattgaagcagttcgagattagccacgacctaagtcggctactgatatcaaaagttccttagggttagtcgtacgggtgtgcataaatcgatccaatccaataacaactgactgatccaattacaaccgattaccaaacattgaatatccaattgtgatctgactggattggatgttatatgtaatatccaattggatcggatcatatgttagataggtgtatgaaaatctaatacatccaatatccaattgaactaattagtattttcatttagtttgaatgagtgattagattttatattgttatacgtaaaatacatatgtatatatgaagattaacattaaaattttactctttttttcttggattggatggatccaatccaatctaatacatactcgacctaaaatattagatggattcgatctaatttaaaaaatactacatccaaaggatgatggatcgattggatgactgaaatttattagatcgactcagatagtaaaatctatcatccaatatataattagatcgaatttagat

SEQ ID NO: 295201 - DNA, 3147 bp, Cannabis indica
tattatttttgtttttaattttgttttgttctttttattttatgtttccaggttttttttcccagcaaagatggtactaaaataccaatgttcattgttgcgagaaaggatattgttttggatggatcacacccttgcttgttatatggatatggtggatttaatattaatataaccccctcattcagtgtaagtcgtatcgtactttcacggcatctgggtgctgttttctgcatagcaaacattcgtggtggtggagaatatggagaggaatggcataaagcaggctcacttgcaaagaaacagaattgctttgatgatttcatttctgcagctgaatacctcatatctactggttattcacaacctaaaaagttgtgtatagaaggtggaagtaatggggggcttcttgttggtgcttgcataaatcaggtgtgacatttcatgattttggttttcagtgttttttctgctttctttcacttatgcgtggttgattacaaaacaaattttttcattttgttacagagacctgatctttttggctgtgcactagctcatgttggtgtaatggacatgctgcgattccacaagtttaccataggttagtctatatacaccttttaacacaactaattaaatgtgtgcataagttcaaactgcagctgattgtttgctataataatttgtccaaaaaaaaaaaaaattcaggccacgcgtggacttcagattatggttgttctgacaaggaggaagagtttcactggcttatcaagtgagtattgtattttctagttatttgaaaacattataaccatacattcgcatcattatgttcttttttttgttctataaatttgtacctactactttcctttcgtctatttttcaggtactcgcctctacataatgtcaagagaccatgggagcagcactctgataaacttgtccagtacccatcgactatgttgttgaccgctgatcatgatgatcgtgttgtaccattacattcgttaaaactattggcggttagtatccctttgtgaaattctgaaatttaggcgacataatatgtttttgctgattaacattgggcaagtatttactaatttcctgtatagcagtaaattttaatgtgctagtaagattgtatattttccttgccttttgcagactatgcaatatgttctgtgcacgagcttagagaatagcccacagacgaatccaattattggtcgtattgagtgtaaagcaggccacggagctgggcgtccaacgaagaaaatggtaatattatttttctaaaatatattttagtaatccttgtgagatttatatttcgtgcacatatctaatagtcattttttttaattagatcgatgaagctgcggaccgctatagtttcatggcgaagatggtggatgcatcttgggtggagtagttgctttgggtggaataattgaaagactcttgtcatttttagtttacttattattgtaatatttgtaatccaattatatgtatccaaatttacttgaattgaaatattaactatagtaaatcccgacaaaaatatcaaccaaaatgaaatataaagtgttaaatttcaaagaagagtcgttaattaaacaaggggtattatatttacactctcaaaatttatttctacacccgaatgttaagtacactttattttatttgttaaaattttactttttataataattacacccatcaataattacaaaattagatttatctatacaccctatgccaatttaaaacttaaaacgcctgcatgtcttcaaatagtacttttgaaagttttgtttactaatttatttagcttttttttttcttgaaatagaccaatttatttagttcaaattgcagagaccattgatttatttacgtgtaaaatggtgatgactttcaacatttgtgaagtattggaagataaaggaagaagtgtggttatattagataatttattgatcacgataaataaatataatatttatatctcaaataaataatgctgaagcactatttattgagaaatagtgctaaagcattatttattgagttaaaaaagtgtattataattcaaatttagctcatttgatggaagattaattttacaaaattttcttatattttagagaatgggttataataagtcaaatttaactcacctaatgtgagtgcaagaaagggatttgttttagtagcgatgagatgttaattgttagggaattaacatcctatgtatatctttgacgcaaccttatgtcatttctaattaaagtaatgttaaaatacatcgtacgacgattaactaggacttcacatcttattacatggttgactaaattataattgtgtatcacttgatgtatatgtattgaattacaatttggtagaggtagtctcataatggaatgtttatttgattaaataaattaaataagagaatttgtaattataagttacataattttataacttgccttgtaggtgtgtaaataagcttcacatttaatttgaacatgaaaagtgcgttgtataatacagtagttacacgtgtataaatggcaatgatgacacgttgcctagcaaatgttattcaacgacatgttaacaacatgtcgtctagtacattacaattccattttgaaattgtattgtaacaatttggttagttccaaacacttttctaattaccaagtattctcttacttccataaacatccaactaataatcttgtggcgcagccaaaaggttgatagacgatatcaaatgcaaaggagaattgatgcttatgtcactctcatgtataatcttgatcttattgctgtgtttgtaatctcatatatccctttgtgatataatttattttaacagaagtcacgaataaatatttgtgagtgattacttaacaagatgaagaatacgaggatgagtgctaagcaaaaatttcatatctagagtgttaaaaataaatgtaaaatacaattttatatatgccaaatttatagtgtaagagtttattaattttagttcgaccaatctaagattataagaataatctcttaattacaatcatttcgtttaaaggaaacaccctttgattctaattacgatga

SEQ ID NO: 295202 - DNA, 2644 bp, Cannabis indica
taaaataacaaaagtaacaaagttacacaaggattttcttctatctataagaatttattatctaccctaagaacatgcaaaactaccctaaaaaaactagataataaaaccttaatatcagaaaagaaaacctaacatttagatagataaaatgataacaatttatatttataaacgtaaaagagaacataacatatggaaacgaacatgcattaataatttttcaatataatgtttttatatatatttatatcctataaatataatataacccatactataatatttcaaacaaattaaagttgttgcataattccatagtcgactgcacgacttgtctagttatttaattaaaaagcatctattatggtcaaacttgggagacacttccagtttctctggattaaaatccaataattttagaataataatgaccaaccaaatagatattatactttatacaatatttatatatatatatatatgatctctagagtagtactatttgagtattttttttttttagaaaaatattatattatttacaaaaaaatgcactatatatattatggcttatatgggagggagatcttatctattatcttgatcacttttggtgtttctatttcctttcctctttcatactatacaatacaacatccaatttaatttcgaaaaatatcaccaaaagtaaatttctttctttgtttttagtgcaattaagttaaatttaattttatgtgcataatactaaaaatggttggatgaaaattttaatttaatattctttggagtcaatttcaatgtcattaataatatgtacatgtaattttatgaatgggaaaaggttgtgaatgagagtgacccaacagcttaatttgcttttgactagtattggccaatttgatttttatgtgttcttctcaatcattatcaatttttgaagaattaaaaaaaatgtggtttttctcatttgtggattgtgatggtgctttttcattccctatatgttaatgggcttgggcccaacttgacatggaataccaccccatttcacatgctaaagtcagagactaattcttggtagggtaactctaatgagtaccactctgccatttgcattggaaaaaacatttcatatagtttcttaaaacaattcaattaaaaatcatctaactataaaagcatgagaggggtattaaagtggtgtagcttattttccataatttttgtccttgatcaattatgtcatgatttttttgaaaccgtacttaaaatggtatcatgaactagttactagtagaactttagttaagtttcaatcatgtgactaacatactattgacatgtaaagttgtaaatgtgtgggtcgaataggaccaactcttatcttaaaatgtcttcatgaatataaattgtattatcaattttataaagtagatatatttatattattagaggtaatatttatatattttgcatcaataaattagatttttcattgtggtccatattcaaaaaattattttaaaatataaacagagaacaactaaatacttatggggtaatattttttataatggtaatacattttataagaacaaccagttagtcctgacttgtgatatgggtttgtgtctctcattcttagagagtatttgtttaaggttgttagtttttgttgtctttgttgctttgctctgtctttgactatactttttgtgttgctctttcatggcttccaccagcatggctaccaacgagataatgaaaaaatggtttgatacttgcctgaaagtggggagaactatgaagttatttttgaaaaagacgaagtaaatgaagtggagtttgacggtgtcttataggccgtttactcacaaggaagatttctgatttttaaatttttcaaaacatcatagctgacctttagaaacccgagaaagaaatgtatgtgaaaatacttgaatcaaatcagtttctctttcaatttttttatgaaatcgatatacaatgggtcattacgtggagtccttggacttatgatcgtaaacaactcatcatccaaagattgaaaataggagaaaatcttaagacggtacaactcaacaagttagacatgtgggttcaagttcataatctccagtctggttttaagactgaacaggttgttcatgcaaccagtgactataggcaccttcatcgaatcggatctgaacaactatattggggtctagcgtgaatttttaagagtttaggtgtgtataaatattgatgttcctctaaaacaacggatgcggtttcgacgtcaaggaggggaagctttttatgccaattttaaatatgaaaaagttcccacattttattttatttgtggcactgtgggtcattcggaacgattatgcgaaagattatacgataccccaacggataaaattaagaaacctaataggatagagatgaaggcttcatcaaaacggcaaaattttttgacattgtcttcatggctccgaaattctaaaacggtcaccgcctccagtgatggtgctccaaacaacaacgttaatggagttaatgtttccccacaaaataaggctcattttggggataaaatcatgcatgatgatattgttgggttttatgc

SEQ ID NO: 295203 - DNA, 5564 bp, Cannabis indica
gcaaacttccaatcagggcatccccctgaattagaaagagctttgatagcagtgcttgaatcagagaggtgaacttcttgccatcccaattcagcagctcgggacagagcaagggagatggcctgaaattctgcttctaaagccgaaagtgccttaattttctgggattgaattgaccaacttccattgtgagaatcaacacatacagctgctattcctgcattctccctagtccaagaagcatcagaaaaaacaacattagaagaacacctgtaatctgcactggagcttcttgctgctgtgttcaaagggactggatttgtcatgtttaactcagtccttcctaggttgttggatatattttgaagttcaaaaaatctggttccaattttgtgcagggccacggtagtattggctgctgcatttcgaatgcaaagagcattcctttgatgccaaatttcagtaaaaacacatccaacatagttgagcaaatcaaacctgtgagtagctccttggagatctagcactttttcaaacaaattgatcaaattatcatcactaaaacattctgttctaatggaaaaaattccaccaaaccagattgctctagagaaactacactgccagaaaaggtgaaaagcactctctacttcagtatcacacagattgcagaatttgtcattgagaaaggtagtcggttttttgttgggattgcttcattcaagacacgccagagcatcactgaaactcttgggtgaactccatttccccaaatccatttccataagttctttcctatgccaaaccttgatgcattgtccacacggtaagcttctttgacagagaaaattcctacttgattgctcttccaaaaaacctgatcagaaaaaggggaaggaattctagggatgttactgatccgagtccccaattcatggccaaatacctgctcaataagttcctcattccacttattctcaattgaaacatcttccagggtctttatagtgtaacctctgccccttaggctgttcatcaagtttgcaaactcatgatactccatccatggaatccatggttggtgccaaaagctaatggaacttcctgatgccgcaactgatatatttgattactatacttattcatctctttttaggcggaaaagtattgtaaagactaaagaacataaaacgttttctcctaactaattctcttttttagtatatattcacttctttctaaactttaaaacttttaacaattcaatccaatatggcttatttataaagcattttatgattgtgatattctttcaatgttattttataaacatcttactatagaaatgatattcttcaaatgtagtattattctaataacttcttttaaagaatataatggatttttctattagaaattatttcatatatcattttattaattttttttttacaatttatagtttgggttgctccggtagtttctatgtgatttgttatgtggattttaattgtgatttaggttagtccgttagttgctatggagatttctatattgaattttatactgttttaaagtataaggataaacacaattaaaattaagcaaaaatactatattggaacagaaattgccaatactaatctatattttcatatatataccaatttatacattctacaatattattattattcccttacaagttacaaactacacaacactacataactaattaggtaaaactcatctcacatcattattaattatcaaacacattaactactaatcaaaccctattagcaactaattccaactctaacccattactctctttagacaaatcctcactagtatttttcttcttaatcacttgaattggcttataagtgtacattttagcacaccaaatataataaaccaaattcacaacttgtaacaaagtaagtaaccaataaaaatactctaatttacccttattcaaattatcattaggaagccaatttgagccatcagaacgagccgtgtacttatgtattagtgtaaccaaaagagtactcacataattcccagccgaaatcgaagtccaaaacagagccgtggctgtactcctcatgctttctggggcttgatcatagaaaaattctaagtgcccaattgacataaatgcctctgctattccatggagactatattgtggtacaagccaaaaaactgagatgggaattgttgttttgggtgatcggctaatccgtgagccgaagccgcggctttacgcttgatttcaacgaagccggctactaatgttgctatgattgaaattaggaaacctattcccattctttgtaggaatgttattcctctgtctagaccagtgaattttcttgccacgcgtattaaaacggcgtcgtataatgctatggtggagagcatggtaactatggtgaagacgctcattgagccagctgggatttcgaatgatttggtgaggtgtctattcatggttttggcttgttggagtgagaaggttccttgttgtgcgtaagctgttatcaggagtattcctgaggcccatattgggcccattctgattattgactttagttcttctacacgatggacggtgttgattctccataggttgggggattttacgttgtcttcttctgttattatggctgccttgtccaaaaacctgcatgtaattatttagttaaactaacatagtaaaaataatgattattactctcaattaaactcgattctaatgcttaaaataattatttaaatacacctttgttatggtcaacctcttattctcaacctttacttttaaaactacaagtcagagttttttttttcatctaattcttaatttttctaaagatttgattttttaaagttttataaaattaattccatgtgattatatcaaagtggactgtcccaacattagtaatttaagggttggattaaccgaacatgtgacgatggcccctgtgctagtgggccggaccaggcccaatcccaataactaggtatgtatagttgtgggctgataaggtgacgactgagaaggtggaaatggctaattatgggatatggaagacgagagaaatcttgtcctttttatgggtagaagacacagtgttattattatatataaacaacagaacaaacaacaagttaatgggattgggtcccattcataccaaaaataaactaaaataaaatgcatgcatgaatatataaatattattgtaatttaaccatattacaataacttcaacccaacacgtactggtttctgtctcttctccttttttctctttaataaattaaattaaaacaaagctatcctattattgattgaagggtgtattcatatttggtaattaaagctacatataatatttatattttcaacgataggttagatttggtagagaaaatcttacttaattacgaactaactgctacccctctaatcatgcttacttaatctcactaataataaacttttacattaacctctaaaataatcgatagtaactgtactggaattagtggttgaaaaaatcaatttctaccgacaatacatgacattgacatcaaacaaagtactatgtaatccaaaaacagactgtaaataaataattactacaggataaggcaaaaaactttatgatttctctttctcaccacttattagcatttgtaaaattaaaaaaatataaaaaagatataaggagagagagagagagagagagagagagtagttttcttacttcatttgcttagtgtgaacaagttctccatcaatagaaataagagcatcaagttcctcattttggtaaagctgagtagagtccgaaaccaaagccaatttcctctttttataggcagccacagatacttgtaccaaccgggtaaacgggctcccagccgggtctaaatttcggtaaagcgggtacccgattatgaaagcaataatggataagaacatggctatggttggaatcccaaggcccaaaccccaaccaacattatcttggacataaacaaggacagttacagctaccaatatggaagcccccatagtaaaataataccaattgaaatacttccatgtcttggtgttttgtttcgggtcattttcgttcgaactgatctgctccgaatgccaccacgcagggtcggatcccacccgacccgagagccgttagaagtagtgacatgtagagaatcgccacctgtcccgaatcggcttctttacacacttcttcgcctttacacggtggcggtcttaaggggggaagaattgctgagagtgttaagctaatcataattaattaaaaaaaaaacaatattaaattaaacataatattaattaattaatagctgtttacgcagctattaattaaaacagattcacgatttactacctgatcatcatgttattaaaacaatcaggtagtagatcgtgagcctgtttcatctcgaaccaaaaaatatttgtttaaaaatttactatttggtagatgatggaagcaacagtgatggtccagaagcggccggcgaatgaatcggccacgaaagctccgatcaagggtgtcaaactggcggtgccgccgaaattggtaagagtgttagcagctttggtgagtggcatatgaagctgtgttgttaagtaactaatcatatttgcattgaatcccacaactgctaacttctcacaaatttcatttgctataacacaaaacaaaaaaaaaggaaaaaatatcattacacaaaatcaagaatataataactaaataaatatcataattatatattaattaagcttacagaagataaagggcattgtgattaatcctcctttttttcttgattttttctccaccattttttccattgttattattttttttctagtgtatgtagaaatattataagagtgagtatataaatatacgtaaatataaggttatatttatatataataaatgttatgatatatgaaagtagagccactatatatagggtgtgtgttcagtatgatgtatcatcaaaacgagtgaatccaagagaatccaactattatttctatgctctttctttgcaatgatatgtacaattttatttatttatttatttatttttgaaagatatatatactacaattactcttatatgttataagtaagtggtatccattggtggaaattatatacatgcaatggaggaatttatttatttatttatttggagagaaaatgcaatggaggaattggtattttattattttttgtatttttgtggccagttggatttcgattttaattaataaatattgatagtacatggtgtgcaataatgtgagatagaagagtagtatgtatatggatgcatgtagggctacgtatatatagctcgattttttcacatgacacaaaattagtatgagctaggaaagtacgagctgttgagaattatggggttccatctcaaaaccaattggctatgagtagagtagcccatgttcttatatatggctcaattct

SEQ ID NO: 295204 - DNA, 1008 bp, Cannabis indica
aagagatgaagaacgagagaagatagaaagaagaagaagaagaagaagattagtcttttctgtattgaaacttcgaatgagtgaggtctctctctttggaatgaaacattcaatcctttgtgtttaagtacatttccccttttccctatctacaaatcacaacgacacacgtgtactctatttctaaacaaagagcttcttggttccaaagtggagtatattcatattagttattagtctacaactgagacatatagtcttatctcgatcagctcactcaagtcaaagaaaacagaattatataccaattctgttagagcattgctattgggtaatgggatggcaaaatgagtttatttctagtattgggtcgggcctcgacccaacggacagctgtgactcgaaacatccggatcgctatctgggtcatcaccccaacccaacacctttttttggtgtattgtgttgaagagtatgtaattacatttacctacaaataaacagaatatttataattgttaatattagactgtcgagaaatatctttacatacaattattcttatctgtagtaaaaataaaatatgataagtcccacttatgatattgttgtcggaggaatttagacaacaccaaaatatgcaagtattcaaagtggatatgaacattcacgagcagaactgcgagtagcctcccagaactacggttagtcaagtaatttggctaagaatcagacaaaaaataagaacagaaaagtaaatgaacataaggaattatagtggttcggcaggtagctacggtggtgctcggcctgcttagtccactcttggaaagagtctcttgctttggtttctttattactttgagagtgattacagaatttttgggattcagtctctttgaatatgaggtattcctcatatcatgaaaataaatatacaaaacaatcaagtattacaaatttaacatacaaaaaaatttaatacaaatataataaatatatattata

SEQ ID NO: 295205 - DNA, 5490 bp, Cannabis indica
tatgattttgtgtgttgtgaatttggttcatcaatcacttttttctatgattgtttctttaggattatacacagcagcccccagctcaagaactaattgcaagggatcttcatgacaacgaatggaagtttagacatatatttcgaggtgcatttaatttatgctgtttattttttcctgagctgtttaattgacattttttagttgccatagttggttttttaatctaatatatttccatagaaaatgtgaaatgttgcagtaattttaattgtcaagtatcattgttaggttaggtgcagtcttgttatcatcactatcttgtgatgcaaattcttttttcctgaaatttacaaatctaagcagccatttgattagttattttatacaagcagcactttgtagtacatcttataaaagctactatttactattaatttactagtattattacgtgcgaggcttctgaagctacttgccagtattctgttgggactacttaaaacctgtcatgaatatcaaatgcattgatagtacgaacacgttcatgaattttgaaattcatgaaatttgactggagacccccatgtggccccaaggagtttagtctgtggggattcgaaccttggaacaaatgcctataagcacattctaacactccttacctctagaccaccccttgggattaaccaaattcttcagttgttctcttttctctttaatattcctcttccctgtctactcaggtaagtcaacacattggggtcttgcccaagtgaatttaacacatagatgcccaaagttttacaattttggttttgcattttttgcttttagaaaataattgatagtccaaattactcaactttcctgatttattttatttattttattgagtcagtgcacatgattatcatttaataatcttgccctatgtttgaagggggaatgtagtagaatccattgtttgttaggagggagaaaggacgggagaggagagttggagggagaccttctctctccaaatcctaaaattttaatccttcctcttctgaaggacttcagaaaaagacaataaatttaccaaataccaaaattatcctttaaaaactaataaataattatactaaaaagaatactatgctaattttaactactagcttcctctccatccttccatttatcctaataccaaacaacacaaatgagagttactatcctctctatccatcatattctacatccttcctaaactctccatccatcctactctaccaaacatagccttaaggttttgtagcaagtagcaagaagtatttgtttttacttaatttgtcttacttatacaagatttactgtaacatgtaattgagcttcagtacaggcatattctgatctggatagacaatgtcttaactgaattttaacatagactttatgggattctgcatttcattcttaacaaatatgagatgtcagttcaggtatagatccacgattccagcttgttttagtttgtaatttgatctttatgtgttaaatgagcaggtcagcccaaaaggcatcttcttacaacaggatggagtgtgtttgttagcgcaaagagacttgttgctggagattcagtcctttttatctggtttggatttggatattcctattattttattttttctgttatatgattttggattgactctttttaagttggcacttgacaaagactaggaaatctaggattctgatcagtaattattctcagattatatcaattcgtttccaagtctatattatgcacaatattcatttaagaattgtgcaactgagtataattgccagtattttgcagggtatagagaatattgtgatagagtatatttttcataacctcagaatagactggcatccccaccttgagtttggaaggctgggctttccagcatagaacctggattctgtttcttatttgttgataattatatatattactttcagggttataaattcctttaaatgaattgtattctaccaggaatgaaaagaatcagctattattgggtatccgccgagctaatcgtcctcaaactgttatgccctcatctgttttatccagtgatagcatgcacatcggtctgcttgctgctgctgcacatgcagctgccacaaacagtcgttttacaatcttttataatccaaggtgactatctccctgtgctaattttgaacttctttagacagcagtgtatagttgattaagtggatgaaagtcttatcctcaatcttacctttcatcaaacctcccaggcaacagagtatttgctggacctgcttagggaaatatggttataaggatgctactaatttctattccaattgtattcttttcagggctagtccgtcagaatttgtcatacctttggccaaatatgtaaaagctgtctatcacacacgtgtttcagtgggcatgcgatttaggatgctgttcgagactgaagagtctagtgttcgtaggttggtgctcatgaattttatacattttgcattatcttggttcttttggagaatgattttaagattctattgtctgttatttttgttttctgaaaaattgtttaacatttttgttcttaatttttgataacctaattggttacatatacactctttattcttatggtggatgggctgatctttccaattagaggtgtgccatgttgtttaagaagtgattctggatttttttttcttagctctctactgttttggtttgattcctagtgtggttgacaattaatacttcctcctctgtttgcaatcctgttactctctttgattcatatttcaacaggtaaattgctttcttagaatattttgtttttacagctatgaatatttatttattttattaatttttggggttagggcatgggaagatatctttagatttggagaagacgtttctttgttagctaaacttttgtacacttgtctggtgggttgaggttcctcttgagcttatcacatttgtagatgaatatgataaatttaagttcaccttgccgctctttttactaatttacacttttaattaaatataaaaatgccacaatattttcagacatacaaggcacacgatttctgtagaatcacttcataagtgggtgttgtatttctttccctgcctcctgtctcccagtgtatagtgttctgttgctataatataatccttacggaaatcagatacccataattgctctgaaattattcatttgtcttttaagttgtggtatttatattaacatttacgctcattgggaatttaatatatgtctcctctttagatgtttttacatagcattacatgcagttatgcaactgcaactgttgagtacttactgggtgattacaaatttgttgccaggtacatgggaaccattactggcattagtgacttggatcctgttcgctggccgaattcacattggcgctctgtgaaggtttgccaaagcatttgattgttctttaacaaactcatttcttgattaataaccactatgagttcaacttacatgatatgcggtcgataacttattttggtattaatgcaggttggttgggatgaatctactgctggagagagacagccaagagtctcgctatgggagattgagccattaacaacatttccaatgtatccatccccatttcctctcagactgaagagaccatggccatcaggattaccctctttccatggtatggttgatattatctgaagcttgaaaagaaacatggttggttcttacctttggctaatattgtttttaatgttcaattcagctcttaaagatggtgatatgagcatgaactctccattgatgtggctccaaggtggggttggagatcccgcgcttcagtcattaaattttcagggacttgggattacaccctggatgcagccaaggcttgatgcttcaatggcaggtctacaacctgatgtgtaccaagcaatggctgctgctgcacttcaggaaatgaggggagtggatccttcaaaatgttcacctcaatctcttctgccattccagcaatctcaaaatgtttctaatgggtctgctgctttgattcagaggcaaatgttaccacaatcccaacctccaagtacttttcttcagagctttcaggaaaaccaggctccggctcagccccaacttatgccgcaacagttgcagcgttaccacccatataatgatcagcggcaacaacaacagcaacaacaacatcagcagcagcagcaacaacaacaacagcagcagcagcagcagcagcagcagcagcaacatcaacagcagcaacagcagcaacagcagcagcagcagcagcagcagcacaacagcagcagcaacaacaccagcatcagcaacaccagcagcagcaacaccagcatcagcagcaacatcagcagcagcagcttcaaccgtcacaacaattgcatcagttgtctgttcagcagcagattcctaatgttatgtctgctctatccagtttttcctctggtactcagtctcagtctccatcgctgcaggccatcccttcacagtgccagcagccaagctttcctgactctgttggaaatcccatatcttcatctgatgtttcccaaatccatagtatattaggttcactatcccagaatggaggatcccagttgcttaacttaagtggttccaattctggtatctcttcttcttctttgttagccaagcaaatctcagttgaaccacagatttcatctggaggttctccaagtgtactgcctcaggtggaacaattaggacctcctcagtcaaatgtttcagaccttgctactttgcctccatttcctgggagggagtactcagcataccacggtgctactgatccgcaaagcaatcttttgtttggagttaacattgattcttcatccctcatgttgcagaatgggatgtcgaaccttagaaatattggcagtgaaaatgattcactgtctatgccgtttggttcttcgaattattcgagtgccgccggcactgattttccccttaactcggacatgactactactagttgtgtagatgaatcaggtttcttgcagtcatccgagaatggggaccaagtgaatccaccgactagaacctttgtgaaggtaacccaatttaaattggtgctcataaagttgtcttctgaaagatgtagaatatttctaacattggttatttatttgtttactttcttatttttggcagtactcatatttgtttcttataactgaatctgttgtcttgttaaatgttttaatttctcacaggttcacaagtcggggtcctttgggaggtcactggatatatccaagttcagcagttatgatgaactgcgcagtgagctcgctcgcatgtttggccttgaaggccaactggaggaccctcagagatcaggctggcagcttgtatt

SEQ ID NO: 295206 - DNA, 2277 bp, Cannabis indica
ggaggagtttctgtaaacacagggaagcatggcaaaggaaccaaggttggcgttggtaaaggaggagtttctgtaagtacaggacataagggcaaacctgtttatgttggagtagggaaagggaaaaatccgttcatgtataattatgcagctagtgaaactcaacttcatgacaatccaaatgtagccctcttcttcttggagaaggacattcgacctggcactgaaatgaacttgaacttcttcaagactattacttcaaagcaagcaactttcgtgccccgccaaatagctcaatcaatcccattctcgtctcgaaaaattcctgaaattttgaacaaactttcagtgaaaccacagtcaaccgaggctgagatggtaaaggaaacaatcaaagagtgtgaagatcagtcgagcattaaaggtgaagacaagtattgtgccacttcactagaatcaatgatcgacttcaccacttcaaagttaggaaaaaaactacaatcaatctcaacagaagtggagaaggaatctgatgttgggatggagaagtacacaataacaaaagtagaaaagaagaaaagctcagcaggaggtggtgacaaaactgtagtgtgccacaaacaaaactatccatttgcagtgttctattgccacgcttcacaagccaccgaggcttatatggtgaccttagaatctgctaacgggaccaaagctaaggcagtagctgcctgccataaagacacgtctgcatggaacccaaagcacttggcctttcaagtccttaaagttaaaccaggagttattccagtctgccatttccttcctcaagatcatattgtctggatacaaaattagaaataagttatcatttgtgaatcgcgtattagtgtgtaagtgttttatatgtacgttcagtactgtcctatactcctatatgtaagacttattattatgagcttataaaagtattgtagactttcttttgacaaaataaagtttttactgtcattttgcttttataaaggcttggtttgttattaagtttgtaagagaacattgtgctctcaccatttgcaatatatactagccttttttttttctaaaaaatcaatgaattgtattttacattggaaatattacaatttattgagcacaaatgaacgcccagaacacagaaaaaaccaattacatctcaaacaactaaccatctcaaatcatttacattaattctactaagacttgtatacaaacttctatattataaacatcttgtttaattcttggaactataaaatccacagtcgatccataaataaacgacagctgaaagaatagtcaagaagacattatcttttcgaaccagttaagtctacttcttttaatccatttatagacaactaaaacagtacagacccttgtatgaattccaatccaggacagctaagaattcatacaatccgcagtcaaaaaagcagtgatagtaagtctcatctgccatatcataaatattgctgctcagatcaatgtccaaaccaaattggatcaattggtcctttgtcttcaacctcgagaagagagtaagccacatgaaaattctatgttttggggtaatcaatctgcaccaaatataagggaaatcaaacgcagtcctgtgttatactcagctaaaaaagcgtagattttggcaatggaaaatgcctgcttctcaaactcattattcgtgaaacaagccttaattttcttctttaccttgacaacttactttcaataccagtgttatccctattcccgaatgggttcaacgtggaaactgtagaagggtgccacatcaaatcttatgctgatgtcacggatccctctttaggataagttcacggaaggtattaaagtattcggaagaatgcttaccttgcgaaggatggagtgattattgaggttttaaattgatgcttccactatttggaggcaaactggaagcacaagcattccgagatgatcaagaatgggctacccccaggagccttgggctgtacttcctggatgctctctatgacctaatccataactacacccgacggttgcacctcgtctaacactacgtcagatgctatcccctgcatcagactgtggttgtacgcgtacgtgcctctgtagtgcttattgtccaacgacttgtctaggatattacttttaaaggagaaacctttgaacggcacatgctcattcttaaaatatattttaccaggatcttagatctactcacagtatgttgtttaa

SEQ ID NO: 295207 - DNA, 3860 bp, Cannabis indica
aatctgatccccaaatgcatcaccaaacatccctccacacctctattctgacctgcttaacctcagcctcagaaaaaggtttttcaaggtcagaatagaggtgtggagagatgctgctggaaatgccactaagggtaaaagcaatagcttcttggtcctgtccttgggtggagtagagttgagtatagaaatcaacaaaagggggaagcagggacgatgtgacactgatgatggaaccatcaataagggttatggatcttatgaaattatttattttcctagtcatggctttgtggtgaaaaaaatttgtatttttgtccccagatttaaaccaattaaccctagacatttgtttccaatagatttcatttttaagcagaagagcatctaacttggattgaaaggttttgacctgggccatgtcactaacagtagggttattggagaggagaattcggtcaagatctttttgtgtggcaatgatttgctgttgtaaagaactttggctagatctccatctcgaaatattctgaatgcactgattttggctaaaaggaatgtagagagataggaagattggtttgcttagattttttctaagaagtattgacaacttgaaaaaattgaccatccttaagccaatggttttcaaaggagaaggacttgggtactctagctttcctaagatcatcatcaagggagactattaaggcacgatggtcaaaaccatagaatccaagatggaaaagggtggttctagggaagagcccatgccattggttattagcaaggctctagttgatacgcttaagggcagtaccatgtttccaagtgaatttgttgccagtatgtgggaggggaagaagattgtgtttagctataaaactctgaaagtgaataatggcatcagagggaggtttggtcgtagtattcttgtcattgatagagagaatcattaaaatcaccacatattaaccaaggaagagtaggagcagagtcatgaattcgattaagaagagtccaagttaagtgtttattgctaggatatggagaaccataaaaactagtaaaatgccatattatattatcattaagatgaacaatacaatcgctatgactaagggagtaagttaaaatatttacattaatactattgttccaaaacaacaaaagccctccccctaaaccgctcctaagaactttaaaaacattgtcaaaagaaagactatgcttaatacgagttccatgacaagaaccaagcttggtttctaaaacaaaaacaaaatggattggtgctgtttcaccaacagggagagataacggaatgcccgaggactccctaaacctcgggcattccagcttaagagactcatttttcacggcagggttgccgagcaacacctgccatttcttcaggtggggagatggatgggaccatagcatcattagactgagaagctcttgctcgcttgagcatgctcttgacaaaatttgccttcagaaagattatttggtgccagaattagtagtggttgtgatggcagtcggttcttgaatggagatgcccctgttcaggggcctggaaaggggtggaattggggaactttgatttttagggataacaatccctttacctttgtcaatgtgagtgatgacagaggtaaccatgatgggagaagggggatggtggaagaagccatattcatgttaacaggtgaagtgtgcatttcattggtgttattggtggaagctgaattgagatttgggacagcaaagtcggacgcaacatggagaaattggtcaacagcctattgaaggtcttgttcggaggtgttactttggttcaggtattcctcaatggggtggagttggaaagatcaaaggggttctttttgatttgggatttggcaggggcttgaagaatctctttatagccatgttcagggggtacaggaaagttgtcacaatgcatcaggtatctaccacacttgttataagtgtggtcaagcataccacagaagtagctgaaattttgcagcctttcatacttaaaatttagccatttcatcttagtaatccttataaaacggatattcatcccacgcctaagaggcttggtaatatccaggagaactctaagacgaagataagggccaaagctttcaaggaaggagaggggatagacctcaatgagatcaccaagctcatcagcaatgaactgagcaagttgtggtgatttttggccgaaagggatgttgtgggattgaacccagaaaggaacaaaacaaaattggtcaggggtgagagtttcaaggctttccgaattggcaataatcataaggcatttatcaaaatgttagggttggtcttctaatacccttctgcggtgtccctcacattggaatgtgacgagaaacaacccagaatggtattcagagatagtaataggaaatcagagggtccaagcatcagtcatcactttctcaatccatgctagcttagtagatttaaaggtgaggattttgacaataaggcaatgagattcagagtctggtccagagttcagggaaacatggtcaaagtcgtggattaagttttcttcttcaatgagtgaaagggtagttggaggatttgtggtggaagaggaagccatggggacaatagagaaatagaaaaggctaaaaccaggaggagaagtactaacagaaaaaagccaaaccaaaccttaaatagcagattaacgagagggaaaagaaataatacttggaggagaaagggcgtggaagaaattggagaggtgtagacttcgtctgctcatatcccccctgagatagagtagggatcatgcaaggagtaatgattgctctaataagcctgaaagatctcaaaatgacggtaggagaatcagagaagagaggttcgaagagttgtgaaccatgaaatttttgaagccaaattaattgaggaagaacgtgtgtcgttgacagtaaatgcagccaaataagagcaattaatgcaagcatgagatgaattttgagtatatggggggtaatcataacagtaaagaagggaaattgacagttttgagcaattaatgctaaagacatttacgaagggtaagaaatctacaagccagcactagcctggtggaagcttcacgaagaagaataatggtgtgaattgttgataacgtgatctatctttcatatttgtttctcttacaaaaagaaataaaattttgtactcgataacaattggccaataaaattaaataaaaaataataaagcatatattaatgtgtaaataataatgggtgacactatctttctcatcttctttaatttcatctcaatcctttgatcgtagcaactataatggggattgaatttgtcatagacacaaaacaacaaaccacactaacacaagttgaatagaaaacaacaatacagtcctatatatgtatagaaaaacgattccattacttgccgataaattatttgaatataacaaaatcaatatttgcttaaaataataatctgattgatcaaaatgctccactaaactatatatatgaaaaaatatatatgcatctaatgacaatttatgtaaataaaaaagtataagtaaaaatgacttaccattttaatgatctcttaaactctgtccaacaaatagatataaaagtactgattatgtacaatgatcattcaaagcttttaggagaaaggaaaatttgaaagaaaaaagaaaagtattggaaaagattagcatggcccctgcgcaaggatgacacgcacaaatcgagaaaaaaaagtattggaaaagattactattaccatttatatatgtgtatatatat

SEQ ID NO: 295208 - DNA, 2185 bp, Cannabis indica
cataacacttatccaatgtataaataaactttattgctgattatcatgtcagtgtaaatctaacgtactgacaaatcatgagacataaactttgaaacatataatcaagattatattccactatgttgacaacactacaatcatgtataaatatatgttctgaatttaatagaatttatacattaaacatataatcatgaaagcaatcatgtgaaccattcaacataaaataatttttgatcttttattaattagtaaatctaattatattgaaatgaattttatttaagtcataaaatctcaatactaaaaagtcggtaaagatatttctgtttataaaataagatttgaatatttatatatatacttgaatattaaattattaatatttaatattgaataatttatatatgtaaatatcaaaaaattccttattcatacatgagaatgtatttattttgtacggagaattaagagcacttagtcataaataaaacagtcattaacatataaaagtttaggaatctttaattaatagttgctatagtgtaattcactgatgcccgttattcgatgcaaataatctcgttttggattactgatgtagtatgacatctaatagtatggataactaggaacatgatttaaaattatagaatcttgactttcttaacggattgaatgttgtaaccatttaagtgttaattttggaactgaaaagttgtccacaaattaaattggatctaaattatactttcactagtgaattaacattactaaaggtataaataagtaatttgcaacgtcctacttgattaggaccactacaatgctaatgtaaattgatgtgctcacattttctattcaaagaattttcttgaaaatcgtttcaaatttaaactgttaattaaacattaaacttttacaatatataaccatacacagaaagccaggatcccatcttaggaaattataacattattcaaaatacattttacaaaagtattgcaccgcgactataaattgaagacccaagtcgtcccgagaccgaacactccaggtctaaccatcctgatatgtacaaccatcctcgagctctagacttattggggctcaccttttacttttcctttacttacacatgtaaataatatctgttagtcgacaggctcagtaagtaaagcacaaaacatataacatgataccaacttgtatctaggcgctcatacacctatttacaaggcttcagatgaatcaagaacgttcttaacaaaagtacgagctctataccacatgcactaagtacttgtcccgtactagtgttgataaggctgaactgcacctcgagtaccactgagtgttataccacatgcactttgacccatcccgtactagtattggtaacactatgtcatacccttgtaacatcatacattgtaccaatgcactccgtaccgcaaccgtactattgttggtagtatacaattcacataaaacagcatgcatataacacacatgcacttatacatatacacatattatgttaatcttacctcatttttagatttaagtgtgtcagtcaaccttaatagaaattcacgcgcagaacggaggccctatgttataatcacgcaaaacggataaacaactttctaaaaccttattagggacctaaactttaaactaaaaatttctctatcgataaataacatgaaaataccctaaatatcgaagaaacacgaaaaaataagactatggaaaaaaaatggcaggtcatttttgtataaacagcaaatcgtttttctgggtccttaccagtaaaaatagtagactgtttcctaataaatggtctggcaatttctactgtagaaaaaaactaagtcttatttcgagctaaaaccaactctaaacttggtaaaacttcccagaacacctacatatacctccatgcatatatcatgcaatggaaacaagtatagctcaaaattacaaaatctaccattattgagccaaatttgagttcttgacctcaaacttgttcaacaactcaactagcctttaaatttctctcactaaaacttcaactaatccaaaatcaacccagataactgttaggtttgttaggttttatgccctaaataaaactccatttcaatgtaatctattttattcaacatcaataaag

SEQ ID NO: 295209 - DNA, 5105 bp, Cannabis indica
gactactgactgtcacagaaagcttggccgatatcctgttcaaggttgccttccaagcaattgggttacttgaagctaatttgatgtcatgcactatccagcttcaaagctttaatggagattccttactacatatgggaaagattcagctcctagttacgttgaacgggggtgtagtcagaagcaacacaacctccgcgttcaattattgcatgttcatagtggtggactgtcccattgcatacaacattattctaggataaccagtcctagtcaattttgaagttgtaactttcgtttgacatttgtgcatgaagttcacaagcgacaatggaagcattggtgcggtaaaaggcaatcagagaagcgccaaaaaatgttataatgtctaaaccaagtcagtttttatggtcagagaagaaattgaagaagagggtcccagaatacttgcccatcagacataaggggtaattcgagaagagggtgaattagatcctcaagtacgcgtagaaagaatgatcaaactattggaagaagctgaataaatatgcatcaataagacatatcctatgaaaatcatcaaagtaggacaaaatttacttttggtggtcaaagacaaatcgtgtccatagtgaaaaagaatcaagatgtattgacgtggagccattcggacatgactgaggtcagtcccaatataatttgccacactcttaacattgacaaagacacagacccattctgacagaagagaagaccattagatatggtctgggctgaggtagtgaaagcagaagtcgagaaactaacctctatagagttcctcaggaaagctttatatctagtttacccagtgctaatctcgaaaaccaaatggaacatggagagtgtgcatcaaattcacgtacataaacaaggcttgtctgaaagattgcttcccacttccccggatcgatcaaatagtggatgccacgtcaaggtatgaacttctaagctttatggacacgtactccagctacaatcagatcaaaatgcaagtagccgaccaagaacatacaaatttctacacaaacaaaaaggtgtactgctatgttgtcatgtcctttgggctcaagaatgtcagagcaacatatcaacgtctggtgaacaatatgttcaaggatgtcttggggaagaactgtttgaacttatttgaccatgatcttaatttagtaacatgtatgttgattataaacaatataatctaataatataacatggacccaccctatacctggtcacacacactcacaccacacacatgtgccacacacacccaccttcaaaaataaaaatcttaatctcatttccccttcccattctcccccaattcccttcctgaagccccccacccaccgaccttctctaatcttagcagccaccaccacgcatcagcggtgcaccagacagacagagcaacaccacccatgtgcatttttttcctagctctacgtgtgtgagtctccctctctctctcaatctcatattttggtctctcctcctccctccaccaatttaacatctctagctagcgacctcctccctcctcgacaatcttgcaatggtggtcttccctaaaaaatggactatacatgttatttgtatattatttaatttaattatttttctttatcagcccaacccaacccaactcaaaactcggaccaataccacccgaacccaaacacacctgcactcaaacaaacctggacccgaaaccaaaaaacccgaatcaaaatccaacaagtaccatttatattttgttaaacctaaagttcaaaactcatacgcagttaaacccgcccaatgttcaactctagcccttgtcaatagtaattactatgggtgtaaatgctaatatctatttttagtaggcctaaaagtgtaattatggaatatttgatttccattgtgactcactgtacggctacggctagggcgaagaaaaatcccaaactcaaagaaggtttgaaatggaagctgaagaagtagtacttgaagaattactcaacgttgaagttgagattcacgaggttgaaggttcgttcttattgctatttcccctctctctttcttcaaatcattaatttttattatttttgttgtttttttcatttgacaatttctctctttgattttactgtattcgaaacctaattcgagaaatttgttgaagaaatggattcatgaaacggtcaatcatggaaattttttagctttaatgaaacgagggagtaatttggctgattggctgaagtattgttaggagagaaatcatggaatcaatcctaacattttcgaaattatggtgttaattttctctttctctgttgttttctatgctattatcataaaattaggttctttatcctttcagattcagtcaatatgatttcttaagcttatgttttgaactaaagtgatttaaggagattgaatgtttttgtttgatttttgaaagcactgaattcccacaaggggtggctttagtattatcctttttgcattgttgaaaaatagaaaatttgggacaatgctgagaaaaatgaaatagtaatgcgggaaagttttaacttgggaagcacctgctttttctgttttacttttatcaactgaatgtgaagaagatggcctatgaattacagaaagaaaaattcagtgctgatcaaaagtggttatggagtttaatcatggttgttgcccttctgcatttcgggcttttataattatggtattgagaattgattatgcagtctgttgattttatagtcctttattcatttatcattgctttcttcttattatatcttgtactttttccttttgagatgagattaaagcttgattttaaaaacacttgtttttgtttatcttatacgatcccttattaattctgaatgtcgttttgttttcatactttaagaccatttgtggacacacataacttcttttttgtgcttcatttatggttaattttttattttccagaacaaatatcggtgttgcttgaaaaacaagagagactatatcagagacaatcagaactaaagaccctgctggaagcagcgaaagggtccacgaacaatgttaatgatagtactccaactgttgtagaaaattggtctgggtcttttgagtgggattctgaagctgatgatattagattcaatatctttggcatatcctcttatcgtgccaatcaacgagaggtgactacattgtagatacactcatgaaaaggaaaaaccaactctgtgaatacattgtgagtaaaaactccagagagttaaacattatgaaagaacaacagtgcatgataagtttgtgtgcaaatgtttaatgctctggagtcattattcgcatgtgtttttgtgaaatttactgattttgtcaactaatatcagatcataaatgctgtcatgagtggaagagatgttctagtgattatggctgctggtggtgggaagagcctctgttatcagcttccagcacttcttcgtaatggagttgcccttgttgtcagtcccctactttcactaatccaggatcaggtagcttgtttaaactcagtcaaaccctttgtaaggatgacatatgcaaacttcatcttagaaatctaaatcagcttctttgacaataaacatgggtttaggtgatgggcttggctgctttaggaatttcggcaaatatgttgacgtcaactactagtaaggaggaggagaaatttatttacaaggcccttgaaaagggtgaaggagacttgaaaatattgtacgtgacaccagagaaggtatcaaagagcaagagatttatgtcaaagcttgaaaagtgccaccatgctggtcgtctcgctttgatttcaattgatgtaaggattttgctttcaatcaaatttgatttgagatcatgtgcattattgaagtaaattaatatttttttgttgaattttcttattcaacctaatggtatttaggatttagttatttgaaataaagatttagtctttggtcgaatagctgggttttattgtgcatccctttatctaagattattattttgatttgattcattcctttatttaaaaatatatgtatgatacgcctgtgtacaaagaaatcaatctaaaataatgattaagcctttccctataatgtagttaaaatgttttatcaattcttggaatctagacatgtttcctagtgtgtctgtgtgtttctttaattacataacttgtataattgataatggtattaagacataatcataccatcaatattttgattaggtattagttcaaaatgtttcttgaaggttgagtttttatgggcttaagggcttaaggtagcttaagctcttggtatggattgtttatctaacaaaatctctaattggaattgctatgaagtgtagcttcctatgaggctcttctaaataacatattaagctattcaaatttttaaccctccttgaagtggatggaaggcttaaaaggctaaagaaagctatttctaactggcccaaagttcattgcttgttcgtcttctaaatttgtaatcatgatattttctgatgggtctttaatttatctcaatatttagagcaggaggtcttgaatttaaaattttgcaagtgccctcttcaattgtcaccacacgataagttgttgttctcacactatttctccctgcccagtccacatatgaaagggattcgcaatttaccacttctgctatcttgtaatagttatttagctatttatagtgcaaattaccatgaatttactcatgttttccttttgttgtggttggagatgtgtaatattaaataaaagggtaaacttcatgactgctttctgtattattttagaatatatgtaacttaaggtatgcaactgagttttaagctctttggggttcttcgcaggaggcacactgctgcagccaatggggtcatgattttcgacctgactataaaaaccttggcatccttaagactcaatttcccaatgttcccatgattgctctgactgtatgtcttttttctacctatgtatagtttctattatttaa

SEQ ID NO: 295210 - DNA, 1346 bp, Cannabis indica
tacctctctctaagtcgttaaacttttccaaaacaagatgatcctaagctcttaagtcatgagctctaattgtctaatgtatgcatggcacaaaaacaaaaaaatggtatcttgtgcttctttctcttcattacaatgtggttttgggtttacaaagtgaagtataatattgatggttcctttcaacatttcaaagctcgactagtggccaaaaatttatacaggaggcttggtgtagattttggtgagacatttagtctagtcatcaaggcatctacagtttaggttgtcttaactatagccattgccaataatatggatataagacaacttgacattaataatgtgttttttcaatgatactcttgattaggatgtatacatgacacaaacataagaatttgaaaatcctaccaagccatgttatgtttggaaattacaaaaatcaatctatggccaagctcttagagtctagtattaacaaagctcactctactagagtgaaagtttaagaactcaagggcgtatcccttattatttatgttgaaacaccctgattatgttgttacggtcttgatatatgtagatggtgtcatcattactggtagtaacacaaaggaactatagtgctttatagttcgattaaacaagaccttctctctcaaagaccttggaggcttgaattataatctaggaattgaagcttatagagatgatattgtcatgggcttgtctcaagagaaatacatcagtgagctaattcaacgaataaacatgtacaatctgaagtcgagttctacccttatgacaactagtaaaccttgtccatttatgatggtgaaccaatgacagacccttctcattacagaagtgtcattggtgcactgcagtatctcaatcatacaaggtaagacatctcttttgcaataaataagcttagtcaattccttaaaagaactataagtgtgcactagaatgcaatcaaacatgtgttgagatatcttaaaagaacactgaaccatggcatacacataaccccttatgatcggctgactttctctagtttctcaaatgtcgattgggcatgatgtccaaacgataaaataccaatagtaggttattatatgttcttaggggtctctctcttctcatggtcatctaggaaacaaacagtagtagctcggtctagtataaagccctggataagttggctgctgaaatgacttggctccaagaattacttaaggaaatgaagttcaagcttcctactgctctagttatttggtgtgataatatgagtgctagtgttgtaacaccctaactaccttaggcgtattacgtgattt

SEQ ID NO: 295211 - DNA, 3003 bp, Cannabis indica
tgaggcccttcccaactcgaatttggttgggtcttgatgtagatatgaatctcttccacctcttccatgggcttgaggttggcttcgactcccgttcggggatctaattcatcctgtacctctagtgggtgccctcttctcacaggttggatcatgaggattgctaatttggaggccacattataacaatttcttgcttccccttggttccctcagacagttcccacacccatagagagagtagggaatttgagacacaaaaacatgattgaccttatggctttgaaatccactagtatcagttgcctaattattatgttgtaagttgtttgacagtctacaacaataaaggtgcagtacttgaatgtactttgagggtatctaggcacaaagtcattgggatcctaatttttcccatgggaatgagggagtttccattaaacctggtaatttatgagccactaggtgacaagtctcggtctatgaggccaatgacaaggaaggcctttttgaacaatatgtaaactaaactcccattatccgcaaaaatttgtgctactatcttgttggaaatgggagtttcaattaccagtgagtcgtggtgtggaaaaggtatcgtcttggcatcttcctcgataaatgttatgagttgatccatgagacgaggtctctgagctggtagttggcccacttcccatacttatttgtcatggtccaggcccttggcatacatttttagctcattaagggttgaaccttccatgtgaggacctctagagatcatatccactcttccatttagtctaggaggttgtcatagcaaagtccattatttttggggaagggctccctgaggggcttgcacttcagaagcttgcgccacgcctccgggtggtagctgaatcctaaaatgtcctttttttcatatggggcaagcagttttctacccactcatacaagtggccttgccgtatcaggcgtttaatcttgtctttcaagtttttgtagtcattagtagtgtgcccagtatcattgtggttccacatactttgttggggtcttgctgggagctgtctcgatataaaggaggcagtctctagtagtgaacatttttccttgtggccaaatacacatgctcttatgtatccactagatcagtatattgcatatactaggaattatacctggttatttttgcgtttttgctcactctggatgcttcttttggatgaccgtttacttttgcgaggcttttggagctgtaactcacttgccataagggttgcagactgagcaagatattgcatgaaagttctgggagcaagaacacttattggcagcccataattagagtgggctagtgccatgatagaattcagagagtatccgagtgtagcttggaactgaacgcttggcatgctactcatttgtggagcaataggaggtgtgatccctgggaaatgcactccaggtgcgtatctagggcctctagttgggtagtgtcctctaaaagcagttatttgtgcctcttctagattaacgtacttttgagcccttttctagaaatcctataagctggctacaccctcctgctatagctaattccaaataggagttcccgtccatatttcagcttgcaataaagctaactgatgttgtcatctaccttcttggttttggaagcctcctttttgaacctcttgatgaagttcttcaaggttcccattggtagctatttgatattggtcagggcactaacttcaaggttttcattctagccgtaacaaacttccttttaaagttaatctataaattattccaaaaatccacaaatccaggttcaaacttcctgaaccatttttctgtgaatcccgccaatgtcaatgggaaacacaaacatttggcatcgttggtaatcctcttgaccatcataactctatgaaatctggacaaatgatcacttgggcatatgtcgctcgtgtataaagtcatttttggcattttgaatttcttttggagcttagattctaatatatgtctcgtgtaatgctccaaatccttgcaatctaactccaagtcatcacccttctacctctaggagaccctcgctctatctttctagagaattgtaagtttgaccaaaattccttcatttaagacacttgcaaaagctggtgcaactttcttccttagatcaagggatgctctcaaatctccgtgattgacattgagcttctgtcttagatcgatagggggatccctcctggttgaattctttggtttttctggctcttgatgcacgaacacgctcctttgatctcatcaatcctgggggctagtctttcccttgctaaatctacccccatgcaaacttttcccttttgggagatcaaaatgaatagcccatggatccttagccttattatttcttttggcgacaaccatagggttctcctttgtagcaaattttcttagaggatatctaatgggactaggttccctatgcttttgtttctaaccttcttcgggttgagagggctccatctcggtccctttttgtacaaatgggactgtagatgagtccacttggatgcccgcattttccattgcccttttcatggaaatcaatatttcttgcatcctccttttttgctccttttgttctaccaactcaacctcatagtcgatagccttttttcttagtttgacctgctctggatagttatcttcatcgtgccttcatattcttcttggttagaatattctggatcattagtgtccccttctccttcatcgttcaccctagatgttgcctcttcttcttcttctggatccttggggtcatctcagtgttgcagacacaaagagcttgtttggctgtgttttcagttttcagtttttgaaattgtgtttttaaaagtgagaatagaaaactattttttgacattttaaaaatttaatggtgtttgacacaaatttttaaaaactgtttttagatttttt

SEQ ID NO: 295212 - DNA, 5477 bp, Cannabis indica
ccccacctattgtgtaacttttattaccttttctattttaaccttttaaaaaaaatacacatatattaatgtaaaaataagataaaattataatttaaaataaatgtagaagcacaatttttcttattttttggaacctagttgaagaggcatgagcgtagatctttcttagccctgaaatcggtagcaggcttaggcttcatcttagaccctctcaaagtctaggccaaccattagtaagtcacgtattctgtgtgtgcgacgagagtgactataaaaattgaaggtggtccaatttcccatgtcaagaatttaaagagttctccgattgtcaacttggcctacacaatagtggacccaagaaccggagttattcagtgtctgcaaatcaataaagagagaatgtatcatggccgttggatcattttcttgaacagataaacatgaaccgacatttccctcttggggttggcattcataataatattaatactggagttggtattggtgaaatttacgtttactatttattactggtttagtaaagagagtaaagaacactgacaatccaaaactaccctcttgccgcgcctattgagtattgagtacgagtcacatttacgatgttctcttcactactaaatctgtctccaactcactatacacaagtcgcattataacagagtaagaggtagttaagttgttcatttcacttttttttcttttttttttagggtgtacatttcactgctcattggttatcaaaaccaaatcattgtacaataaatatctccacatttgaaccaaaattcactatttctagtacaagttaccactaactaaattgatgcttcaaccatattttccttcttaatgtctttatcaagagacaagagcaactgtcaccaagtagaaaatgacataataataatatcaccacaaatagagggagggagggcaatggcataataagccacactgacttgggccaaccttgcttaactaacaaccttattaattgatctacagctgtatatatgtattttaatcttttaataggcccatccactgttataattgctgccaaaaaaacagtgtgtgcatatctacatacaatctcctagcacagcacagctagctagcatggctagtgaaagtgggcttatgtaatccaccaaggttacattttcagaatcttctttcatatcatattatcgtgcatggaaaatatacaaataaaagtaaataaaataaaaaatggggttttctaacaatagtgattaccaatgatgaacaagacaaatttcagtgtttctctgtgaaatcacaatcactttcaaatcgagccagcagcctaaatattcgggtagatgaaataaaactttcacatttaatttacagtatagttgtagaacatcaaccaactaccatcacaattataattctttttttttttttttgtcactttttgttttccctaagttcaaattaaaaaaaaattctctaatcctttccctccctcacaactactttcagaagaaaaaaaaaaaccaccaatttgattgagaatataaaagctcaagatacttaaaataaaaggaaaaacaaaaaaaaaaatataatatttgtgcctaggctacactgccatgatcggaggtgtcttcataatagtaaggggacagtttgccgtccttcttggctgccttgatctcggcggcaccaccaacttcttgaagcaatttcacaacccttctcattgagggtcgattgatcggaagagggctagtgcaaagcagcccaatattgaggactttgcacacttcttccttgtaacatgaatccagtttagagtcgatgatatggtcaactcctttctgatctaaagtggtacaaacccacttaaccaaatccttttccccaaaatctggatcaactgggagtctaccagtgactaactccagtataacaactccaaagctatatatgtcacttttttcattcactcttagtgtgtatgcatattctgcaacaacaacagtacaacaaaaacagagcataacagttagaagatatgaaatttgaatgacaattactctaaaatcgattgagaactgattttggcaatgaagagaatgagttttaagttaactaaccaggagcaatgtatccacatgaaccagctatgacagacatggacttaggccctttcccagataaatcaaccaccttagcaactccaaaatcggccactcttgcaccaaaatcgccatccaacaagatattattagatttcacatctctgtgtacaatgggaggaacacagtcgtggtgaagataggaaagtccctctgctgcatcaacagcaattttgaaccttgtcggccagtcgagcagacctcctttactgctgtgaagcaaatcgcctagactaccattagacatgtactcataaaccaggagtttgcaatccctagttgtgcaacagcaccacaatttaacaatactcttgtgcctaatcttccccaaagtctccacctctgcttcaaatccatcatccttgaccccctcccttttcgaggtcatcactttcgcagtcctttttcacacctccccagagctttttcacagctacggcctcaccattgctaagaaccactttgtagactttcccggaaccgccactgccgatgacattatcttcatctagacaatcaagaatctcatactcactgaaacccagtttgtgaacgacattaatgtccatttggacttgtctatggctctctttgcgttcttgaatttcctgtacttcaagtaaaacaaaacgacacccaccacaaagactaagcttgcgagaatgaacatgcttctaagaacccaaatgtaaccttggctcttagcctcagtactattatcgcataagccttttaagcttccacaaaggcaaggattgcctataaaactggttttgtaagtggccttagctagtgaaggaggaagatcaccggaaagacggttgttcgatagattgagcagattgagtttcagattctgaagcccaaaagggacttctccagaaaattgattgtctgaaagatcaagataattaagcacagccattttcccaattccacttgggattttcccggaaagtttgttgtttgctagatttaattcattgagcttcttccatgattcgattttggttggaaagtgaccagagagctcattgctgtgaagatccaacgttgcgagctgtggaagactcactatactctctggcagaggaccactaagaccattgtcgtaacccaaaagctccacaagattttcaacccacccgatctcttctgggattggtccggtgaaattgttcttcgagattataagaagggaaaggttcgccgctccggcaatggtcttcgctatcgacccagaaagtttgttctccactagttccagcaaataaacacgtgggagtccccaaacaccggccggaacttcgccggataactggttatgtcctaaacgaagccgaaccaaactctcgcagtcgccaagacttgctgggatttcgccggagaacgagttgtctatcatcagaagctcctctaactcgcttttttcgcaaagggtctctggaatttcgccggtaaagttgttgctagaaacatcaagccaccgtaacggggaattcttgccgagattctttggaagctctccggtgaggaagtttctgaaaagccttagctcgtacagtgccggggagttgacaatgctctccggtaactttccttgaaagcggttctcgtagagattaaggctttcgagggacaaattgcaaagctcctccggaatcgtcccagacaactcgttcatcgacgcatcaaggagcctcaatgccgttaagttcgacattcctggaggcaactcgccggacaacgagttattgtagagctcaatctgaaccacacttgacaaaccaacgagggaagatgggatcggtccgtgcaagttgttgatagccaggtccaaatctttcaacatcttgagttgacccaacgagtcaggaatctcacccaccaaattacagtccgtcagccacagaacctcaagattcgtaaggttgccaaactccggcgggatccgacccggtaaaaatgggttgtaagaaaggttaagcattttcagactacttacattcccaaaaaacggaggtaaaacgccgtcaaaaagattataaacaagggatatcacctcaagcttctgaaaccggccaaaactgaccggaatctcacctgaaaagttgtttccagtcaagtccaagtacttaagctccggcaagtcagcaagcgagtggggcagagcaccagtgagcagattctgagacaggtcgagatgacggagagactgacacgtggagacatcaaggggaagagtagaattgatagagttgttgaaaagagagagaaaggtaagattttgaagcctacaaacgactgttgggaaaggtccggcgacgttggcgttggagaggtcaacggagttgactgaacgagaggaggaatcacatgtgacgccgcgccacgaacatggggtgtcatcgcggtcattccaggaggaaagagccgagtcaggatcatcaagagaggtcttgactcgttggaggtagagaccttcttggttaagaccaagtgtcaaaggagaagagatcaatagaaataagaagagaagcattttgcttttttatttcttattcttcttcttccactcttttggtttttcttggcttaggcttctagaatgggaggttttggtgtgaacataataataatatgataaaagagagcaaaatatgacagagacagcaagtttgagtgactttgtgtgacactcttagtgttgttgtgaatctctgcttggtgtgtgtgggtttttgtgcttaagacaactcagaaaacagtgtgaaagatagagctttttctttttctgtgaaaagagagagagaaggagaaaggaaaggttttaacttttttcgaagtgagtgagaaatttctgttgtttatatatagaacggtagatgagatgaaataaaatcataattaatacttggagccaaaaagggaattaccaattaatactccccctactaaatgtaataattctgctcaaaaataaattatgtactatgtttaaagcctagaaagtttattttttatgcaaaaaaaaaaaatatgttacaaacttttatgaactcttcttgtataaatatagtacgaataggtttgtagatctttaaaataataattaaatttattttgttacaatttaaaaatatataataaattaattttactcacattttgttaattaattttttgattttgctttattagacaatattgtcgtacatggatgtaaaagtattgaatcatatataagaacaaaggctactccacttgttgaccgagattttc

SEQ ID NO: 295213 - DNA, 9492 bp, Cannabis indica
aatgtaacaagaaaaaaatttaattattttttatcaatttttttatgcattttaaattttattccattctattcctattcctattctcattcccattcttattcttatattttcattcctatgttaagtgttcaaccaataaagttgttcatagtttggcttttgttttaggggtggatgaaacttgcttttggtttgaggatttacccacttattcattttgttattgtaaatgacttgtctaattaatttataataatagtttttttctgaaaaaaaaaaaacgtgaaaataatatatttttttcttttttgagaacactgtaaaacaacggttcataattttgtgaaaaagtattagtccgcaaaaaagtttaaaatactgtaaatccttatttttattattttttggtatttataaaatagtccctaacttttctcaaagcccaaacccgtaatagagtccattacgaggtaaaaaaagcccataggcccatataacgataagagagcaactggttcgttcgtctctgagactctgcaacgaaccctaattttgtgcgactaccagacaaaattccattttttttttgcaatcactctttcaagtttcaggtatttgactaggatacccaattaattctgatttgttttctttcgttactctttaaggtattttgatttcttcaattttctgtaatctatgtttattgcactgtcagtttagatgaattagcataattgaattgatttttttttttttgctgttggtttttcagtttttttagttaagctctgatatttttgtactgatgtagttttagtagtatgaccatgtagttttcttgtgtttaaattacttattccagaggtaatacgcttatgttgatgcttttgctatttataggtgttttgcttattatacaatggcatctgtatctagccaaccccagtttcggtacacccagccaccttctaaggttctccatttgagaaacttgccatgggagtgcacagaagaggaattgattgaactggggaagccctttggtaaagttgtcaacaccaagtgcaatgttggtgcaaatagaaaccaagcttttattgaattcgtgagtgtgtagttatgtagctttacctgtacttataatctttgaaatcaaattttcctgttagcatctgtggcttgtgatttatttatttattttcttaagaaaaaagttcttttagagaactactatcaacataggttggagaaattatgaagggaatagtgattttataatagaatgtcttgataaaatcaaaatctttagttttaaagcattgttattttgttatgttagttattcaaatagaatcataattatagaaattggtaggtaataagcaatttttatgggagccatactttgcttttattattattaaatgattgtgtatatttgtgcatagaaaatctacaataattaccaattatatttcctttaattatgtttaggcagatttaaatcaagctattgcaatgatatcatattatgcatcatcttcggagccagcacaagttcgggggaaaaccgtctacttacagtattccaataggcaggaaatagtaaacaacaaaactgctgcagatgtagctgggaatgtacttttggtaacgatagaaggtcccgacgcacgccttgtcagcattgatgttttgcatttggtaagcaagttgtttgatttctttggacacttatttggaatacgcttgtgactatgaggatgctggtgttgacatattgtgtttgggttgtaatttgccagtgttttgaaaatttggtttatttgacatgaatgtgaatggatcagcaggcccatgtgaaggaaatatattcgatggcagcttagtgcatcgggagaaagagcgcatgtgtgtttgtctcttttctcctttccttaacaccgcctctttcttccctactcttccttttcaacatcctactccttccattctattagtctaggatgcttgagtttcttctctcttttgcatttctatcccttttcatatatcgcatgttgtgctacattacaaaaaaaattcttttcgtttgttcagtgtgttgggacagttgtttttcaaacttttcccatgttaaagatgtgtgttttcattgctattgttgctgaaggtctgcatgtagacgctagagctagtcacacctaaatactgttttagaagataataatatagtaattttttcatcagaatgatgaaccaaatgtttatgcaatctacttcttgctgtctcttgtggttaaattgaaggaatttgtatcattcattggttttgaacttaacttcctgtccacttttattcttcgtatgatgacatatctatgtctgtacagtagaatatgttgctgcagtagcctgttttaagtttttgaaatattttgatattttagtcttcatatatttctgaaacttttaagctttgcaggtcttttcagcttttgggtttgttcataagattactactttcgagaagactgctggatttcaggtgtatattagttgcctttctcttaatttttgtttattacacttaaggcccttaagctaatttcatgtttctatgtttaggcactagtacaattctcagatgctgaaactgccacttccgcaaaaaacgcccttgacggaagaagcatccctaggtgacagttgtattacttgtttgacatggtattatgtccaactattgtggaccacataatctatcaagattgtgggcatctgttttcttatgctcactttcacccactttgccttgatacttataaggcttgtttgttttgtcagtacttttatgccatattagcttctctttccttgcttgtaactgtaactttccaagtgatccaatcctaaagaaatatcttcttattgggtcataaattagcattctagtatattttttgccgttatgcaaattttgcgcttgattgttatgtaatatgcatgcttaatgatctgactactatcattgttttgggtgtcaggtatctgctaacagagaatgtgggaccatgtactctgaggatcacgtattctggacacacagatctgagtgtgaaatttcagtcccacagaagcaggtactcaagatttttcatgccatctggtgcctgtgtgttaatgccgtccgttttagaatgtaatcctgtgttgttctgtatgttgtgatcctacaggttgatatattcttgtgaatgcggttttttcctattgctatcgttttccttaattctaacactattggaaatatatgtctcagggactacactaatccttatcttccagttgctccctcagctattgatggcagtggtcaggtatcataatgaatgtgtactcttggttctatttcttgttggaagcagtaacaattggatacagaaccaaacttgaatttgtatctctcaaaaagtggcctaaacatgtcattgcgtcatgtgccaaacttgttaaacatagtttgtcttgcattttttgtttaccaaattaaaactatgcaatttgtttttctctttttaaaccgatggcagtattgtttcaacttttagatgcttctgattttgtatattcgcgttcaattaatttcattttttttagttatttgatggtattcatcaaccatgcgtgcagctcactgtgggtttggatggaaagaaacttgagcctgaaagtaatgtgctgcttgcatccattgaaaacatgcagtatgctgtcaccttggaggtgttacacatggtatgtcttcaagcagtttgaaaagctttattattgtagcgtgccttttccattttacgtgcatgcatagaattttagggagcatgcttttatcgaacttggactcactttgcccctcccctttggtaggttttttcttcttttgggcccgttcaaaagattgcaatgtttgataagaatgggggagttcaggcgttggttcagtatcctggtagtttcattcatcctcgtttatactctaatttaattgttatattaattacttacataaaattattggtttaaatatgtcacccttttgtcccaactgaattagttgttgccttgaatgagttagttgaagttttaagagttgtttcgtgatgctatgggtgcagaaattcagactgcagttgccgccaaggaagccttggaaggacattgcatttacgatggagggttttgcaaactccatttatcatactcgaggcatactgatctcagtattaaggttgactagatttcaacatgaatatttgtttatttagagagttctttgctcttaccttgagatgtttgccgtttacaggtcaataacgatcgcagcagagattatacactcccaaatgtttctactgttaccatggtgaattcccagccatcaattttgggtcaacagccatctaacgtttcaatggtgactaccaatcctcctcagtattctggggctcagtatgcaccaaccgagcaggttgggatgccacagcctttggctgcatggggtgttgcagctgctccacccgcgcctcagtccatgccgatgcccatgcctatgtccatgcccatgcctatgccgatgtctaatcattcctacatgcctcctcgatacgggaacatgcctcctcacccaggaacgatgcacatgccaagccacagtggcctttcacagacaatggtataccgccctgatcatattcaataacttatacctctcaaaccgattccatgtgtttaaattccggtagacttttgttcagtgaagtaagcccacagcactagtaatacaaggagtgtggaaatcatagaatcctcatttcaactttgttatgttttttcctttcccaagtttgcttatgagattctatgagcagagtgggcttgagaactgagaactaacaacttgttaagatattgttattttgttatcatgactggaaattttcttttttagaggtaactaatttaaaggcaaataaaaaagctttatttctctattaatatataaatttatacattttcccccttcggtgttatgtaaatatttgtctatttaaaatttaagaattggtagaaggtgccattatttaagatattatatcggtaataaaataacgctttcacataatttaatttaataactattataaaaatattactaacaatttataaggtatcacttttaagtagtgctagacgccaagggtgaacaatttaatttaatttttttttctcatctaatccaattcaatcagtagctagatttagaacattattatccgatccaatttaattagacttcaaaattcaatctaatttaattagtaattgaattagatcgattttttaattagatattcaattacacttaaaaatataaagaaaaatacgtaaaaattaaatatcaccttttatttaaatttaataatttataaactattttaaaaatttacgagtcctcgaagaggacttgccctaaaggcatttttacaaatgacctcttcccatttttatcagagagaacaaataaaattgactttaagacaaattgttgtcaaataacaatgcttcatcggaattgatattatttcccattatttagtggcaagcacacacacgattccttgtgactttggtttggtaacaacaattattttggtcttttcttagttaataactcataaatatcaacatattgactttattcagaagcaagcttttttccttttgttctcaattacaggtcaatattgaaactgaactaggatagtaggataggattaggataggatagaataccaaatacaaagaagctcaacaagaatatactatatatacgatgacatgaaattatggccttattctcagttttactattgagtagtcgaatccgaacatctatgtaatggatattaacacatttatttatagttttatacccaatattttccaacactaaacatcactgctactaattagctctaactacacattttcatgttgtgaaattacctcattaatgtttacctagggttgtttaaaaaaattaacaaattgtcgtacttgaataaactgcccaaaccaaactgaataaaccgacaaaaattataacttgaataactttaagaaaaattgaaaccgtccaatgaatatattgggcggcccaaataacctgaataaattaaataaactgatttatatatttttttactaaaattatttataacatgatatataaattatgtttaatagttaaactattttactttaaaatttgtattttatagtgtttaatttgaaatttagaatttatagttgataattttgattgtatttgaatattgaagttaaaatttagaatttacatatgagtatattttttttattttattttttaaaaaatattgtttaatgctttaatgtttattcaattcacatttgtttttttaacattaatttaaactataaatattttaatcttgaaagacatagacatttatttttcaaattaattatttgaacaccaaaaactaacatcaataaataaaaaacaaaatcaatttaaacggattaacccgactaaagcaacgaaaatcattagacaaggtttttttttttttttcattggacaacttacaattagatatatacaacccgactataacccaaccgatgtacacccctattttgacaatttcaaacactaaaatcaaatgttaattttaccaatactccaatctaacaagcttcttaaaaaagttcacctcaatttaaaatagtaattagctattactttttttaaagtcttgcaagtcaattataaatagtaataacatttaaattataattaattataacctttttaaatcatattaagaaagtgtgcttccattgttatttcatgatcatttgacttaaattgtgtgttatgtttctaacttgagcagaaagtgagtttgttgtcatgttacaatatttgaaacagatattggcacatgtaaaacgaaatttcaaacactgacaaaaaaattctccctcaaatgtctcaaattttgcttcctcttctaaacatcaaataagaaaaaacagatataacaacttgatggccttcttgttaagatttttagtcgaagagactgaaacccatatcctgaaacaaagaataaacagcataccattagagcaaattcaatgagttaaaaacagccaaaaccagagactttaaaaactaacaactatatgaaacttacatcatctgactcttctttctcttctactttctcttccttctttgactcggcagcagcagctggggcggcgcctgctccacctgatggtgcagagtaagcaactgcaccaccaccaccacctgacggaactgatgctagcttctcccttccggaagcaattagctcagtgagatctttgcccttgacctcagtcaaaaggaagttaaccttctcatcctctgcctcaattccaactgtaaccaaacaatatatttactcaattcaaagaaaaaacaatattcattcattgcagggaaagaatctgctaaaagaaattaacactaacaataatcttaattcacatccaggacaagacttccaaccaaaaattatagaaaataaacaaaaaaataatgacttcacaatatttcatttcagcaacaaatccaaaacactcaaatcataatgaaagatgaaaaagatcccaattttttagagaaccctctcaatacatttctctgttcatttcaagtttctacaacattattcaaatattcgttccttcagcaaagattaaaacttcttcaaacattaaatctagacaaaaccacccaccataacttgaagcatttttcctcctatgctagtaatcaaaatcatatgcacaatctactattaaaaaaaatgcagattttgaattacataagctaatgacaaataatactcaaattttgtatcaacaaaagttttcactagctcatttgaagttctttaaagcacagccaaagattcacacttaataaatcaagaagaaaaataaagaattggttaatgaattttagagaataaaaaacacctaattgcatacctgaagagagaatggccttcaaatcagcggcagagggagaagcgtttcctcccaaaacagccaacaagtaagcagcaataatcttcattctgtcaaaaaaaaaaaaaacagttgtcaaatgaaggtgggcagaaatctctgtatgagaagatagaacgaaacaatagaaatccagaaagaggcttagagagaagataaacctggtgaaggagagggaggctgtgaggatgagaatgtgatagtgagagagacgactgcctaagaaagagagtgaaatgaaggctagggtttccaagctacaaataccataaccaaaaagtctgtcgttttaggttttctaataaataattgaccaaacaaattacaaattggaaaaatttaatttgatgcaaataagtctttaattttaaaaaataatggtaatattattaaagccaccattttgtagtcccttaaaaacaattaacttttaaaataatatatttaattttttaaaatcaaaattatgatttgaacaagttatttgtcaacacgcggcattttgaatcagtatacaaattcgttagaaaaaaagactagcggattaacgaaaagggtgaccttggggctagtactgtcattttatgaagttggagactgttatcccaaaatttgcacatctgacgtggtacttaaacgtgacataatccagccaactcttaaacatgacaaggaacttccgagcagaaatgtgtctggcaggtcccatatagcgctaacatccataagctgtaaattgctttccttgaagcatctggccgacccatcaacgtgccggccaaagaagaggagggtgacaccttgcaagaatgattccataagtaattccataagaaagataagtcttgagaagggcctggctgggtgaccagtatgctagccagaggaaataatatcaggcgtatcgaataaggttaaacgagccttgatttctccttcaacaagcttctataaatatctcaaactgaattctacaaactcggatctagccaatctcttcgaaaaaaaaaaggaacttcaacggatcgtaactacacccttacaatatagtaggggtgttcatccgatccaatccgtacttttttggtcaaacaacatccaatccgcactaagtgctgatttcatattttaaatccaattcgatccgcataacagtttaaatctaatcaaatccagtatccacaatagtgcggattggatcggttattttggatcggttatttttttaatgataaattatttaatatttcataaaaaaaaaaaaaaaaaaaataaagactattgtttcttaatctc

SEQ ID NO: 295214 - DNA, 2573 bp, Cannabis indica
aacggcaaaaaaagttcagggacacgattttgtatatgttaaagttcagagaaaaaattactgattagctagaattaaattgtcataagttgtatatctaaacaaccaaatctaatagagaacctgagtttagtttctcaaatgcacaaaataaccttaaatggagtctaatataatacaaaattatgtatatatatattaattattaacaacaaaggaaaaaaaatacaagatcattcaaaatataaacaatgagaagaaaaacacaagtaataaacaaatgatatttgaacagaaccatgaagcatctgatgtctccttaagcctattctcaactggctcatttgcctgattatgatgatgatgatgatgatgatgatgagtccaagccaaactttcatcacttttaggctcactacttgaatttaaacaaactggtgcatctaaatacaaagataccttcttctggtttagttgattgctggtgcacaagccattgtttcctcttatatccaacctcttcccaagcctttcaatgaaactttgaggaagtaatacctctccactcagcttattattactcaaattcaagtgatctaaacttggtaatgacactaagtttgaagggattttcccagtgagactattgttgtctaaagaaagagatgagaggtgtttcaaaggagttgagaaattgggcaatgagcctatcaatccacagcctgagaaactcattgtttggagttttttgagttgacatacaaaatttggtatcatagcattaaaagggttgtgatcaaatattaagtactctaaatgttccaaacctgaaagggtttcagggattgagccagtgagtaaattgttactcaaatcaaggagtactaaactcttggccataccaagatgaggtggaatttttcccacaagtttgtttgacccaaagtcaaccttttggagaagttgaagttgacccaatgtagaaggaagttgaccctcaagagtgttccaactcaaatccaaaatggtcaaattttccatatcaccaatttcttctggtatttcaccacttaaattgttgtaactcaaatcaagttgctccaacatgaccatttcaccaatctctcttggtatatttcccacaaggttgttttgagacagagttaagactcttaagctaccaagtttagctatggttaaaggaattttaccataaagagatggatttgactcaagaaccaagtgttccaatgaagataatgagccaaaaagagaaggagaaagtgatattggatgagttgtgaaacagttgaagattgagaatgtctttaggtaagttagcttgagcaaagaatgtgatattgtagcagagattttacaaggtgggttgagaatatcagaaccaatatgaatcttagtgacatgaaaatagaaaggagaaacttgaccaatctcacattgaacacctggccatggagtttcactacatggttgaggatgatctttggcccaattagaatcatctaaaagagcttccattacatcaaaaagacccaaaagctcatccttttccatctccatttcaaacccatctaatgaacaactcacttcactagccaaaactaagaacccaacaaggaaaaatgacagagaagccattagagagagaaaacaagttagaaaacaaatgggacttaattccaaaagctcttctacttattaatctaaagaaagaaaaaaagaaaaaagggccattgagtagttgtgtcagtaactatggctgaattgttatgattcataaattttgtcgcctattgttttttcaatacattttttattttgtgatgaatgtgacagtttttagtttgcattggatagagagaaatgagagtttaataaaagagaagaacaatttgtcagagggtgatgggatggggcctgaatagtcagtcttttttaaaaactctcacaaggatctttcaattcatctatcatcatcaaaaacatctcaatgtaatgagaaaaagaaacataaacattacattacataaacactctgtaactcttttttctttctcagtttatggttggatttggattcaaacacttcaatcaaattacctatttatgtttcttgtcttttcatctcttagattgaaatgacagcttaactttttatgtctttcttacaaatataattttggattatattgaggtgaataggcattacatacactagtctaatgcatgccctttcactacactagtgcataaaaatgtgcactactataattttatgctaattaaggattttttataataattattaaatttaattgtgtaaaatttattatttaattatatcaataggatataatattttgtgatattaccacataagatctcaatgtaattatgagcttggccaccatgagcaagagtgctctttcagaaattagatctaactagttagtaaaaccaacctcttctatactcttataagggttgttttggtacaccttgtgttttgactttaagaaaaaaaaaagtttaattttttttatgattgtgta

SEQ ID NO: 295215 - DNA, 4510 bp, Cannabis indica
agatcctggtaaaataaattccaacacagattcctttctgtcattctttactttttattttttgtttttaatttccatgtacgccttagggcaggaagtatctgaataaaagaaaaagttttcatttcatatttggtctttgaaagttttatgatgtaacaagtgatcaaaagtctcaactttcaatcacttgggggtagcatacattatattgttataaagttatatctcttttgcaagaaacaaaaaaattaaataaaaagtataagagtagggagtattgcttgaaacaagaacctcggggaatcagaagtaagccactaccttattatatttgaagttaatcttgcaattaaccaagtaaagagtaatgagtatcgcccgaaactagaacctcaaggagccagaagtaagccactaccttattatgcttggaatcagttttaatatattaacagttaatctaggttaacttagaatagaagttatggcttcatggttaattcagattaacacaattaagatattcaggctactaaaataaatttattatttatattaatttaatatataagttcaaaaaaccctaaaaaccaaatggtatttaccaaaaaaggtctaattctaaagtaaataattagctcaagttaattgattatttaagtttcaaaaatcctttaagtaaaagcacttttaaaaaaaaatcttcaaaacaagtcgataccaaggtgcaggccataggaatcatattccaaggagtacagatgacttgttaaataagaaaaatatgtatgtttcagcatttaattaaaaatctaaaggtttaggccttcgaaactaaaacctcacaaggctaagagcattaaaacttcgcaaactctatagataaaaatgcagatgtcgatagagtaaatcaaatgtactgcgtacttagaaagcccatggtaagggtataaaatattgtgtccgcacacataaagagggagatccttatcctccaaaagataaaaaaaagtacatataaagttgttaaagtaagacaagaatggatagatgtggctatggctgggttgaatcctcagattattgttgatcttgaacttgtttatatgttggtccatctcccatggattatcattcaagatcaattttggagcattttcctactccataaatgcctcctccgagtctgtctaggcatgatttctatacaaaagaagaaaatccaagcattcagccaccctaactacataacatagaaagggagctacgggtcctcccccatgaactgattggagaggtcccaactagaataactatccagaaacgagaacttctaggagtccttcattctagataggaagtcaagaacagcaaagaggaaaagcacaatggagattaatcgagagcccaaaatcaaaagaattttggacgtggggaaaagtttaccaacatgactgctgcaaaatgctcgattttaagaaattcttaattcaaaaaatggtattgtttgtgatgcctaaacctatctatgaaaataatcacacaaataaaaagccctaatcacatcctaaatcaaaacatgcaaaaccttttatagaaaatctggagaacacaattcagagacgaagaaaccacatacatggtatcgaaagtggagatgtcatggtaattgtcactggatctggttggggatgttaatcgaacctttcacgaagaagagatgcgaaagcgatcagcgaatcaatttttgcattaatatccaggtttgcaatttctcttagtgtaaaagtcttgatcactgggggttgatgatgcaagaattctcgtgccttaattctcaacaacagacaaaggcaaaagtccacgacgttttcaaagttgaagaagacgactgggttctaaattcgactttcaacttcaaatgatgtagagtagagtataaactttgaagggtaaaaatttgaaaatgagagaaaaaaaaagtaacaagagttcacaaaagatatttatacctagaaagagcaatccacatgaaagaatacagatggttcacaatataatcaccagaaacacaagtttaatccaatggactgggatttccacaatccacgtgcatctctacaattaatgctccccaagattaaggcgcaaagtaatgatgaagatgacattttttgatttttgtgccaaaaagtgaacaaccatcaatatatagttgtttcttgaaagcaactcctcgatggatgcaccctttccatcaccatgcaactaacacgtggatgttctacactgaaagacggaagccaccttctacgatcgagtagcacctagaaattaatgattttgtcttttaacctccacacgtccatatagagccttccaccattggaaaattatccccaaaagcaagtccggttccatgagaccgaagggttgagacagcatattcctagaatactctgctagtttccctttttattcatgcacataaataaggaaataacagtttctagatctcgagtaagtactatatcagattaaatggggaaacttcttgaaatgaatatgaagtaattaattcacaattaattgcccacaatcaaagcacacagtgttgaccaaatccagccaaaattgacctacctagtcagcacatcttcttctttgtgggctagactttgtgagatagcctaaatgtgttattcactataaactccatgtttactgagtttttttgagaattagatatttttagagcttaagaaagaaataatggaataaaaaatagaataaaaataagagatttttacgtgatttaggcattaaagaaggttcctcttaaagaagaggaagcttagtagggatattctagagtttctctatataatattatttagctcattactggtgtgtttgcaaaaagttggaagaatgagttttttcccaaatgatgttccctcctttatttgtgtttcacaggggtatttataggacaactttaattcatgtgttggcttagattgaccatccttgggaaaaatttagtaggtggccttttccttatatggcatttaagggtacaagattgtactggttgggcctcatacgtgtgtcattccagggcgtgtacgatagcgtgtcatgggggacaacctctgacatcgtacctataaaggcttggtcactaggtttgtagcctgacatgtacgagcaaagcctccgcgtaataagagtgtagcctagttagacacgtccaaaaaggcctatattcttctgggaaaaacccatactctttgtgggagtagatggctttggctcctgggactggggaagacttcagctcacggataccccccgcatcactggcagccaaggaactctcgatcacgaaagccctttccttgagttaggtcctcctagagcatcaggccattaagttggttggcaaacgacttcttaaccctccttgattaaaatccacgtgtcatggttacaaaaatgtggataacatttacccccaagctttcgggatgtaacacggtctgggagcttgccatgttcctccttgattgatctcgagcatgtgggattaagataggctctttattacatcacttcatcagccaccaattgaagtgtcattgtgagaaggtattatttcctttattttctcctcagggctttaaatgctgacctttgagatttgtgcacgtgacgggtacgtgtttggtgagatgccaaaaataaggggcaattggattgagcagactttccatttgatgagcacttttcatgaagcatgcagtggtggaagccaaaagttgggagttgatacaccttcttagcttcccacttatccaactgtcagacgtcccttggttgaatgagttaaaccgtttgcttctcgtggaagtcacaacttctaggtgcctaacaaccattttacacttcacactttttttgcctgtcgtactagagtcttagcgtttggttccatctcttcctctttctcacaagactttctagcaactttgatcccaaacaggcattcatcttgacaagacacatcacaacgatcacccgtccaactagtaagttctctttatcatcatttacttgacatagagtttttgaggagttaagacggtgcatattgtgtgcgattatttgttctaggaacattggcaccgtgcatgcaacctctaccagtgagagagctgggatcttgtatcatgctaacctgtttagcgtcatactaatttttggcaggtacattaggtctgctatggaaagaaccagttcttctaaagctgcgtgtgacagtggcctcgacaggaaaaggagaaggcttgaaatggttgtttctaaaacaggggcccatcctccatgttatgatgcaccaatgaggctgggctagcgtcattcgtactacccttctgccatccctaaaattgttggaaattattttaccaggatcttagatctactaacaagtatgtttattaac

SEQ ID NO: 295216 - DNA, 2752 bp, Cannabis indica
ggaaagtgggtatacatttatcaattgttagatgggggaatttaccatactcaaataaaatatagtagacatagtcaataaactgacgaaaaaaatacgagggattattcataaatatacaaaatagctaaaatttttactattttacgaaatttacttagtttttttttttaatattttttacggatttttagtttttttacaaaaatacaaagtgttgtttttttattattaacaaaaagctgttttttgactgttgtttctatgagaaaacaacacaattttttttacaactatacaaagtgttgttttagaataatgttgttttgacgttgatgctatagaaaaacaacattttttgctgaaaaaaaaaacatgtgaaaatctgtaaacaatgtgatcctttttaagtatattgtgtaaatttctcaaaatacaatcataatggtttagctcaaaatttgaacttaccttcattcaaaaagtattcttattcaactattttttttttttttttaactttacagactttttttatagatattgcaagatcgtttttttcttgagatgtttactccaagagagttatttcaccttataataccattataattgatagactagttttaagtgttcatgaagtattttagaggagtgttttagtttattacatttattttgtgcataattatgtttgtttttacttgttttagattttaatagtgaagtatattataggtattagaatgaaaagaaacacgttaaataagataaatatgatgaacttatcaagagatttggagttctaagacataagggatgcaaatttcaaattttgggatgctcaacacactctatttgtgattattaatgcaaaatgaaacttcacgcttgcaatcgatcaagttatgatcatatttgcaaaaagtcaaaatatatatggaagttttagatctccttctcagtttttcaacacacttgaataagctcatatggagttaggacgtgagagttatgtgtattttaatgagagaggtcgaagaagaaaaatacttggacaacaagtaatctccaagcgcgcgcatatagtatagtatagggcacggttataaaccgtcagaaaatccacattagcgaaggttttaaactgtcgcctattctacccgtttaacgacggtcgtataggtgacagttatagaaaccgactggaatactttaaacgactgtttaaaaacgttaggcaaacccatttttgtagtaatgaatcttgaccagacttgagccagagaatgtggctcccgatgaagatgttcctagtggtcctgctcctaaggaagataatattacaaagaggacgaaccccaaagatcctgaaacttttgattccactggggacaaaggaaaatatgtcatgggggaacctccaaaaataactgttcataaggagatgcattgtgaaaccgtctttctaatggcaaggacctctgcccactcaagttgaggaagaaacttaactttccaaattgtcgaagaaaacaccactcctctttgatctcgaatgaccataccaagtccgcaagagcttatgttgattgcggcatccatattagctttgaagaacttggtgcctagaggaattcaatggggaaaaggctcaacattacaaagtacagggaaagtagaaatagaaagaggggcccaactattttcatggggatacgagtaaaagaagttagtcatccaacgtcccactaattttggaggaatggtaagcttttcatgcgcgcacgaaattgttacgacagtaccaaataagtcactaagtgacaagaattagttcaatatctctatggggaatttgtaggattaaattacaagttaagccatagatatcacttacaagagtcgaaggatcaccaagctttaaagtgtaaagtttttctctttcttgttggaatcacatgggtttaccagctagggtctctcttgatctctcttttgctagctggttggatagtctctttaactgtcttgatgatgaccgtgtttgttccctctctatggtctgttggtccttatggaaagcaagaaattcaattgtttggaaagataaggcgcgtactattgcaaatgttgtaacatcagctcgcatagctcttgatcactggcgtaaagctcaagataacaactctctgtcttacatttactctagtaattatgatgatggagctgaactttggactaaaccgggtataaacacaatcaagatcaacgttgatgctgtaatttttgctagtgacaactagtatggctatggaatggttgcaagaaacgacttaggatctctcattgatgttaaagctcattgctttaatggtgcttttgcccctgaggttgtggaggttatgggtatcaaagaagatctaagctggatcaaacgtcaaggatggcaaaatattgagctggagtcagatagcttagtttccatcctagccatacgcagcccctcacctctcttttctgtttttgggaatttggttcaagattgtatttcacttatgctttctttgccttttgttaaaattcgttttgttaaacgatcaataaaccgcctagcacatgttgttgctaggatgtcacggtccctctctggtcgtcttatttctgtgtctaatgctccagtttctatgctagacattttgtactcagaaagttaatttaatgaagttgacatttcatcaaaaaaaaaaaa

SEQ ID NO: 295217 - DNA, 3108 bp, Cannabis indica
cgagtacgcatccatgaagctaagcagttcatgacctgtggttgcatctacaagttggtcaatgcttggcactggaaagttgtcgttcggacaagctttattcaaatttgtaaaatcgatgcaagtgtgccatgaaccattaggttttggaactaagacgagattggctaaccagtttgggtaaaatgactccttgatgaagccgcatgcgagtaggctatctacttcttctattagcgcttggtacctcacggggtccattttacagcgcttttgtcgtactccttgctcatcaagatcaatgttcaatcaatgacacatgatcttaggaggtattccaaccatgtctaaatgcttccatgcaaaagcatctagattttatttgaggaaggtgactagcatttctcactactgcatagttagtttagaaatcaacttttaaaactttggaagtatcaaatggatcaatgggtacctcacttgtttcttcggtggcttgcactgtgttcatgtaaaggattctgggttgacatcgggcttctccacatgggaacctcctcgattctgaatgattaatgctgcgattgtggagcttcgagcatgtaaatcatgttacaagatttttttcttttctgtgatcttgaccacagtgttatagcattcacacgagttcgactggactcctctgactgatcccacacatgcgggtgtaatgaaattcatggtgagatgatagattaatgactatcttcatctcttttatgatgcgtcgaactatcactgcattgtaggcagaatacagatcagttactgcgaagttttccacagatttcgctactatatgtgttgctccgattgttatgggaaattgtatcattccctttagtttaattgtatctcaagtgaaactgtagatgcttaaggtgattggcttcaggtctttctcatgaagtcccatctacttaaatgcctgcagattcaaacgctttacaaaactaccattatctacaagaacacaatgtactttattaactccaatgttcacaactattactagtgcgtctgtatggggtggtgcacccatctcacatcgctttccatgaaggtgatgtcgtcgcagtttttcttaaacaatttttcatgtctgtcactcaagttgttaacattagtaagcggtttctcttgggtctcttttgcatatctttcttgggcttttctaaaatctccgccaatgtgggatcctttgataatggtcaaaatgttgtgaggagccttcgagccactcgcttcttcttcattgttccttccatccgctcggggatttcggtcttcaatctgtccatctttcttatattagttgaattttcctcgatgaattaattcttcgatttcgtcctgcaaaaaccaacattccagagtagtatgaccaatgtctttatgatacttacattactttcacatgtctccttttgcagttggccctaattagaggtggttttttggagattcctttatgttcctcgatagcacatatatgatcgtggggaacattcaattcagtgtaatttacaaatcaaggccctccttttcgctttgggaggctttcctttcttgctggtgactttgactagttttggactacgacgccttgttcgactgcataaccttgggttgtgcccccttgaacttctttgttgcggactccttgatcacgtccttggcactaggggttgtgtttctctttggttttctcgagttctgccatcgagttctcaattcacttatggagctcgaccatagctaaaaactcaaccaatgtctaaggacgtcgcgcttgcagttctttccgaaaatccattatccactaaaagacgtagcacattaacattggatagaattaaaccccactattagagcattttttagtgatcccatctgaattttttttctatatatataataaatgatataacagtaatcacagagatgcgaagcaatattttttatttatataaatggcgtaatggtaattatattgtaaagacattataaagttttcgaaacaaaatcaaacaatgaaattgcaccagttgattccattacgattacaccaacccaaacaagaccttagtttggatatgactcttgagtctttgagcaattcgcagcctctcctaatccaaactagatcattggaaaatgccagacatgttaggtagatggtaatctcacaaaggtgggggtcactcactcataaagctagatagatagacctgttcccaaagatttccttcacaaatctagtgacgcaacaaactaaaagtgaagccgcagacaggtcaagagtggaccaattcacacgaaagcaacaacttctcttgttggtttgttagtttgtcatattcaccattttttttactttagaaaatagtctcgacaacgactaaccttgttctcgtttagaatggaataggtacatttacatttaaacaagatcactcgtaccttcactcattcacctacccaacccaatccaacaactacgggagctcgcctcaactggctcttatttcaagtttgactaagtttcattatcaagctatgatcaaatcaactatgagaattctattattgtaggaagtaggaactaaaatgaatgcaaatcatttcttcacttgattcattgggatgaatttggtgagtgattatccgaacccaaatcttgtcagagtaattactaagggctattgaatataaataaaaatgacagaaacagcatattacacaaagtagataggagagaccattttttttttttttttcagttggagtctgagacaatgtatatgtgaacacataacatctacattaagtactattccaaattaaacgtggtgataaaaaaaaatctataactttgaagaacacataaaataactttttgagactggtttcttttctttctagtttgtttggaggcaaggagaaagaccaagtgataacataccatcaaaagaagcatattaagggtcagctaagcaaatagttaactaagttggtgtttggttaggaagaatgaaaatataggaataggaataggaatggaat

SEQ ID NO: 295218 - DNA, 4393 bp, Cannabis indica
ttgcacagcttacccggtatttccccttacggatcacgagactactgactgtcacatggaaaaccgtcagcaaaatagcattgatgagaggatgaatagaactctcatggagagagagttaggtgcttgttgttggaagctagtctggagagaccattttagagaagaccttatgatagcatcctaccttaatagatgttcttcagtagcaaataagttcaaaacaccctaagagatgtggacagggaagccacctaattttgtattagttttgtagtactaaatcaagtacgtaacggaagtatttatttagattatcatcgtactcatacccaaggatctccatatgtatatagattaaatatgaaataaaaagatgaaaggaaatatattttcctcttaaagcgaattagggtatcatcgaatcttttcgtaagttgtattcttgggttggtgacgtcaaactcaaaccttggttttctagatcttccaccacacacaagaattagtgtgggttaatatgatataactatataatatgttattgagtttatctcagcacatgagcaagaacttttctttctctgagtgaataataatttttttgatccttattcgattttttaaattatacatatatataaatggaaattttgattatgtatgcatacattagaggaaaattaattctataaacttatgtgtaccaatattgagggaataggtcaatttccccctattccaaaaatgtccttcccatttagaaatcccccactcatctctctgctctcttttctctctagctctcttcttccctaagttgaaacgacacaaaaccaccaccaaatttcaaccctgagccccccgagggccacccacgaagcatcacaaccaccttgtgccaccaatagagttccccaaccaccgagcaccacccacaaagttttcccaaccacctacgaactgcgaatgttgaaggtttaagttttttttttaaaaaaaaaaatatatatatatatatatattatctattcgaaccctaaattatccattcgaatcctaaattatccattcaaactctaaattatccaatgaaatgatctatagtttttttgtattttttgtttattatttggtaaaaaattgaattttggtgaaatttgctttttcaatgatttttttttttgtatatggtacgatgatgaatataatactaatgtaatctagtggttaaagatgaaggtctgatagtggtccgatgtaggtatgatgcctttttgtagtggaaattagtaaaacttaaaaatgtagattcaatagtagctcgatggtgatctgatagaagattaatagtaacacttctcatcattttaaaatattgcatgcgatggtgatctgatagaagattaatagtaacacttctcatcattttaagatagtgcatgccaaacacataagaaataaagccctaagattcgagtcacactagtgaacacaacttgacccacaaagagcacaaaacaacctatcaaatcaatcaactatggtggtgttcatttagtggtaaaatgtccatatgggttgtgctagagattccattcatctctaatttatatatgcttccttgtatgttcataacataataattttccttttgaacattgatccaaaagcatagcatagattcccttctatttcatctgtggttccaataaattcttcatatatcgtcatgctcgagtgcaagaacaacatagattcccttttttacaaacaaaaacaaaacatattagactaaaaacaatgataaaatgaatagatttaatgtaacattaattctaagtttaagtaaatacaattttagaccatgtattttgaaaaaattaccaattaaatcttttgttttgttaaatgataactcagaccctgtatttttcaaaatagcataaaacaaaccctgaaattaatttttgtcaaattaaaacttaataataacctgacctgaaagtattaaattattatatttttgcatttgtttgagcaaggaactggttttaggttggttatattaaaacaaaaattgacgaaaattgaattcaaaatctattttgaaaaatataaggttcaaatattaaacaaaacaaaaaactaatctgtaacttttgcaacacagagtccaaaatagtgtccactcttaattctattacaattacaccattgggctacctgaccctgggtataggcagactaggcctatgcctagggtccacttagtccaaaggctctaaaaaaataccttttaaaaatacacattttttttactgatttttaaaaatataatattttttctaaataggggcctaaaaatattttcttcccactaaatttcaaggttggccgtaacatagtacaattatgtgtccacacgatgtgagaaaaaaaaaattacatggaccaaaaatgctgcatacaaatcctagtttcaaagccactcattgatactgaagtattgcattaacattacatggaataataatcaacaacataaaaaaacaaaaatgtgtctatgtatgttgtagaaaagtgaaaagtaattcttcatacatggaagttccaagttcttacctgtatttcttcatcaactttctatactttctgaaatcatttgattgatttcacccttcttgttatacatatcaacaatcctctttgcataggaaggagtgtgcctatccgctctgcgaataaacaaaaaattaggggtattttcataaaatgacaaaaatattctgtgaaaaaagtgcgattataagtactttgtataaaaaactcgaaaaattacacaacaaacaatcacaacaacatgacaacatatatgtttacaattcatgagtaatgtacctttgtttgccccaaaagcgatttacgtgcaaatgatttctgatggtgtggtaatcgagtgaataccgggcgaattccagacctttcgggccaatctagaccaaacaaatccagttaaactgaagttccctttagttatttttgtttcaaaatacaaaagcaaaatatttaccaaatttagaaggaaagctatcagattgcctacaaacttaggagcaggctgagaaggtcctctacctaaaagcgaaaaccaacaaaaatgatcatctaaaagagcacataaatcaaaatatttcactttcaacatctcaagactcaaatgtggtagttgtagtgaattgcattatgcatttcttttataccactatgaattatcatcaataaattttcgataagaaagttgcaattcagtacaatgcgccaaattatcgcgatgaaatagaatagaataagtctaaggagagaacaactctctccaaaggttgtattttggagagacgagtctcttgaaaactcgatattgtaactttgtcactgtttttcagaataaagatcggaatattctatcataatatgtataaatatgttcattcaaggccttatgactagaaaatactacacttacccaacttagcattatcatctgccttgacagtttccacaacaaaaggttggcgctgaccctgaaacgaaatatacaatttttaaacaaagttgtaacattgaaaaaacatgagggataatgggatatagccagccaaggattttacactactaattgttggggtgatctccaaatacttctcaaccaggccgagcatttctttcccgcgttcatttctatcgatttgtatggaaacagacagaggttttagtttcaagccaagccacagaacaatgatactaaagagaaaaagtgtttatgtgttatagaatgaaagaatgtgttaccttacagtaacatattggggatgttgtgtcatgcttattccagaatatttcggtacacccatgtacccaacaacaagatcctgaagttgaatatacatgtaaacaagtttgatttaacacttgtatgtagctcttcttaagggattcaatagataataagaagaataagagagattgactcttaaaatgaagcttaccgctaaagcatttgtgtagtcaaaacagctgtagaacaataaaaagttgaaactaattaacatactattttctcagccaaaacaacaaacaacaaagaataacaataagaataaataggatttatccccctaaactactatcactttccatattctattgagttataccccgtttgcctgtttcaatcctacgtagctaacaaaatggttttttaatttttagtttataattttattgaagagtaaataccattttagaccctgtgttttgcaaaagttacagattggatcctgtgttttgttaaatgacaaaatggaccctgtattttctaaaatagtaaaaa

SEQ ID NO: 295219 - DNA, 2475 bp, Cannabis indica
tatgccaatttatgcaatgtccacttcgaaagttcctttagcaagctgtcgagagcttgatgcattaatgaggaaattttggtggtctggtagggtggataaggatcggtatcttgcgcttaagtcctgggataaaatctgccaaccgaaagcttctggaggtttggggttaaggaggtgtgaagacatgaacaaagccctgttaactaagttagcttggagtttgacaacaaaggaagacaaaccttgggtcaattgcttgctggaaaaatattgcaagtatgattctttctgggaggtaaagagcaagagcaataactcttacctttggaattgcattttggatacaagacctactattgccaagggaacaatttccatagctgcttctgggggttcaatcaacttctggcatcaaccttggatcccgtggatggatacacgtgaattttttactctaatgcaggacatgagaaatagaggatatacaatcaaaactatagcagatatttcttcaggcaacaattggaactcggagatggttcttcaaatttttggtactgagttgggaacccgtattcttgctatcccaagaatccctgctcctttccaagatcaagtattctggaagcagactcaaaatggtcttttttcagtgaaggcagcttacaacgtagaacaatcgtggaggtttgacccgactaaagatatatggaagtggatatgggcttctggtattcaccccaggaattccgttttcctttggagagttcttaatgatgctgtcccaacaaagagcagacttcactttctccctgacagagagtgtgtattgtgtgatactggtattgagacccctttgcatttgttctgcagatgtagttttgctaaatctatttggtttggaggaagcaaacccattaggattagtgaagtgactgatgattcactatctgatgtaatgggaaatctggtgcgacaattttccaactctccttatgggggaaacagagctgggttcctaaattacataggatgttgcctctctgcaatctggtaccagcgaaatgccttcatcatcaataatggtcctgtcaatcctactctgactttggcgagagctgaagaggagttcctggagttgcatgaagcgtctcagttcagcaggggaaatcaactcagtaatgatcaagtttcagagggacaggcagttggcattgaaggttttccctcgaccgactctctggctcgccatgtcctttttacagatgcctcttgggtcaatgaagacactggtatagcagctgttgctgttgatattgatgcaggaaattggtttgtcaactctcaaaaagtgcagtcacaatctgctcttgaaggagaatttagagcaattctactggccatgtcgtgggcaatagaacaaggctggagagaagtgattatcctctcggattcaaaggtggcggtccacactttatcttccttaggctcctgtcctgcttggaagattgctgatgttttttattccatttctaatgcttttaaatgttttcaagactgtaagttttattatattagtcgtaatcttaactctttggcggatggtttagccaaaaaagctagaattgctagcgagacggctgttttgtatcaaggggagggtaatccccttgtgattcccacacttttattgcttaatgaacaactgttctttcaaaaaaaaaaagttgtttcaaatatatatatgtggtcccactcccaagtatgattcattaaaacaaaacactttccaaaattttcaaacaaattttcatgtttgtttctatattttaatttgattgtgcttagcttagtcattaattgtttatttattgtaaattccctatcaaactcatttgtaagctagcttttatttgtacacgaattatatatagataagatcaagttaccaccacaaaatatttgtaatggtaatgcttgcatactagaatatataaacacatgggcatagatagtttaatttaatgaattccaaaagatatcaacatcaatatctaccagccagagattcggaattatctttattaagaatttgcctacacagcaaagacaacaatattatgatatctctttcacaactttgcttttgctttaattagtactagaattttagctagcacatcagacaaatgagggctcttcataaccccaccataggacccacacagaccccaacccacaaaaaatggagagctctctataacataacataagtttacaactacatggtgtagtaatataaagaaaaatgctaaagggaccagtgtgcctagtaccctcctatatattaatagggaaacttacaaaaatactgtttttttcccaaattttacaataatactgccacacgacaattatttcttttttactgtccaagcctttttttttcttttatactgtccagacctaaaa

SEQ ID NO: 295220 - DNA, 4465 bp, Cannabis indica
gtggttgggtgtctgtaaattttatggttgatcaagatcatcaatttctgcttatttttttttttaatattcttttgattgtcattgttttagggcaattgggcatagagttagatttccatggttaagctgaaatgggtatcaagtatttagtgttgtgtcactgtgatattgtaatagaagttgattgtgtgtttattgattttaatattatgaaagtgaatgttaggaaatctctttataattttctgaaattgcaacatttctttttgtgtcactggccaatgctatgttagaatgatatttcttcaacgaattttgtgatattagtgtgtgaagtctgcaaaatgcgacaattgtgttttgttttgcgaggatcattcatgaagttgatttggtgaatgaagtcataaactcatatagtatatatgagaatcttcaattcctgatttgtaatttgcataaactcttaattgttttaggatatttcactgagttgataaatactaccggtttgtcatgaatagattgtgttaggtgaagtcttcaatgttcactgtgctcattaatttaaataatgtaagttattatgcagtactagagcagtttagagaaagaagctagactgttgtatccaattaaagttttgtaaatgaagtatgacacatcaattcatattgtttaatttatacagctgattaagattttccctttatataagcaggatcataccattgttgctatcattattttagatttgtccaattttattaccactttaaacaatgtgcttatatttacgttatgctgaattgccttgtaattttcttttaaaattttggtgttcctattctctgtttcttaactacttcaattaattaactcatttcatttggtgaactactatcatttaggttatcatccattctacaatgctaaacattccaactaaaattcccactgcatacattttaagtttattccaagtatataatgtggagaaatgataatagcttgagagagaaaaaaccattcacaacaactctttagagcaaacattctgtatataatgttatttggtttcaatttatccataaggaggtgtatatactcatgcaaaatctgacttttatgaccacactttttcacgagttaattaagaatttcttagatttgttagttcgcaagatgagaacaattgttgaacatggtgctgtgtgtgaagggttctttcttatttttaccttatgttgataaatatattttgctgtgatcttgtatctggtatgcctagctttcctatccaaaagaaggaatgctagcttgttcatttgtacagcaggcttcagaggaagataacttgcaagaaatataagttcttattttttattttcttctcaagtataattgttattaacatttgtatgcataatcttagtatctcttgaaatttctgcttctttgcagttcctagaaatttcagattgttggaagagcttgagagaggtgaaaaaggaattggagatggaactgttagttacggaatggatgatgctgatgatatattcatgcagtcatggactggaactattattggaccctctaatgtatgttccaaaaattacacttttattttctttcccctggatttcttatgtgaaatttgtggttttgctgggtttcttttggttattgcatatttcatgcctgtttaaccatggattgccctctcctccttctcttgaccagtttaccttttgcagtaacagagaggcatattcttagtaaaacattagagtgattgtgtgcaatatttgaatcaggtttctggagaagttataataatgttaggagcaaaatatattatatgtatttactgactaaatgagattgagaaagattttttttttctttttcaagattgaagatgaatttcattttatgtttaaaaccagacttcgttgcatggatagatattatgaaaaagtgactcttgtgaagacagacaaatgtgaagagagaatgcatagttggttcttagttcttactaattcttttgaggattcggtttttttattcaatagagatcaatacagagacaaattgcaattaattgttgctttctgtttgtctatatatgattttgtgatattcacatcaccactgtactttttaatatcatttctgaaggagaaactcattgtttcctaatcatgcttcttgctagactgtgcatgaaggaagaatctaccaattgaaactattctgtggaaaggaatatccagatactccaccaacagtcaggttccaaacacggataaacatgacctgtgtcaaccaagaaagtgggatggtaagtgatattgtataccgtcaggcacatatttccttgtggtattctcaattaatctcatatatgtacaaataaccaggttgaaccaagtcttttcccgatgcttgctaattggcaaagagagtacactatggaggacattttgacacagttgaagaaagatatgatgtcgccacaaaaccgtaagctagctcagccacccgaaggttcgtttcagcatttcttctttttctcttcatggcgtataagttctttagaagcatgtatcttagaacttgatgaaaacagtagccatacagcatatttgattttttttctcatggcatttttattctttatatcttagccatagtattatgcatgcatgtaaatctttgtgaaatctgtggttacatggcatattcaaaataaatttgcaagttttttctttcaccccgaaaacatatgactaaggaattgattaacagaaatctgaagatggttttggaaaggtggactaatagtttttttttcgttgaaaggtggactaatattattaaattgagttgtaaatatgggttattaaacagcccattgccgtaatctaactggaattgtaacacttacaaactatcaaacttttgttgctaccaaaaacatggcttatcttcatcatcttgcccttcatattatagttcttgttttttacaagattgtaggtaacagagttctgtggactagatgcaatgaaaatcatgtgtttgctagtttatgtgattcggatcttcttgaattctcttttcttttttcctatcaaagagagggagagctctgaacaatgtatatgaaagaatcgtatgtgtgttgatcaatctgattatatttcttgtgttaattgtcaggcaacgacgagggaaggatcgatcaaaaagggttggtgctgaaatgttgcattatctagaggtgagaacaacgatttcggatgatgatactgtatataaatatataaactggataaaaccagttcacgagagcaatttatgtgcccaatgtctttaaatgtaattaaaggagaatttgcatttggaaccttgagccgtttgagttgtgacagacatcactctctcgccaattctcaccacctatcttgttcatcattatttagttatctttgtctttccaattcaaagaccttatattctagatgtttaaatggaatctgtactctgttctgagtgtttttcatatattttatataaatatatatatgtattaatttcttatcttatttgaataacttgtggggtttgtttgtatactagtctcccaccttctattaataacaattcatagagttaaatacgtacatactacaactaatgatgactaattagggacaaaacataccaaaggtgatttcctgtttgggtttaccattaacttgcgagcttgttataaggcataattagttaatagttctttataatttttataaaattaaaataagtggatttccatattgaattgttcctaaccttttatattatgacgtgagattggtgaaattttattatctttttgtcgtttcatattgcatttcaaggatctattattattaggataaataaaaaaaaattcagttgaaatataatttttatcactttattttttaaaataatttgcttctataagtataggtataatacaaggatctattattaacaacaatcgtttgagttgcgaaagacatcactctccggccaattcttaccagttaccatgttgctattagaattagctcttatgttagttttacaagctgttaagattctgttatgttagtttgttagttcactccctaaaccgactttatcactttgcctggctcatgtaactttcagcattttaattggattaataagaatttgtcattctccatttaaacactctgtttctctcaaatggtatgtctccaaccttttatattttggctttatttaaatttgtgaaattatattccttatcttaatgataatgatgtgcgattcgttttgtcattgcatttcaaggtacctatcatataataaaagccctctcaaaaataaaaagcatataaagggattatttcaataa

SEQ ID NO: 295221 - DNA, 3759 bp, Cannabis indica
atcaggccatattaagctggctcttgaactcgatttcagaagccatgcttggccatgtcctccgatgtcgcatctctcatgagttatggtctctacttgaaatcctctttactactcaatctcgtgcccgtgtactgcaactgaggtttcaacttcagtctctaaaaaaggggtctatgaccattcatgattatatccttaaaatgaaaactttagctgatggtcttaactctgcaggacaagcttttactgatgatgaccttatactttacatattgggaggccttggccccgaatatgactctgtggtcattaatctcacgtctcgaggagaccaactaactctctctgaggtgcaatttcttttgcaaagtcaagagatgcgtattgatcaacttaactcaacctcagcttcagatctgactgccccctctgctaactttgctgctagaggatctggttttcgtggcagatcgtcaaacacaggccgagcatctggttttcgtggccgtggtcgtggacgaggccgtggtaatcaaaatcgtgtggtgtgtcaactatgcaacaagcctggacactctgttgtcaagtgctactaccgctttgatatgagttttacaccagctgctaatcaacagaatacttcccagaacaataatacaaatcagcagcatggaaacaacacgaaccagcaggcattcctagccaactcatctcagcatcctcgtccagacgacacaaattggtatgttgatagcggagccacaaaccacattaccgataacaccaacaacatccaaactcctgctgaatacaatggtaagagtcgcttaattgttggtaatgggcagtcccttgctatttctcatgttggtagttcagtcattaaatctcatggtacttctacacctgttaaattgaattccatactgtgtgtacctaaaattgctaaaaacttattgagtgtttctcaactaacaaaagacaataatgcttatgccaagttttctgctaatgattgtgttttgaaggacatggattcgaagagggttcttcttcaagggaaacttaacaatggactctatcaactcaccacaccagcaacttgctctgctagttactcaccttcctgtttgtccactcaaaagtctagtgtcaacagtcctagtttcagtcctagtttagagtctgtcaagtcttgttttcaagtttctactagtgaatcaagtttgtggcatcataggttaggccatccttcctttaatgtactcaagcatattttaatcaatgaaaagaaatctttaccttctaattcacaattttgttctagctgccaacttggtaaagcccatcataaatcctatcctgctactttaaaagaatccaagcaggcccttgaactcgtacactcggacatatggggccccgcacccattatgtctaggcatggctaccgatattacatccattttctagatgattttagtcgctacacctggatctttcctcttaagaccaaagatgaggctttatccaccttcaaaacctttcaaatgcaggttgaaaaacaattaaataccaccattaaaactgttcaaaccgattggggaggagagtataggaaatttgaaccatatcttcaatccataggtgtgaaatttagacatccttgccctcatactcatcaacaaaatggaaaggctgagcgaaaacatcgccacatagttgagactggtctcactctccttgcccattcaagtatgcctcaaaggttttggtgggaggctttccaaacagctacctttctcatcaatcatcttgccacacctgttttaaactataaatgtccaattcaaaaactgtttggtcttgtcccaaattataaattcttaaaggtttttggttgtgcatgttatccttatcttcggccttacaacacaaacaaattacaatttcggtcagcaaaatgtgttttcattggctatagtcctagacacaaaggatacttgtgtcttcacacctcaggtagagtttatgttgctagtagtgtaacctttgatgagtcagattttccatttgctaatggtttcacataccctacagcacacacagattcttcactctcacctagtcaatatccccaatggttaccatatttatccactgtaacttcagagcatgctcctggtgtagttgttgttgataatggtcattctcaagcttcccaacaagatgaacatctctcgggttcacctatttctcctctacacagccccattccttcatctacttcaccacaatcccccagcccaacttccatcaagtcttacccgactattccccttcacattgacctgccaatttcacccatctcccacaccagaccaccatatcagcaacctccaattcagcaccaaacaaatcaccttccttgcccctcaccacgtccaacacaaccctcccatcctatgattactagagccaaagccggcattcgtaaaccccgtgtctttcatgccttttcacccttaccgttggctttaatgactgaatttgaacctgagaatgtgcagcaggctctacgcaatccgaagtggaaatcggccatggacactgagttttatgctctcttgaaaaataagacttggatacttgtcccccgtcgtccagggatgagtgtcattgataatagatgggtatatcgtgtcaagctcaacaaagatggaacggttcaacgtctaaaggcccgactagttgctaaaggttttcagcaacaacctggaattgatttttatgagacgtttagccccgttgtgaaaagttccaccattcgagttattcttcatctcgctgcctctaatcaatgggacatccagcaggttgatattgacaatgccttcctaaacggcaccctctcagaaacagtttacatggagcagccccctggctatgttagtacttctcatcctcattatgtatgcaaactgcagaaggctttatatggtcttcgtcaagcaccacgggcctggttcgatcgtctcaaacaggtgctatcctccattggtttttgcagctctgtatctgatccttctctatttttctacaaacaaggtgatgccgagttatatctacttgtatatgttgacgatatccttctcacaggtaacaaaaatcacactgttcgtggtattattgccaaacttcagcaattcttttccctcaaaactctcggttctctgaattacttccttggtttcgaaatcattcggggggccaatggtattcacctctcacagagcaaatacacaattgatcttctcaacaaaactcacatgttacactccaagccgagtcctactcctatatctcaaagtgacaaactcagcctcaatgacaacaaaatttttgatcagccaagcttctttcgaagtgtcatgggaggcctacagtacttgactctaagtcgtcccgatattgccttcacagtaaacaagttaagccaattcatgcatagtccaacacaacaccattggaatgtttgcaaacgcctccttagatatttaaaaggtacaattggtcaaggcattgtcttcaaaccgtcaaaagagtggaatgtcgaatgcttcagcgatgcagattgggccggatcaattgatgatcgaaagtcaactactggttattgtgtttacattgggggaaatcttataacttggtgttctaaaaaacaaaaagctgtggcaaaatcctcaacagaggcag

SEQ ID NO: 295222 - DNA, 5081 bp, Cannabis indica
agagagagagagatcagacttagagctagggtttctaacttgcactttatgacttagagcctatcacttatggcttcaaacttagtgttttagggtttggttaaggctcttcatataggagagcttaaaccattcgattaggtaaaataagttgatatttacatattaaattagtaaaatacaaatgactaaaataccccttaaaatagatatttttcctctatttttatgggctgttaaagcccaattcccagtctagcttgttgtccacgtgtaaagctgtgcaccacagtcctgccaggccaatgtctggctggccatgcatctgtaagatgcatgctcgccgaccttgtgttgtctagaagctggccaacctatgctagccatagagccggtcaagggttgctggccaacctccttaaggtggttggttcatcattcgacatcctgtttgagtgtcaggactcccctttgattgaagtgctgagtagattacttggcctttttgttggggcaatgtattgccacttggcactgatattggccacgtagacatgtcacgttaggtgggaaaaaatcaggataatatcagtaatattcctatggttctctaattatgttctcaaaaaataaagatgataaatttccctacatggcagtgcatgcaattccaattaacaaaaactcaaaaaaaaaaccccaaaatcatggcatattaactataaccctctacccctaaatctatttaaacaagtaaaactagcaaatttctgagaaaaggagtacttacttgtggtattaggggtcggggtgagctgctcgcctaattttgtaaagcctccttgtgagctcatcggagtctctctgaaagtccacaaaagttaattctagagcgacggtaaatagatcagcatattgaaatagttcgttgaacaacttagagccaagatgagacattcatcgagaaatttctaggtttgggagaatttttctctataagagatttttaaaaatttgaacaaatggataaaagggccaaacaatctatctatgttttatctataacaaagcttgtgatctgtgtgccactaatccaagggctcaaattaaatatgagaaaacacaaattccaccatccaatagtacaacaatatcagaagtagcatttaatgaaatcctaaaaatcaagggaacgtgtatttgtggtgatattcccctcaagtaatgcactgacatgatcaccagtcagtacaaaacctaaggcttcacgtgccccaacagactacatgactaacacgtaccaacaattgcttgacacgtagatctcatcaatagaatacaaaagtttgggcaattccacaatgtctcataatagaatgccaagaagccaatctagttaatggccaaaaatacgatttcaaattcgaacaaagataacaagcctctgtgactctcaaaccgcaaaggcttagggataaatattattcatgtttctagatagatagctacgtgccattacaaaggcccatctaggataccaagccctttcactgggccaataagatttaacacacgcaatcatccatctaggatggggaaaactttactatggtttaatttctatgattgctttcaacaacaaatatggacaccaagtctcagttcaacaatcaacacttaacatgaaaaatagtgtgaactcaagaaggataccctcctcgcccatccaggaacacaatacaaacatgcatttgggatcacttattgtcctagaaactaccccacatctcactcctcttacacgattttgagaaatcaaacgacttgtcccctccatcaggccttagaaagggtcacatcaaaaaggaagttgccttgttgagcaaacacccactattctaacactctttattccccatgatgactcatgccagccagtcattgtcaacggtacgaccatgaacgaaaggtggctcaatctaaattgggtctcacctaccagctcaataactcaaatattattctattttaccccatcagttggattcttgcactaaaaagaatcctaatgggtccggatcatttcaaccaatcaacaatttgcctacatatggcattaacccatcatggaaagggttagaatttctagtgtccaaaaacgagaaatacagtttaaacaccatatctaagagcttagtagcagtgactcgtagactacggttcattaatgtcctaaccacgtaaaagttagtgtctttttttcttcttaatcatactatatttagcttactatttattaaatttaattttagaaaatctcggtaaacaaataacatttacttatcaacaacactcagtactatttaaaaatatctatcattgaacattcacatatacaaatatttaaacatttaattcatatcaaaataaacaatcatctattgaaacattttagcaatggtattattcatctttaacaacaaattaactattttagcaaatgtaatattcatcttcaacaataattcattaattgaatttttggccactgacaatctatctatttgttaggtatcaaattctttaaagcaaccgatatttcatcttcaacaaatccttaaaattcaaagctttgattaattttatgtacatagaaaaaatcaataaagtttattgtaagttaaattacaaaattaattttaattaatttatgataaggtacatgaataattgatgtaaaaataatttaatatatcttgagaaagacatggtaattagtataagaaagatttatgaatagtcaactgctattgaacaatgtgatctcatattagaaagcctaaattaaattataataacaacaacaaaatatcatagcattaaatatgcataaataaagtaacaacttaatatataatattttttaatgaacaatcaaataaatcatatcatatcgaaaaaaaaataacatataaatacatttaattgtaaaagaaaataagcaaaaattagaaaaataataaaacaataaaaataatcaaaattgaaaaattaacaatagtaattattttatccaaatatcatattcttatgaaaaattaaaaatatatatatatatatatatatctcattctctacaaaaagtacaaaatatcaatcacattatttagtaataatattattattaacgcagattttcattaactaaatttgagactcatgctgatagttcaacatagaaaaaataaaagctatagacaaatacaaatatgaacaacgagttttttacgtggtttttgcagttaaaattttgcatagtccacaagtcaatcttattcagatttctgagtatttttttcagggcctctttcataagagtttttttcgtccttcttttgagcttgtctgccactatttataattacatagtgggcaattaattacaaagttgaccgaaataaatttatagcaatcatccctaaaattttggaatttgattacatattatgtagtgttaatacggtttatgatttgtaaatcgtatagctgtgattttcctgtttttactgggtcgaaactatcgtgtattaaatacgtctttaattgttgaatcttgagcagtctcgacagaaacttgactgtagtgatcccaatgacgagctggaactattcttctttccaaggtcgacaagatatgtcttacatcaaccacgtgtatacagaaatcttctgacttgccagggttatgagcgtcactcccgttagttggatgaaactataggaagtttcctcatagcgagatggtcatcttgcattcttgttcttcaagccgatccgacttttacacttagtttgcttattgcaagctaacgtatgtgttacttttctctggtgcctcgctattctccttcagtgacatatggtttctcgttaatacactaagtgccagttcgtacattgattcctcgcttaacaccttacagtcagccggttacaaatatactctgatacttacgcaattaatgagttattccataaaaatatattgcactgattcacattccctttacattgacacatgtcctccagtcgaattttaggtataataattataaatgaatactttttcacaaataaaaaattgtgattaacacaaatccattaaaaaaaactccaagaaaatttttccaaatctgagaaaaataaatattttcatattactagaaataaatttgaaaaaataactatagattatatatgttgacctcgcttttagccaacggcaatgagttaattaataagcgataaaaatataaataagatacggtaagaactagtaaacagtaaagaacacaggattttaaagaggttcagcccttttagttcgataatagcctactccccttagaatgtattaactcgagaataaaggatacagtatttcctctcttaaagctctcacaatgaaatctctgagtgttttatcttagatctctctctaaaataattctttcaatccctattacattgaggatggatcactatttatagagctagatgcatgagtgaaggtttcccttttgcttacaatatctataatatgtaagaaaatacattgcttatatagaatacataaattgtgagattcggatagcatgcgatatccctttgatatgatcccatgattgtagggattgtatgtgtgcttcagcttcacgatataagtcttgaaatagctaagtcttgatgcattggtcggatcgtgtacccttgccctgctcggtcaagcagactctgtccgtgcaaatgtatactgagctctgtttgaaatatttcttcagccaaatgtaggaaataatagccacgtgtcaccagtatgtgttgccacgtcatatgtaaaaaatgggataatatttgccccccaagtctgcacagacttccaaagtcgctcgtaaacttcactcagcttaagtttgtatcttaacgggtggcacgtgttcatacgcctattgttgatccgatgtaattcttgttggaatttattttaccaggatcttagatctactaacaagtatgttgtt

SEQ ID NO: 295223 - DNA, 1807 bp, Cannabis indica
atataattaaattattaactttttttaataaaaaaaaaaaaaaaaaagtagcagctagttgtatacaggtctcttctcgaccgggttctttctataagctatatggcattacgccactattggtttttttttttttttttttctttttcaagtagtcaaaaagatattgcaaacttcatttgatcaacttttctgtgtttgtttaaagataggccacaggtgtagcttttcttttcatttgtattaaatatattaaataaacgtctttatttgacagattttatttaatatattacatgttaaaaacattagaaaaataatgtggtgattttttctaatgtgcgactattgactatattctatggttgatgaaaatccacatgtatataatgatataattaatcctagagcattcctatttttatttttcttctcctagcgcctccttgatgcgatttaataatattattaaacataaatatgaaaaattgaaaacaaaataattttttaaaaaaattgaaaacaaaataattgagcatttccaaaaatataaaatgactacttatataaattattttatcatttatattaaaaaaccgattttttatgaggctaattaaaatttttgtcactaaatattaacatgtatcaaattatgttaattaaattttttagccgtcaaaaatttgccttgaactattgaaattattagatttaaggactcttgtccaattttattcaattttactaatttagtgattgtccatgtactaaattatgctccccaactttgatatctaccaaattttttttatggtgatatctaccgaatcatgcccctcaaactttgacacctacaaaattatgacatctagaaaattgatgcatcttaaactttgactcacgaaaaacagaacttaaaaaaactagacaaaactaactaaatcctaacaatcttagagaatttagagagaatttttaacgaccttaaaagttcagggacatgattttatacatgtcaaagtttgaggataaaaatcttaattagccaatatattattatgatttaacgtataaaatttaacattttaattctttgaaaatgataacaattttattattgatgaataggttatacctcaaatacccaataggtacaacaacatacatgtagtattattgacggtacaatataagtatcctcattcccatagcataaaagtttatcggactcaacaattgtcacatggatgggctagtaaaatagtaaacacaaattaaccggacaaacatcacactccacacaaaaaggtagactagctacactcataacagtaacactcttattgaaaacataaataaacaatgaaacaacaaaataaaagaaaaaacacagcatatttgtgacccaaatctcaaacgcgggccacccccttcaatcttgaaaccctaccgtactgttgatgctgaaaagtagctcaacaatagattgttattaagacttttaattctttacaccaggttcgatcaagtcgaattacatagtcaatcggtttacacaatttttatctcaattcattcagtcagatctaggttttttgctctatgaattcaagtacaaatttgatggtatattccgatagagtttcagctagtttggtgtgataaaaaattctccatcccgtcttcgaatgatggggtcttctatttataggtgttagaaattttattacaatggaagaaaatgaagatgcattacaacactattgttgtaacaccctaactaacataggcgtattacgtgatt

SEQ ID NO: 295224 - DNA, 1542 bp, Cannabis indica
atctgataagatttttgttttaatccttgagattttttatttttgttaggcaatcaagtcttcagattaaaaataataacaattatgctttgtttaagttcttatgcatacttttgacattatttaagcattacttaatacattgatgatatttcacacatttaaataaatatttactctgcaatcttattaattaaaagtacaaattcactaataatatagcatgaagatgagttgggacaaactccctactaaattgacgacctaaaaaagaaacaaacagtacaaactaataattagccgccttattcgcagattatttaataaaaatatttaaagaataatatagacaccgtttaacaaataaatactaattatagtgaaaatagtgttatgaaatgataattttttctattattattattaaaatctacaatttagagtttttaatttttaatttttttgtttaaacctagttcaaactaaactcatacttagcattgttattaagcaccataagttagcgtcctataaatagttagatgattataataattattattaaagaaaaataagtgagattcaatattaaattgtaacatactataatacatcataaaagtatgaggcactatgagtattctttctcatttttcattataacactctttgtgtttaaagaaaaattaatttattatgaattataatattaaccttaaattaattataaaatgtgtaaaagaaaataattcactaattttgagtttataaaaaaaaatctcattttctagggaaaaaaatataaatagaattactcattttttttcacttatttttctttcctagatttactaccaaacacttatttatttaattttttttattttttgaagcaagagaagaaaattgtattccaacaattactgaacaatacttaaacagcaaccaaacaactcaaaaattgtttataaaacaatcaacactattatatcgttttctcttttagaaagctactaaacatcttattttttaattttttaattttttaatttttttctatttctctcttttatactttttttcttcttaccaaacataatgttattatgagacaaagttgcaaatactttccaagggaatccttctggagtgtttcggaaaaaaatactgacagctttgtttggaagggcattttaaaggctagactagtttgtgtagcaattaatggtgcttgctatcatcgtaacagggctcgagaacatagatatttggtggcaaccgtggataccatgcatggcttagctatgaagaattcggaatgttatgaaaatgttagaggcaaagcccctggtttgacatgtgtcgccgacttaatgtatcgcagttcaaaaagttggaatcatggctatcttcgatttctcttcggccatgaacttggagctaagattggcgggatcgccgacttgcttggtatgctttgtgaatcccattctcttttggagttaatctatctcgaactgaggttccttttcaaaaaaaaaa

SEQ ID NO: 295225 - DNA, 5466 bp, Cannabis indica
acgaaagagtagtactatagtggtgaaagttttagggtttaggaaagaagataatttatatgtatatatatatggaatatatacttagctaggttatatatatatgtgcattttcttttgttgttgttgtttgtttcttttatgtttacatgtatgttttatctatggaatgtcttctaataaatctatataagtaaaatttaaaaacaaatttatcccaattattttttttcttattaactcttataagtaccgtttggctccaaaaaatggaaaatgatttttgttttgcaaatattatatgttgaggctttaattgtctcgaaattttcaatacaaagttttttgtcacagaaaaattagggtagctaataacaatttatagtttttctaagtatgtacttatttttatcgatttctttctcttttttcaaattacagatcgatatataattgatcttctaatatttcattctcaatttcttttaaaaatatatgaaaatatataggaaagaggtaaaatcttaaatagtgttatatagaaatataaattatatatataacacaggactgtgcattgaatccaaattggattaattagtaattaaaaagacttatatatgttattctaaaaaaaatgtaatacctaaaatgttcttaattatttaattaattagtctgcacaaaacatgtacaaaaaagtttacaatggtttactacattatacaaagtgatatgtacatatacataattatatgatgcatatatatatatatatatatatttatgtggtgtgcaatacatatatatgtgtagacactagtactgtaaagatatgaatgtgctttgctctattgtttaagggtttatctcattgaactaaaatgaaaattgaagtaatattagaatcatataaattaggatttgttttggtactttttgttcaattcgattgtcatgtggtggtaggttttgttttagggttatttgttataaactattatattttcggattaagacttgttttgctagtggaaaatatactgtgaattatattaaggcacaacttaataacatttggaccgattttaacttgtactcaacccgtagaaactcaaaaagttgaaaaaacacttgtatatatatatatatacataacctaaatcatttaaaatcagattcaaagaacacgacaacaaaaaaaaaaaaaaacaaaaaaaaaacaaaaagaaggagataaagagagtgatggtgaagggggtggtggaacattactaaatgagaaagagaaaaaagttttgggattttatttttctatttattaatttcatacttctttatttaattaagattgcaattaaaaaaataaaataaataaataaacagtaaatctagccactcatgaactcaaccaactaggtattacggggacgtttgggtgctcttttttttttgcactaaacccatgactgagcccggtacttcaaaatctgaccaacccgcctgatgttaaaccgtacttgtagataatctaatatattgaaactttattattttataaacataatacctagctaaatacatatttattcaaatttagtgcaatattcacctacatagaaggagaaaaaaatgtttattttcataagcacaaaagttgtatatatatcatgtaaaaattgtagaatcatttattttgcagaaatcgatccaatcaacaaataaaaaagctggacgaaggtttacaacaagtgctgctggggaggttcctgtttccttccaactccctaatgattttccacctcatcatatcaatattgacatggtcagtcactcactcacttatataatcatttatatatatatatatatatatacacactatttcttatatgtataggtattaattaatttgatgcattttcaaatcaacaaagatggtttggtcatatcattaaaaattttcatatatatatataaccaaattatagagtgtataatcatatgtaattttctttttatatgagtaaagattcctcaacaacaaattctgttaccgactcaaatttccattgctagaatcaaccttataatgaagaagactttatggattccaatgtcttgtcagagatatttggtgaagacttagaagccacaatgtaagtgacgggttcttattaattccacagagtttcggcaagctagcaaaaatggtcttgtcgaaactttgtgaaattaagaacttagtcacctacattgtagaatctacagagtctcctcgatagggttgattaactgaattttttgttgaaatttttttactttaacattcccgttaatcagattattttgaattatttttcttgcaatataatagtgtatattttgtgaggatgtaacaagttttattagttgataatgattttggtgtgtgtatatgtataaataaataaacaaagttaccaataagagaaaaggggtggagtagtagtggtggtgtcccgatcagacaatatcgtttctctgaaagactcaaaggttggacagtcctacgtaggcaaagactcaatggcaaattcgatacggtatgtaataagatgccacatcggtataacgtttaccatcttaaggtgtcaaataacaataattatatacatatcgctatttattattattatttcaatgaataaactcgtacaattctaattagttagatgattggttaataatgttcatctataattatgaccagtttgttactttcaaattagagtggacaagctttgttgaaaactttaggttatgactttatatatgtaagaaattggcctttgaaaattttgacttgttatgttcattacttaagctttgttttatgtatttatacaagatgtatttatgggctcaaaactagagccaacagaaacatatagaatctgaccctttaatttatatcaaatacaaattatatgttttatattctcattcctaagatttcaaatcacaattaacaaacccttattattatgttttaagtactataattaacataactataaagctttgttttttgtatttaaagggtttattagtccagaggccgctttacttaaaatagagaaaagtttaattagtttcgataatctcaaactcaagtatttaaagaattacatatattcctgacctaaaatttataccaaacacaaatattgtgtttcatattataatcacttccataatattatgtttagatttagtgtattttattttaagatttatattatatgtattcacaatgtgaaattttttgctatatgtttcttgatattatattttatatgtataaaacttgttaatattattacatatgtactcttaattatgcagtactatcgtcatgatgaatcaaacattactcttcgttctgttattgagcttctcaattttttgctctatgaggaaactcctggtaaaaacaaaacaccaaacaagaccactttggtaagttcaattttataaatatacatacataactaattaataatattttgttaatattataatcatattttcttaataatattcaggctaatattctggggtctaatgatgataatcagccaaaactgaaaaggtcatacacaaaaaggaagtctaaacatctgaatgttgaaaatgataatagtcaacaaaaaagaaaaagggtgtaccgaaaaaggaattcgaaaggtttgaattcgcaaaatttgaacaaagaaccacaacaaattggaatattattatcacctaacaaaggtgatgatggtgccaatgaaaactttaagcctcctgaagatgataaccatcttcttcatcctcaatttaaggcggattttatcgaaaaacaagactgtggaatagttattggagagaacaaaaacacaggcaattttcctcgaggaactctgaaaatatttccaagcactgctaaaacagctgatgatttgtttagatcgtcgtacgaatcttttcatttctccaagaaaagtgtcaccaaaggtacgtcacttgataaatttcttgctagaataaggatatgatgttctcttcatgtagtcataaatcacttttgtgttcctctttttaatcttaaccatttattgttgatcaaagtaactatatgattgcctagaaatttgaagtaggtaatgtgattaattggtactaattaagaatacacacaaagaaaaagagtgttgaaagtgaaaaattatgtttaatgactaacaaagtgtattttgtcacttattttaaattaggtctaatgtaaacaattagtttatgatgtttttggctttatgattttgaatatgaatgaaatgcatctcttggacaaaatttgctctatatttatacatgatatatattgatacacacaaagtatttaagtaatttttgtttcattaattattgtgattttagaagacaatgaaggaaaggggaaagggaaggagaatgagaaggagaaggaagaacctaatgaaaaaccgaaagatgatgatgatcaggacacagatacagaagaaacttgttcagattctatggtagatccgaccactgattattattttggaggcaaaattaaactagatgaaaccctacttagtacttgtactagtgcttattctaaggttcctattgatattgagagtgttgataatcatggtcatgatgattctactaattttggatcaacaaaaaatgatggtgatgatcaagggagtttgaagcctgtgaaagtcaatgatgttgactctggaaaagagaaaggcaaagctgttttcaaagatgatgataatggtagtgccaagaagaacaacgatattgatgataaagatttaaggcttctaacaagtttttgtgaaagtgcgatttcaatggacaagaacaaagacaaagactcagcttcttaccctaaaaaaggttaattagtttcttataagactatttaataataaggatattttaataattatatgttttgtggtttaattagacttttcaaagactagtatctcttttaattcatgacttggatttatatcagtttaaatatatgatgatgatgtatgtcttgatatgatttggacaaacaatttcttttctttatttttagttttatattgcatcatgtatgtatgcttgaacttatatttatttttggatggttttgaataatttctaattttcttattcatcttttttctggaagaaaaacaaataaataatatcattttttaaatgaaaaaattctatatccctttttaaaaaaaattatgtcatgcccaaaatatagtacctagggtatgacaatatatatttgagttagatcacaatcacttttaacttagacaagatgtacaatacatatttctttctttctttattttcttttcatattttcattttgaaaaaagaaaaaaaaaa

SEQ ID NO: 295226 - DNA, 4309 bp, Cannabis indica
gcctgtgcctagggccggccctggggtcgggtttgagtcccagtctcgatccagggttcgagtttgtggccgaggccggggtctaagtttggggtttggagcttggttggggtctgggtcttagttagggttcgggtctaaaatattaatgaaagaaaatacaaataaactataattaagaaaaaaaaatatatatgtaacatttttttgaaagttttttttttttgtttaaaaatttctaaattttaattcttactttttaaattaaaaagtgaaaacaattatatataatatttttaaaaatatatttactttttattttttaaaaaaatatataacgattctttttacaatacacactactaaaatagtaaaatctatggagtttcccttttaaaatcaaaataaataattatgttaggtagcttatgcatgcaatctcagaactctttgatatgtgtcaaaagaaatgtaaaaagatggtcaatattctccattttgtggcattttatttcattttcactttttccagtaatgattatgtatacttatcttaatcttctgatcgttgacatgaaaacacaatcttggaaaaaacttttcataatatcctgcaaggtctctcgagcctcattgacccattctagatgaaattttgaatatatgtgattattagctcgagagagctgaaacagagtaagagagaaagagagaaggagagaaaggaatgaactgaattgtattgcatcaatcatgattgttataaaaagatgattagctacttatagtagctgagattacaaagcatagaaacacattaccactgcaaataaccgtgacattactaacctcttaactaactaatcaatacgctaaacaagcttaatactcccccttaagatggagatggactgtaaatgtctttcaatcccatcttgtccttgaaagtattgaattgattaggaaagagtggcttagttaggatgtcagcaatttaatcctttgtagaaacatgaactgtcttgatgatgccttgttgtaccttttctcttactaaatgacagtctatttctatgtatttggttctctcatggaatactagattggcagttatgtgttgggaagatttgttatcacaatataacagtgtaggcccttcatgttcaaccttcaattccttcaaaacagagagaagccaaaccacttcacaggtggtgttaaccattgctttgtattctgcttctgcagaagaccttgaaaatgtgtgttacttcttactcttccatgagatgatagatgatccaacaaaaatatagaagccaatagttgatctccttgtatctaaacaagctgcccagtctgagtcagtgtaggcatgtaatttgacttatgtatctacagcaaagaagattccttgtccaggactactcttgacatactgcaagaccctttgagaaatatgtaaatgtatgactcgaggtgtggacaaaaactggctcaactgattaacagaacaggagatatctggtcttgtgattgttaaatactaaatttttccaacaatgcttttgtacaatggtggatcaacaagtttttctttctcatcttggccaagtttgagattagcttccattggtgtattcataggcttacttcatagatagccaagatcttctaacacttgcagtgcatagggtctttgggaaacaaagattcctttctttgatcttgcaacttttagccccaagaaatactttagttttcccaaatcttttagctgaaatcgagcatacaatctaacctttaatgcttcaagttcatccaagctattacaggctaggatgacatcatccacataaactagtagaaagatgaaattgccattgaaatgtttgatgaataaagaatggtttgtggctgaatgatgaaatccttcttcagttaaagcacttgagaacttggcaaaccattatcttgaagcttgcttcaagccatacaatgatttttgcaatttgcaaactgcatttagaggtaagtcccccttaggtctatacgcttgaggtggagacatatacacatcttcatggagatcaccgagtagaaaagcactgttgacatctagctggtgtagatgccaacctttgattgttgcaagggacaggccaacttgacagtaactaatttgttactgaagcaaatgtgtatgtataatcgatcccttcctgtttgttgtaacccttagcaaccaacctagccttaagcctctctacattgccatcagtagtgattttgatcttatacacctatttgtaaccataacatgctgatcagcaggcaaagatacaactatccatgtgtgattcttctccaaagcctctattttaatatccatagcattgtcccattcaggtattccttggactttactgaaagattctagttcaaaatggcttgatagagccagagaagtagctttgaaggcaggagacaacctgtgatacccaagaacctgagataaaggatgagtagtaacaaaagaagcttgagaagaagcagcgatgttgttagtggccaaataacaatgatattcatttaggtaagagggctttgttacttgtctccctgttctagtatgtggagagatatcatgggaatcatgaggagtaaaaacattaaaagaactagacatgacaggttcattaatagattgagaagtacctgcattctgagaattatgtgaccttggtgtttgagaaaaattagaaaagaaagattcatgtgcagagggaaggccaccaaaatgaacaaaaggaaaaatatgttcataaaaatagacatctctagaattgaaggttatgtttgtgatcaaatcaagcaatctatatgctttcatgccaacaggatatccaagaaaaatgcagggagcagacctaggagcaaacttagatctagattggcttaaagttgaagcatatgctaggcatccaaagacttttaagtgctcataggctagtggtttggaataaagtatatcaaatggtgacttgttctttaggtttggtgtaggtgtaggttgtagtagcaacacaatcttcccaatacactagtagtacataggattgaaatagcaaagctctagcaacattgagtaaatgttggtgttttctctcaagaacaaagttttgttgaggtctttggacacaagagtgataatgtataatcccaaggtcactgaacaattctttaaattgcaattccttggcattatcagacctgacaactttgatggttttattgaactggttttgaaaaagttttatgaactgagggatattaatttgtgcattagatttttgtttgattagattgatccaagtgtacaaggaacaatcatcaacaatggtaataaagtacttgtatccctcagttgtcatggtgttgtatggtccctaaatgtcaacatgaattagaacaaaacaaccttcagtaatgttgtgattatatatgaatggcaattttctttgcttagcataatgataaatggaacaataaaatagagaatcagaattggcataaaactttaaagcattattcaaaggatgagtctttacaaaagagagatgacccaatctataatgccatacaattagaaatgaaaaaaaaaatagaaacaaattgtttactactgatttgattacagttcaggtaatacaagttgccaactttcctacccatcccaatcaccttagtcttcaaagtgtcctggatgacacagttatcatgagaacataagaaagtgcattcagttgtagcaattagagaattgacagataacaaattacacttgaaagtaggaacataaaggacatttttaagaacaaggcgaggtgtcgaaataattgttccaagataagatatttttgaatgcaaaccatttggtaaaagaatagtttttagtttaggatcagtataagtattttcgaacaaggaaatgtcagggcacacatgatgtgtagctgttgtatctatgatccaactatctttagaaacaaaggaattcttactagaaaagtgggaaacaacaggttgttcatcaaaggtattgggagcactgttgttatttgtctcactagtttactgagcaagtaatgccatgagtttttgacattacacactggacagactagaaacaagatctctctccattggcattgttaggctttctgccctaaataaaatctattttaatataatcagatttactaattaatataagatcaaaaatcacttttatgttgcgtggttcaca

SEQ ID NO: 295227 - DNA, 4129 bp, Cannabis indica
tttttatttcgtgtcaagttgtgtcgaccctttttcgacccgcatctaatttttccgatcctaacccgtaaaattcatgtcgtgttcgtgttcgtctgccatgtcgaaacccgttttgccacccctaattagagagtcattttttgtatagttggagttcttttttttaagtcccactccaaattttagcaaaagagtttgtttactagttacatttagctaaacaaatcgctgaaaaatttcttagttaaaaattagaaaagtttagcttatcggaaaatgaaatttaagtttgaagagtactatcgttaacctctattacaatttcttaatcaacttccgtgtttgaaaacataagctgaaatattttttttcacggtggtgttcgttatacttaaaacatcatattcttgtaaatttttaataaaataacgaaaaatagatttgaaattttttgaacacacgtggtaaattaaaatattagaaacgctattttcagtattataacttatttataaaaatttaaaaacgtatggaaatgatattgcaagtacaataaataatattatgaaaaaaactatttcacataagagagattgattaaaaattcataataaaatgtttaagtatcattcctccataattttaattagttatttttgtttacttacaaaacatctattggatgctgttgattttaaaaacctataccatgaataaaattaccataaaaaggtaatatactgggtgtgttcagtccaattggatgtggttccagtactaaaactagctgtaaaagtacaaaacaatttacacagccaatggttatgaaactaacacgaatacactgcttcaaaaacagagcaatatggccaaactttactgccaccgccacctgccccgcggacaaactttctctatctctattcaacattaacatgcattcatgatcctaaccaaccatctttattatacacctgcaaatatggtaccacaccactcatctactgaacttaaatcacactccacactctacacctcatatagctcctttcgagatatttcaaccgcctaaactctaaatcctcactaaagtttcccaaacctctcttctttcatttatactctgtttctttgatacatatatatattagtttaggaaagaattagaagctcatctttcttagcttaaacatgactgaaaattcagtcaaatggttggtttttataatactgaactgcttactctttaatcttgtactttgcgtggagacccagatggccaagaagactacttatattgtccaaatagacaagtcagccatgcctgaatcattttctgatcacttgcagtggtactcttctaaagtaaagtcggttctcattgacaaggaaaccgacgccgatgaagatcaaaggataatatacagctaccagactgtatttcatggagtcgcggctcgattaagtgaagaagaagctagcaagctcgagaaagaagaaggtgtgctggccatattcccggaaaagaagtatgagcttcacacaacgcgaagtccactctttctggggcttgattcaaaacaggacagcacgggggtctggtcggaaaagatctctgaccatgacgtcattgtcggggtgcttgataccgggatttggccggagagcgagagcttcaacgacaccggaatgactccggttccagctcgctggaaaggagcttgcgagattggtcgaggttttactaaaaaccactgcaataaaaagatcgtgggcgctagaatgttctaccggggttacgaatccgctaccggcaaaatcaacggccagaacgagtacaaatcgcccagagaccaagatgggcatgggactcacactgccgctaccgtcgctggtgcaccggtcaaaggagcaaaccttttgggctatgcgtacggcacagcaaggggaatggctccgggagcaagaatcgcagcttacaaagtttgctgggtcggcggttgtttcagttccgatattctatcagccgtcgatagagctgttgccgacggagtcaacgtcttgtcgatatctctgggcggtggagtctcatcttactatagagacagtttatcagttgcagcgtttggggctatggagatgggcgtttttgtctcgggatccgcgggtaacggaggacccgacccggttagccttaccaatgtgtcaccgtggataaccactgttggagctagcaccatggatagagattttcctgcaactgttaagctaggaaatggaaaaactctatctggagtttcgctctacaaaggtcgaagaacacttcaaaacaaacagtacccgattatttatatgggaaacaactcgaccgtccctgatccgggatcgttatgcttagaagggaccttagaaaggcgtaaagttgcaggaaaaattgtgatatgcgaccgtggaattagccctcgagttcagaagggtcaggttgtgaaagacgctggaggggtcggaatgattctgacaaacacgggtgcaaacggcgaggaattggtggcggattcccatcttcttcctgcagcggccgtcggtgaaaacgaggccaaaattgtaaagcgttacgctttagctaaccccaaagccacagctaacatagcatttttgggaactcgcgtggggattagaccatctcctgtggtggcagcgttttcatcaagaggacctaatttcctcacgtttgagattctcaaacctgatttggtagctccaggagtcaacatcctcgccgcttggacaggggatttgggtccatcaagtttaccaacggatcgtagaagagtgaaattcaacatcttgtctggtacatcaatgtcgtgtcctcacgtgagtggtattgctgctctgcttaaagctagacaccccgaatggagcccggccgccattaaatcagctcttatgaccactgcttatgttcacgacaacactctccacccccttagagacgcctcctcgacgattccttccagcccttttgaccacggagcgggtcatgtaaacccgagaaaagcacttgacccgggtttggtctacgacatagagcctcaggactactttgatttcctttgtactcagaatctatctccaacccagttaaaggttttcgccaagtactccaacagaacttgtcgacacactctcgccggtccagcggacttgaactaccctgctatctcagttgtgttcccggataaaacaaacatttctgttcttagtgttcgccgaacagtgaccaatgtgggttctccggtttcgagttaccacctttcggtttcgccgtttaaaggtgtatctgttaatgttgtgcctcggtctctgaacttcaccaaggtcggtcagaaattgtcgtataaggtcacgtttaagaagaaatcacggcaaactgagctggagtttggagctttggtatggaagaatggtgtccacaaggtgagaagcccaattgtgcttatgtggcgacttccgatgtgaaaacgccgtcgtatgctctcgatggtatgttttgcgctacaaataggagaagcataatcgtgatgaaattgtgatcaatttgctctgtttaaccttttatttttttttcttattttcttttgagttcactactagaagaaacgtagaataaacattctcttgtcactgtttttttcttttttctttttcaaacaaatcagatcaattataaaagatgaaattcgttattctgtatgcaaaattatattgattcattgggttccaacatttttaggctgcagatgtaagtattgacagtattggggacacgaaataattttattctattttgtttttatgaagggtagttttttttttttttttttttttttgtgaaatagaattgattagaaccaaaaccggactacaccacaataggatgatcagaccttccaaaaattggctaaccaaatccggaaaagaattgtcaaaaaattgggtagtttatcaactaggcatttcctagctaacaaatttgcacattcattattgattctttttacatgagaaatattgacactattaaatgtttccagcaccatgtggatcttgtgaatgatattac

SEQ ID NO: 295228 - DNA, 2436 bp, Cannabis indica
acaaatgaacaaaatttcaatataataagaccgtaaatcaaaaaaatcgtaaaaaaatgtttaaaattccgtaaaaccgtatttttgttgtttttttattgtttttgtgcatttgtgaaattaacccattttttttttagataattttataagatatcaatttttataaactttttatattttttacgtttaaattttttatatatatatatttttacggtattttataaaactataagaataataaaaaaataatatcaaaataaaaagaaaataacatcaaaataatatcaaaaatatgtttaataaaactattttcatttttatttttaaatcaagaataaaatttttggaaacacaaaaatataactttcaaacaaattttaaataattttcttctcttaattatagcctatgtatgtttttttttttaatatttcggaccctgaccttaattttagaccttaggatccataccctcaatctagacccgaacccgcacctcgactccgaacctgaaccttggaccccaaacttggactcgaaccctgaacctcgaacctagacttactttctctcaactcagtttcttatccaccatttaataaaaaagaactttatacatttttgtttgtgaaaattacatgaaatatgagtttttaaaagtttattacttaattaatagacgttcgtggcctcctttttcctctcccacggcgaagaagaaaagagtggttcaaaagctagtggcggttgtttttaatgttctagcggtggcggaggatctcctttcgatccaagatgagggttttgagcttcctacagaggaattccatgatccttgtgaagtttcggagaacgaacagggagcctctgaggttcgcgatgatgagaatgggatttgaatctctccaaaatctgtaagttgggcgaaggaggtggagaagatggattactagtccaatgcaaaggatgtatggagcaatttcaagtcgaatcaggttatgaccccctctactcatacgatcttacagaaacagtgtacatgtcgcaacctgaaggattcgttgatctcgcttatcctaatcatgcttgtaaattttccaagtctctttatggccttaaacagtaaccacgagcttggtttctcaagttgagtactgctattcttgaatggggttttattgcatctcaagcattcacatctctctttatattatgttcatctaatgctgtcattattctccttatatatgtggacgatatcatcgtgacgggttcttcctcctctgccattgccaccttactatcttttctcaactccaagtttcgggttaaggatcttggccagctgcatttttttcttggagttcaagttaacaagtctactcttggtcttcacttaactcaaacgaagtatattagagatcttctcaccaaaactcatctccttgactcgaatctggtttccactcccatgactctaactttgttgtcactatatgatggtgatccccttgaagatgtgactgcctattagagtcttgttggtgcattacagtaatgcactttgactcggcttgatatctccttcactgtcaacaaattatgtcaatttctccatgctcctcagtcatccattaccaagctattaaacaggttcttcgttatctcaaaggtacattcatctcggctttcatattcaactcgataccacacatgaactttattatttcacggatgcttattgggcctcttgccctgatgatcgcggaagcacgagtgcctactgtgtttatttaggccttaaccttatctcttggtttcaacaaaacagaaagtggtttctcgatctatcaccgaatcaaaatatcgtgctctcgccaacgaagcctccaaagtatcttggatttactctcttcttggaaaacttggttgtcctctcactattcctcctactctcaattgtgataacgtgagcacccttcatcttacatccaacccggtactttatgctcgcactaaacatgttaaaatcgactattaatttgtacatgaacaagtcaaacgtggcgtgcttcaactttgtttcacctcttctgaggaccaagtcgatgattgtctcaccaaacctttagttacttctcgatttcaggcattgcattccaaactcacggtgcttcctagccccttgagtttgagggggatgttaaacagtagtgtttagtattttgtattgagcctctttaattatttgtatagtgacatgatcccaaatattttatctttgctttattcaaagggtaataatgttgggttttgtgcttaaataaaactcatttcaatataatcagatttactaattaataaagatcagatttcgcttttatgttgcatgattcacatgatttatttcatgattatgtttaatgtata

SEQ ID NO: 295229 - DNA, 6430 bp, Cannabis indica
ctagattcttgagttggaggcccatctttttatagtttgacttgaacaggatgttcgataaggcaccattgtctatcatgctccgtgcaacggtgaagttcgctatttgcacttcaacaaccagagggttgtgcagataatgaacatgagtggcatctacttcactgaacgatacaagtgtatcatcctcgcacgaatgtttgggagttctctcctccatggccagtcttcttttttctcatactagagcgtacaagcgtacctttctcaggcttttcccttatctccagctatgtgaagtcctccaataatgacttccaaatgtccttccactaggggtggaattagataaatctcatcgttgttttgatggggaaccatttgattttgatcgaccttcacataccgatttagatatgggttatttcttcatatgaggaactcaattcctccttcggattgttgcatttattagtgtcataaccaaaatctttgagaaaacaacagaactcaatttcctctttcaaattgttacgttaattactttctaaacacacttttaaacaaaaatatttcaaaataaaaaataacatttattttcccataatatcttatttacattaaaagcgtttccctctcgttgattctatgcactaaggagtggcaacggggtagattttagtgatttgatttgtttgttgaaaataaagaatgcaggccgcacaatggagtagtgggcgctataggctgctaatatatataccaagacaacataaatcaagaataataataatcttaaagactagttacatttcagctcaaacctcataaaatgtttgagctgatctttctccatttactcttcgtaatgatacaccggctctaacatcgaaagggtttgcccatgaaacatgttcgaactcggtttccctactgctactcctactatcaaattggctggttgattttcttcggtgtttattagtgtcagtatgcaaaattgtggagttcccttccctttcgctgtcccaactgctcccttgggtaggcaacctcctccatacaccatttccgcaatttgagtctgtctcaaagtctgaataagaagatgatgatgatgccacgccacccggtgactgttcatatggtctgtaaaagccacttccttcttttccaaatatgtatacggagaagtcatctgtactgccagagtccttggtgctgacagtgctggaagaacttgcatctgagcaacttaaaatagatgaattttcacttgatgaatccactcttcgaaatctgggggttaggtttgctctccaatcatatggatctgagctatctggattagcaattttactgaacttagtttgtgtggcagcagcatccatcactatgggattggatcttgacttcaatttgccagtgctggaaggaactgcttccaagttccttctcttaaacttaccaccattgaccatattgcttcccagtagggctggggggcgcggagagtgcctgaacatcaaaatattaaggtgtccgtgatggcatgaaaacttagaagctcaaagagcaagtgtagaaaggtattacctttcataaagaagcatgtaagccccttctgataagaccctctccagctccacgggtactacctaaaatatcatttcgtattaccaattaaatttcgaaatagtatctcatgcagatagaagctcggtaaagggaaaaaagacgtgtaaacaaaggaaagagcatgaaataaggaacatactgtgctgtcatcaatcctgaaccactctccccgagtattctttacataacacacatagtgacccgaaaaagcagcattcatggtatccaagtgaacgaccacagcataaagactgtacagaggagatacaacgcttgatctgctcatatatggggtcatgtcaagctcctcaggaaactgaacggacttgctcaatttctcaaagttaccagactgcaattcaccacaattaaataaactaagcatccaaaaatatgtgaatgtcataaggtcaaagaagggccatgtcattattaaaataccttaaatcgtttcagcacgattgtaagaatatttggtgcctccagaactgtcaacttctttctggctttctcataagatttacatctttataaaaacaaaaaagaaaatatcaataaacttaaaataagaaataaaggaaagcaacttaaactctacattgagttggaattttttgcctaaaggtcaaattacaagtaaaactttcattcgttatgctcacatcatgataacaaaattagatgcagaatgataacaatcacattaaccaacctgctgcaaaaatacttattatctcgatccaatgtttctgtggctgtaaattgagaaagagcctcttcaagatttccaatttcgccatctatttctactgtgaggtccatcatccgctcacaaagttctgattttcctaggcacctcatacacttgatctgcaaattaaaatgataagattccaatatatatatacacacatatatcaaatttagagggcaacaagtgaaatgatacttcaaaaattcagaacttcctgaactatcagagtcagaaacaaccttagatcgaagataaccaccaaaggtcattcctactagtgtcgtttcttcagccaaagaacctgtggcatcagcattgttgaggaaaacagattgcattgtatcaacagcatacctgcaatcttagtaacttattacttgatacgcatttgaggggcagaaataactatgtaactgaatacatttggtcttttgagttttatctggctcaccttaaaaattcatgggcatcttcttccctaccatgaccaagatgacttccaattttatttattttggataatatcccaattggagacagtggggaattcccttcccttgccttataaataagatgctgaaattcacaaataaaacaccagtccttctttccacctgtacacaacagaagaacatgtaaaataaaagaaataactacagtatctgtcaagtgtgtgatcctttattcgttttaaaataaaaggaaatgcaagccaagtagaagccaagaaagggaacttacaggttttggagtggagtccttgaagaaaatatgaagtaagtggccgagtatatgccaagcactggagcacggcattggcatagcagctgtataaatgtagagattgtcatattattagctaaaacgagtgtattgacagaggaaaatggccagcaattatgattacttattaatcattaactagaaatatttgcagctgaaagcaagtgtggcaccagaaaaaagacatcctctttagatgtaactgtcgtatgtgtaaatttgaagtgtactagtagttcaatatgcgacaatcaaaaaccttggacaccaaattttttaaatattgacagattgcaacttaaccgaacttaaatcaatgtcaaaaacaaaaaatagaagatgaaaggtaataagtcatatgaatacagataacaaaagctacttgaagagttgtaattactaagcattgaagatgtattacattaaatgtatatcctacacattgaaaataataataaaaaaaaaggctataagttaattttgaagtcgaaatctctacattacctgtttccacaatttgtaagaccaaatggacgaagaatcatcatgtcatcagtgtatagtttcacgaacaaatcatatggaaagattagctgagtaaacaacaacagcaactaaattaatgccaaaatcttacaagcaggaatttgcaaagataaaaaaaaaaatcacatcttaaaacaataaaatgataaataaccttatgctttccagcaatctcagtcccaggggtagatgtattgcatttcgtctgtttagatgctctaaactgctgtacaactttcagcatggaacttttcaaaccagtacgagcattttgtggtaaagttgggaaactggtacttttaactggcagagcatgaaaaccgtcaccctttgtggatatagaattggaagcaaaatgctcaccagtgcttgaagatggatgaccagcagaagcaactgatgacaaagaatggtcagtatctttagatactgatctcctagacttagcagtatctttagttaacttttctactgaaggggttccctctgtcagcttcttactgcttaaattaattgcaggctgaacattttcatgtttagctgtcttatctttgtttagttgcaaagaagacttcatcttcccatcaccacgactagaatccatcttacttactttgtttgtgcatgatatggaatcagcagaagttgccgagctaacagaacttgagcgagatgaatttgtaacatccatatctttaactttggcattagtgccaaggagatcagagctattactattaaaaagaggtttctccactctgtcataagttacagaatcagaaatattaattaagggttcaccatcagcacaagcagcgtggccagtttcagttcctgcataaaaacttacatttagtataaccatcatattgcttttaagaaaatagtacagattattattctctcaaatatcattaccatgaaaagagtcaagttccccacaaaggtcactcttatcttcgaaatgcattacagaaattgggggacgacactcatccttgtgaccttgtctccaatgaatgatttgacacttaccagaactaaaaacaagatatagaagtgaaaaactaaaataaataaataaataataacaaacacagggtaggaaaagtgagaatgaaaaatttatgaaagagcacaaaagtaatcatcaaacaacttctggatcagatcacatgtccgtgacaacatagttgagtctcagcatcaaaacataacaatttcttctcctaataaacatgtacccaaatagaataaaaggggactcccaaactatgtaaccaaataaacagtatttatcaaattgaatcgaaaactgcattttctttcacagaagaatttatccaatcatcatcacaaaaatcaaaactttgaatcggaaatacatgtaagttgaatccatttgacataattgtcacatactaacatactgaatcatgagatgtcagtgttttgaataaaaactttatattatataagtaggaaaagaaacagctcagcacttttgaaataaacggccaaaaaagttcactcctgaactcttacaaagccctctattttctgacccacaattgtaatcattacaaagacagaaagctatcttttttatcacatcatcagtaaacccttcaatatcacatgaatctataattgagatacgaatgtcctttcctcccaatatttcaattgcattttttttcactagcttgaaaatcaattaaaagaaaacataatgataaaggtgaaagttgtttctccgttcaaattcctcagccataaattttctatcatggaattaatataaacatatatgcgtatacacataaatatacagttggttccaaagattgatccttaaattgaagagaatttagaaatagaagaagaactaaccagtatctgacagacttgcactgagagcatcgcatggtggtaggacaataacagacaacgcattgatgaggcatagaaacaacaactggatcgcagaaagctctagcttcgacctcagccatggcggactcctccgacgccatagcgagaaggcgcaacacctcctcctccttagcggcggcattcctccacttgcgccgaattaaagaaaaggcgagcaagacagagaagaagaggagggcatggaaccctagaattcccgggaacagcagcatttatccagctccgaggatcaatccagagcaaagaaaccctataatcggaatcttgctatacatagattcgacggcaggagcgacggcgcgtggggaaagcggtggtggagaaggaaagggtagaaagggaatttcaagtggtacaattggctcatctgggaaggacgaagaagaagaaagaaatgaaattgaaaaaaaaaaactgttttggggtgtggtgggttgggtgagaacaaagagaacccaaggagatacagaaggatggctatataagtccaaagtgtcgttgactcatttctcacacttttttaattattttttttaatccaattttctttgctactattttttcaattttagatgctacgaaatttcttctcaattttagttaattaaacgataattattttttaattttacaattttagttgtttcagtagtttctccgatattttttatgaaattgttataagaattttaattgcgatttaaattgtttcgttaattactataaaaaaatttgtgtagaattttgtaaaaa

SEQ ID NO: 295230 - DNA, 2250 bp, Cannabis indica
tatctgtcctgagaactttgagcttgttaccaatttggtttcctagaacatttctctatttaatgaaagtgtccaaggcatgattcttgttcttcaataagaaaacccacactttcatgctaaagtcatctataatgctcataaaatagtatgctcctcatgtggttagaattaaggatggtccttaaagagcagagtgtacataggcaagtctctatgtggtagtgtattctcctttattgaatttcaccctctaagccttcccattcacacacttaccacagaactctaagttttttttttttttttttctaatttctcttaaataatccttgcctatctaattcttcaaggcctctttgacttacatgttgtagtctgagatgccatagtctaatcttactattttctgagttgtgtactattggtgcaacactttaaataacaatgtcaccatccaagatgtaaagaccatcattcaattgacttcgatgagatcttgagatccataagcaattctcataactcatctcctatcttgactgaataaccaactttgtcaaacattccgacacatagtaaattcctcttaattttagggacatacgtgacttgctgcaaggtctgtatgttcccatcatgagccttggtcatcacagtgccaattcccttgatttcacaagccttattgctgctaagaaccactgttccattatgttcttttgaaaatgtattgaacaaattcttgtttagtatcatgtgaaatgagcaacctaagtcaagaacccattctccacccgaatcgacaattgatgcaacaagtacattatagttcacaaccatcaacaataagaaatcatctaagtgcttcctcaattctaaaagtataaaatctcttcttgagatataatttattgacaaaggatttcttcatgtagattgaagacagcttgttccatagcccaagtgcttttccttcatcaaacacttctctaagtacttcatccccaagattgagaagaatggcactatgtgccttagcttcgatctccaatttctttttcttgtcttctacaaggttcattgcttcttcattaagaacttcatggattccctgatgcacaaggaatgattgtctgaatatgaatcttgaaggattgaatgcggatcttggaacctcttcttgtggctttggctttgatcataacatttttggtgaaatactcatccttaattccaagttgttatgctacttataacactgcaaaaaagatcacatgaaactaaaaaacaaaaatagaagaataagaaccaagaacacaaactgttatggcaaaatgaatcaggtttattaactttgaatcatcacatgtacaacctaaattgaacttctcaaaactatacaattgtggtgattaacaccattacataatacctcacactgaggaaaccttgattagatacacaattatcctatgtataaccctctaaaacactcaagaacacttaaaatttagaactagagagagattattggagaattttgtcccacatggattaaatgtgaaagtattgagccatatataagaacatgggctagtccactcattgccaattggttttgagatggaaccccataattctcaacagagataaatctgagaggcctttggtttcttcaaagtggtgatcaatttgaatgagaacaaagctacattatttataggctttccaattcagttgcccaagtaggaagaagcattaaacttaattattttgtttgccaagtagaattagtagtgatgacttggacaaatgagtaagtagactaaatctccaacaagttatttattttcctattgcaaataaattttctttttgaatttcagattttaattatagatttatggttaattgggcgtggatggaatataaggaaatagagtcattttaatcaaattatttatggtcattaaattaatgaagtatggaacagagtcacatttaaattacaaaggaaacatcgaactcatattgataatgtgttgagaacgagaattattctcatatataattcctcttcggctcaaatttaaatctcctcgaaatcacaagaacccaaataatgtttcatctctcgctcaataaaaataaataaataaataaataaataaataaataaaagagaaatttgattttctatacttagaaaatcttaaatttttttcctaaatacatacttaataatat

SEQ ID NO: 295231 - DNA, 5258 bp, Cannabis indica
ataatcgcgctttttttcaaaaaaaaaaatatttagtttgtaaagattgttgtttttgctacacaggtgagcttttatatagaagctcaatgttggttggaaacaaccaattcatttcaagaaatttctagcattctttagttcttcaaccattcttagtttacaaggtggttttctaagtcccctagaaaattattttgaaaatatgtagcaacaaaacctattgaattattctataaatgattagttgttcaatattgcaattctcttcagctgattaatatatctacaaattcagtactataacatattaagcttacttgcattaattgttacatcaattgtcacatacataactctagactcaaaacacaagcataaagacaaagtaactcattcactcacttatatcatatatttaaacaatattatattaactactctttgtccatagaaaccacttatttgacacagctaagggaaagaacctatcaacaatgtcatcaacacatttataatgccattgtctccatctcttgcagaacaaaagtggtccaaatacaataccaaacccaacaacaaatccaagttcaacactcaatacattccaatcaatgctatgttctttccttgtattaggcaacaaagttccacttccctcttcatcatccaagcatttattcatcaaggggaatccacaaagtcttttgttaccaacaaaagaatcctctgaaaatgttctaaattgattagccattggtatcctaccaacaagattattgtaggaaagattaaggaatgataggaaagtgagttgctctagtgaggttggaattgaaccaatgagattgtttcttgagagatctaatgactccaattgcctcaaatcacctatagaagatgggatttttccagtgtgagcattgttggacaagttgagaactgttagagcttgaagctctcccaatgcagctggtattggtccttggagattgttgcttgaaaggtcaatggaaatgaagatattaaggatctttggcagcttcatttcttggcctttggatgtaactgtcactgtataccgataatatacacctaaaatgctcatttggtttagattcaatgtgacagaatagagatgagtgaatccaagaacattagaatttgtggtattgacatttgcttggagattttcattatgagtcatcattgcctgcattgttttaaccattgtcctggtattactccactgaaattgttttgagctagatccaatatttgaagcatttcccaagttccatttgtgttgggacatccaatggtacctgcaaagttgttggatctaagaacaaggacttgcaaagttgttgtgttcttcaacaagcaaggaaattcgccgaccatgttattgtggccgaggtctaaaacctctaatgcagcacaattggctagagatttcggtatctttccttggatggaattgccattgagatccagggtcttcaaatcacaatctgttgggaaaaaggcgtcttgaatcgggcctcttaagttgttctgtcgcagattaagtacctctaatgaaacacctatttcaaacaaacatcttggaattttaccacttaatttgttgtgagacaaatcaagaacttgaaggccactagcactacaaatggattcaggaatgaccccactaaagctgttatttgatatggagaaaaatccaagagatgagaggtcattgaaaaagtgaattggaatggaagaagtgaagttattgttggacaaatctacatatccaatagaagccggtacaacaggtatctttcctcctagatagtttgaattcaggtctagaagactgagagaactaggaagacgaataaggttcctccataccaactaagtggttatgtgaaaggttcaaaaaagcaagatttgtattgttcccaacttcccaaatccagttaggtatctcgccatgaattcggttgtttgaaagatccaaagcaaccattcctaattgattcttcaaaagattaggaaatgcccttatgttgcaagaagcaagtgttaacttttcaaactgaggaaaggacttgagagtaaacttagtcacacttgcatttactgaccaattattgtatgaaaggtcaagaacagcaagttggtctagctcttgaaatatgtcaagttgtagagttccattgagcttgttataagagagatcaagtgagctaagatttttgagtttaaggatagacaataggaatggcccttcaagattgttgctactcaaatctagagtagtcaaaattgaggaagatgcagtttgaaactcaagattgttaaattggtttttggctagtgagattttttttcaataatggtagttcaaacaatgttgagggaatactacccttgagaaaattatcttctaaatcaatctcaactaagttcaaaaggccttcaaaatgagctgatggaatttcaccagtaaaactattatgattgagatctatttgagtgagtttcttggacttattgaaagagggtattggacctgtaaagttattaaaagacaattgaagattactaagttgggtgagttttgaaatgaagcttggaattgttccactaaagtggcaaaaggaaaggtctaatgtggacaagttccaaaggttaccaatagatgatggcaattcctttgaaaaatttgtgaatggaagcatcaatttttggagagaattatttctaggaaattctggcaaagaaccactgagtaatacattgtctgtaagatcaagagtcattagtgtaggtaccttgaaaagttcacctggaaatgctccatacaattgacaagaatgaagactcaaagtactcaaccatgagaaatttgctaggaattcagggacacgagaaagcaaatcattgttatccagtcgaatcaccgaaagggattgaagcttcacaagtgactgatcaaaaggtccagaaagagagcaatcagagaagctcaacactctcagattaggcaaagaagatgacaagtcttggcaccattcactcccacttgttgacatattaacaccatcgaaatacagttcttcaagcatagaaagattctgaacaagcattttcaaagtgggattctcaagtttgagctcattagctgcaagaactatggttggatcataattgaaagtggttgataaatcaagtgtgatcaatcttcttaggtgtgacatctcacttggtatttgccccaaaaagccagcacttgataaattcagataattcaactttttgagagtaccaatcccagttggtatcatagaactgaaaaagttacaagacaaatcaaggcggttgagatgttgaagatcgaaaaggctgcttgaatttccaagttcaccagagattccttcattgctcaagttcagatccacaacaaggccttctttgcaggatacaccttcccaatgacagcaatcagaattttgggcattccatttcacaagctttgtagagatttcagggtcgaattcgaggctctttctcagttgcagcaacaatgcttgctggtgatcaagacactggcttgaaaccaaaaacacattgacaccaagtagaattgaaaacatgtaaagccatgtgaatagtgaattagttctcattggtgaatatatcaaagacaaagtttaatactcactaaaccatgtaaactctctatttagcttgtgcagaaatatatttcattgcccaaatatagaaaaatatctattaattatgcagctcattttgacaataaaagaaggggataagctaaagccatagacatgggaaacatttgtctttagtgtcatatgccttatagtggttggtttcattgattttaagcctcaaatatctatgcaggctggggtccttactctatgacctcatatagtgattgaggtgtggcctccactatatattaagtaaaagatacataaggaaacttactatttcctgaaatgggcctagaaaacagtcactagtcgaaaatgtgaaaacgtttctgtcaaagatttctgcatatatatatcactggcttccttcaaagtcaatgacccttgttcttgaaagtgataacacattgttttctgatcattcatttacaagaaaaagacacattatttggtgggtgatggtgaatacttacacttactcaagtgtcctaaatttgagtatgtaatcaggttttgtttaagtttgtttttgaaaagaaatgaagaaagaccacaagtcgtttctgagatattaagttagagatttttcatttgatgttttggggattcaactttgagccaccttgttttattatacttttacattgagccgaacctaagactaagacttgcactttaatattcttcactttaaaatgtaaaacacattacaaatatgatcttagttaggaatctcaccgatctcatatacaatgatattgtatatctataatcaaacttggatactcatgaaaactaaatctttttgcaatttttttttttttttgatgaaatttggcaaaatttttaacaagtgagaaatttgacaaattttttattatcatattgagcacttagcaccttctaaaggtgtcactttaaaattagttaacgattggattaattggtgctttttaagatttatattggtttattgatgcttagcacttttattacatgatgtcttataattggttaacgattatctataatctttattaaattaaaataagtgaaatgtatcaataacgagattacaccttataaaggtgctaggcaccatcgagagtgccttttaccatatttctatgtaaaaaagggtatactcagctaggtgggctaccatatatttaattattttttataataagaaatgctaaaaaataataaaaattgaaggtatatttacagcgaaattttttaatatttacaaacaattgttacacatatgaccctaattaaaaaaagtagcggtaaaagtactttattttacgatttttttgcagtcgtattattttttggccattaaatgttagttcagaaatatagggcgacatattaaataagctaaaaaaatatattactacatttaacaagtataattagacacttaacagctaaaaaaatatatgactgcaataaaaacataaaataaaatatctattttttttattaaagttatatatatagaataattataaatag

SEQ ID NO: 295232 - DNA, 1221 bp, Cannabis indica
aataaatataaaattagaggtaaatttgattaattgattaataaaatgaacatttttcaacttaccccattaattatctctatgtttatacccaaacctagaaagtttgtgggcaagcccatggtttctatataaattataagagaagagttttcctaaaaatatgataattgaatatcttggaaaaatgtataattggaaaataatgtaccttatccatatacacaatgtttatttgatcattttcatttatttatattaactgaaataaagatagaataagatcatcacacaactgtaaaatagaaaatatatctaaaaaacatttaattcaaaacaaacttagctattcaatatacgattgatgctggtcaccaaactatactctctgaaggaccagcttcagaatcagaaggttgtctacacccacaaatttcccgatatatggtcttgtgggattcttttaaatgtcacgttcggccctgtgatttcttaaaagtcgttcgttataaccacacttttcaggcccaaacgtgaggagggtgtattagagtagtccacattgctaagctattccttctattgccaattaattttgagatagaacctcattcaccttattcacaaattctaatcacttgaggtgcaacttttctaaagtaaaatattgagaaaggctctctctctataacaccacaaaattttttttctaaaaaagtttctacgtaaatctgtatgtaatatttattttttcttttcattgtctattacttacatattgctataaattaagtgcaacttccagctagttacatataatacaaaaaagattaattgttgcaagtttaacggaagaataattaattaatattatgattttcataatttataattatataagttaatgtattaattattaagatttttttttatatgtcacaacaaaatttctattttttttacccacagctaatttagactatagctacaacaaaatttaattacttcagttcagcatcggcaaaattattttctcattgattattttccatgaatagaattaaaatatagaatcagtgttttttttaaatattactactccgtacacactctttgatcaaataaaatggttcaacatattcattgataatatatctccctgactttattttattattatttttttttttttttttctatttcatctataaatatatatag

SEQ ID NO: 295233 - DNA, 2860 bp, Cannabis indica
gtgcagctcgttgctaatcaaggagattaacgaaaaatgtgattaattaaaatttgcttatttaattagaaacataaagtaatatatttataaaatcccaggatcccatttacaaaagtttgctatccatatacaaaagtttagtcgcctagcgactatacagcaaaaagccctgatgtcccaaagatcgtacgctcgaggactaaccacctcgacatgtacaatcttcacctgctcgctctcacgactccttagctttagccttccccttacctcaattcagaattcaagtgtgatggccaacatgagtggaacaactactcggcaaattacaggctcctttacttagatcctcttaaatctgctagaaaccacaacaatttatagcgcaaaaatcagaaacctagctgttctatagggttcgaacaagagagagttttgagagagagagttcatttttcaactttgtatattttgtaaaaatgattttaatgaattgattttattttattaataaaatatcagcataaaacataaataaaaatctgattattaaagttaactaacttcactaaaagacaaatcaaagattggcaaaatgaccatttttcccctcccacacaaaaaccataaaagatcacttaggggtatatttgtcaactctaaaatctcgactattcccaacatcccaaatgtctaactatattgccccgctatactaaaattctaagatgtgattctaatagccaaaaaccgcgttcgaaagttgtcgggcacaaaacatgcaaaattatgaaattccgtatatgacataaaatacattctcaattcaaataaatcatcgtaaataaataattcaagtctaataaacatgtttcataattcaacctaattatctactaattttcaaattaaagctaagcgatctttacaatacgagccctttgattccaatagacagttttcctttccaccgccctattgagtgcctttcgagtttcattctctatcctccagtctcttgttcttgtgggaagattatccagtctatcaagtttagcttccaggtctttaatgataatatcaatcttcccaaattggagtttattctacagtaggagggtgacccgagtagcccttacctttttgaacaatctggtcgtggcccaagggtaagccacagagtctcaagcatggggagccactagtttacttctatcatcctgagtccacccttctccaaatttgaaaccccttttgaatttagcttctaactccccaagtataaacaaagcaacctatgatccaaattacttgtctaaaaagagcaaacaaccgcttttggaaaaagcaagttctaatcctcattaacaagcacccctagcgcagacttaacatgcgtgctgttcaatctatgattgtcccaagttaacttgtccccttgaattggcaaattaaggagaccctgagaataaaccaagttcgagatgatagggatgaagaagcccttacctttagaacattccctctgtaactcattaagcacgaagtcagtgtctcccaaaattaaccaaggcccaccaaaatttatcttcaattttcataatctcagtccagaacttcattttagcatgaaaatatggaggagcataaacacaagagtggagccaagagtgggataggggttccaataaaccacaattgagatttaattgcgagaacgagtgatacattcaaactcaaaactaactttcctagttaaaataataccccctgcacaaccaacaacatgtacaaagagtaaaataaaaatgaatactattaagaatatgtaccagtggagtagaattaatctttagttcagtcagaaaataaagtcaggagagcacgaccgaaccagggacttcagttcacaattgtaggagtctgtcccaatcctctacagtttttagctactcctctcatggctcctttggaggagggagacaccatcctccataggggtaacatcatgacacgagatacaagagccaacgtcatcaactagggccgcactagtcacctgattattcaaatcgtccaactgtattctaaggacgtccttcaggatgtattttagccgactatcaaaacaaccataattttccgaacaaacgccatcatcatctacttgctttggcccatccttatcccaaggaaaatcatgaacaactcccgggtattgatgaagcaatttctttggtcgatcgcacgaagagctagctccttcagtaagttttctttttctgagatgagtagttctttcattatgtttagaagtagcttgggctccaatatctccaccaagggccttaatctcatgaaagtccaatttatcaaaatatttcagctcatttaaaatagttttttgggtttgaaaacaaattggacaaaggaccatttgaaagttaatttcccacatatagagctattatttgggcactcattagggctcaaacaagaggatcaatcgtttttctcataacaaatatgtgctgttttttagaattataagaatgtaatgcaatatattttattaatgaaatattttcatattcaacaaaaataatattctactttaatgagttttaatatataatctaaagtattgctgtcatataattataacatttttattaatataaatattttaatttgatgaataagaaatttattgctccaaaccaactattacaacactaatctttacactttgctatctacacattacattccagatctatacaagtcattacaacctgttatagtgagatttctctcacttagaaactcgagaccagactcctatttaaaggacacg

SEQ ID NO: 295234 - DNA, 2019 bp, Cannabis indica
tcttaaataactataacatataccatcataaaaaaaattaaactatttttttaaaatactgaaatagcacccttggtgtattgtagaatttttttttttaatttgttttttattatttttgaaaaataggatctatttatatttattcggatgctttgttgaggtggtgttgtaattgtcaactaccaatgaaaacatgacccacttccgatttcctaagattctaaatttctaataatccttttgattttttttggtttggttttggacttaacttctcaatttgtctatctatatatctattctccacaattcatcaaatgattgccttttttattatttttttatttgctaaaaatgtctctttatttatttatttctttattttcaattggtgtgattgacataaattttggagatcataaaagaaagaggttttgaaaataaaaactataactaaaatattttgattgcatcaaccgcccgcgcccaactcccttttttctcatacttgtttttttaatcaaaattgcaatttcattaaataaagaaaaaaataagtatcaatattatagagttgtgaagtaatttaaaacattaaagtttattgttcttaaatttatagttacagaagtttgttttttttttggttaattaggatttgtacccctgaactttgacatgtatcgaatcatgttccctgaattttaaggtcgttaaaatacctcctgaactattgagattgttgaatttaaggacttttgtccaattttagtaaaaaagtctaacatgggtgaaagttcaggggacatgatttagtacatgtcaaagttcgagggacataatttggtagatatcaaaatttggggagcataatttagttcataaacaatcactgaaataataaaattgaatgaaattagacaaaaatctttaaatttaacaatctcaatagttcaggaagaatgtttaacggccaaaaaaattcaaggagcatgatttgatacataatttgcttgaagcttcactgttatgctcatgttacgatcgaaacagatagcttaaaagctccttaatcccaattacctcagtcacttctggcgccaccttcccctcaaaataactcaactaacatgccaccatgaaaccgttgatgtatcgaaccacaaacccagtctcgaatcttccatcctcaacaaaaaatattgcatcgacgtttaccttaatgccaatttttgctttagtccatggctcattgtcatcccctttgcacaaaggacgcaatagaggaataatattacctattccttaagcttttactcattaatcaagcaaagacgtcacaaaagcaacaatatttatctcagatttcctacgttacttccataccaacccattccaagctttctacaaaacctaacataacatatatatttgactaagacgacctaagtcaactcatctcatgatttcttccagctagccatgctcgaatcaagctaaaatctctccctaccgattcaaatccagtcaaacaccaacacttccaagcaaaggaacaagagacaaaacaatgaaagtctgtctcgaccaacacatcacaaactagccaatttaatgacacatccacatgttttcttctaaggctcatacgtgatgtgagacaatttgacattgcccgccacataaggtccttaattttggtggagctttgagttgcgaaagcttcttccaaaagccaaaaattgcatcaacaaggttgtaacgtcctacctaattaagacctctacggtgatttcctaattgtcatgcatgcctttgctaataaaagagttttcttgaaaatcatgccaaatttaaactttttaattacactttaaacttctataaatatataaccatactgttaggttatttttagcctaagtttcgggtcacattttatagttgtttttcttctttattattatttttggaatagaattacgcttgttttctttgatttcaggtttctacact

SEQ ID NO: 295235 - DNA, 4383 bp, Cannabis indica
tataaggtgaaataatacacatcttaaattattattgtgacataaagaatataaatgatatgtataatttaattaattagaaaataagcatatctctaattaaataaaattacgtattattcatcttatgttacttttatctttaaatatgataaatttagttcaaaccagcgtctgcaaaatgatctggattgagaataaattaaaaacatacatttgatttgaattttagatgcctaatgtatgtttaagagcctatataagacaacattacatttgtttcaagaatgttatgtagtatcaaaataacttaagtttagaacactttataatttcatacaaagagatgaagtatctttattgagatacattaaacattatattcatgtatactttattaagatgaattgaaattttaaaaatatagctaaccaattacgttacaacttcgctggttatattgattcacataaatcatcactttgattacgtccttacgattaccagtaatttatatcctgaaaattcttgattgttatttccatttttagaagtcagattcatttcatgttttgaggatacatcccgtatctattattgaatttcatattaggtgttatagttaatgattctatatccaagccactaagaaacttttacgacaaattcagctacagtttttatggctaagaactatcatagttttgggccgaagctagtatatcgacattgagtatttagccatagtgaagtataagtagtaattaagcacacaaaattgaattgagtgatcactatatccttaattaaaggcatgttgtaacataaattcaaggattgtaaagtaaatatgggattaagttacccctatgcatttttcagttgtacaattaaattattcaatgaaactctaatttcaacatatcctgatattcaggcaccttaatttcatttgagaaaattatgctcagaggaccagaataaacataagatttagggtttattcgcttagatatattgctacattaagtacatttttatgtattaaatatatcataatatatggaagataatactagccatataatgaggacctattaccatgatttatatgtttgttatttaaaaaggataatcattaagtttaagtgtaaattaatttaaatgctaacacagtgggagaatgttagaataattttatatatatggtaacaaattaaatatttaatttgatttgatttaaaaaatatgaatgattatttaataattaattaaaatattttatttatgtttagatttgattatcaaatattttagttactcgatttaatttcttgaattaattatcaaaatattctaacaattaattgtggtataaatattgtttctcaactataaagataaggtatcggtcctcaatttcactactcattatgtgaaaactataaattctatctaagagagtagagagagcttggaagctcgattatccactctaactatttttttatttttttttgtaaatttgaagctcgtatggaattgaagttcagaaaaatcaatggttggaagtattacattttctttcatcgtttacatatacgctcgatatctctatattattccgctttataaatttattgtatatattttattttatattttattttttatataataatgtaacaattaaaactatatattgggattttagcaatagataagttatggaaatgcaaatatattctattagatctcatgtcattgtgtaaacttctttctatattttaagttagtgaatgaggtcaaacaaattgttctttaaaagacaaataattgagctaaagaatgggggtatgaaatatgaagatgaggttagacccacttattgggacataaaggggagttccttaagcttgacacatggaaaagcaatattttacttgtcggtatagtgggaaacgtggctggaaaaagtggtatttgtgtctaagggtgtgaattttaataatatacatttttaataatcactgaattcactttttttttttattgaggataattttatgtttagtaatatttttagttttatataattattagtataattatgtattgagtcatttataatttgataataatttttaaaaaatattactaatcaattataaagtattacctctaaataatattaaatactatccaatctgtttttttattatacatttggtaataatgagcacatttttgttgtacagttttttatcgagaaagacaattattgttggggggatttgtggggttttggttttgccaatatgaagaatgacacatattttggccaattgtttgaagagaggacaaaactagtgggattgtttgtgtttggacatatattaaaaaatgaatcaattcttataagaataccttatctaaattgcatatgatttgtttaacaattatttaactccctctctatactctctttctctctttctcacatatggcttcatttgatcataaagtctctttccatggattatggacacaaaaatagcataaacttgttttgtggtactttaccttttctagaatatcataatcttgattgtgtgatgagataataggcatttaggggtcatccctttgtttatattaagtttttatttttcatttttggaggcctactgcttcttaattgtcccctaaagcttaagccctccatcatcattatccatttctcaacttcaattattagcccataactcaaatatgaaaatggtattctgaaagtcacaagggcctattagactccaccaacttttataatcaaaataacaatggaattagtcaaatatcagtgaccattgattaattaaatagcttgctccagcccttgttaaatgctcaagttgaaaccatttactttcaagcacataatttatagataaatttgaggagaatcatttgcagaaaaaccccaaatttctaattgcaaagaatttgaaaaatatgatacttataagacatcaacaggtatatatattttaagaccatttcctggagatggagatgcaaataagtggtgtaaaattaaaatatagtgcatttaacaaaaaatgtgctctaatggtgtgccaaaaaataatgtaaatttggcacatagtaaattttgtaccaaatttggcacatagcaaattttatgtcaaatttggcacactatttgctatgatgtaaaatttacactacaataaatgactattttttttatttatattaatgccatttgtattattttattaatataattaactatagcattaaattatcaagcgtttatattattgttttacatcttacatattaaaataataattaaattgataataaagttattagttttatttcttttaacaaaaatattaattagatattaaatttgacattaaagttttgtaattgtgcattggagtacaatgctaaaattagatataaatttactacaaaactactttttgtactaaatatagcacaattttttcatctcccattgaaaatgttctaagttgtgtcctaaaatttggtattactcataaatcataaaaaggatgacacatggaattttcaaagccagtcataatggtatttgtagataacaatagactgactaataaattagctatcctcagttactttgttagttatcattaatatgcatattagttaacatcataaacctagttttgtattcatatgctgcaaaactaccaaggtacgtgccactgagtattttaaataatatctattggttgtgatcaatgtcactcttttcttaatgtcccaacaagttcacctaattcttgagttacttattaatcattctcaaactaataatgaagattctgagtaccatatgtatattcttaagggaataacaaattttattttaactttctttgggtcaaagcatgagtgagtgaaacataattttattttaattttacatatccaaactggttgtctaacaataaactaggcccaagttggcccatatatagatggtgtcaagaatggacttaaattggagtattttgagacccaatgattagggaacttaacaaagggttatttataaaaatatgagaaaaagtagataagttttgatatatgtggtataaaaacttaattataaatatggtatttttttttttaaaaaaaaaactttaaaatatgagaaaaaattattttatatagagagaaatgctataaaaaatttaaatctgtgtttttttttctttttttttaaaaaaaaaattaaatgaaacacaaaaataaaagtagatacttttttttattatagaaattaaagttaatttttttaac

SEQ ID NO: 295236 - DNA, 8108 bp, Cannabis indica
taataatctcaataattcatgaggaatttttaatggcaaaaaaagtttaagggacataatttggtacatgtcaaagttcagggaaaagaaaatcctgattagcctaaaatttatttagcaaacataaatttaagataccaaatatatgtaagataatttcaaaatacaaaatactttataaacattaattattgtaataccaaatatattttaatcctttgaaaaatatatattttagtaacacatagggtaccatatttgtgattaacattagtacttaatgctttctctttcagctaacgaattctcttttaacttaatactttgtttaaacacaagattagttgagatatcgattattaactttatttggtttgcagattaaaaaaaaactttatgtggtgtgtacattaaaattatataatatatttatatacttatttattcattattttgtaggagaatgtatgagtgagtccatgtgtgtaaagagattttaatttattcacaagtttgatgaggaaactgacacaaaaacggtcacataattatgaaaaaaacaaaataaaacagaaatcttaaaatacaatatatatgtcaccatccagcataacagaaagaaatatataacatattatagccctaaattaaataaaaattaaaatgtgaaggagaaaaaggaagaagaaaaaaaagcaacctaacctaatcatcatccaactaatacataaattgcatatataattcctggaatatatcccaacagagtcaacaacaaatcgatccagaactccacctgcaattaattaacaattaatcaaataataatttaagaatacactacatttggattagatcatttgatttttctgaaacaaaattatttatggtcttgaaataaatggaattccaaacaattttatcttcttttgtttataatatagatatattaaaaattttataatataatattaggaaattatttttcaccaattttgtatctcacaattggttagcaatgtatatccttcattacatattcatgaatgttattttctaagaaaaaaaataaaaaatctataaatatatgtagttttgaaaaaaaaaagatataaaaatatttctgataatcacaaattatttttggaaaattagttaatgataactgatgacaaagattattattaccccacagccatagcgaaggaagacacccactggaggaagaaggatggccaaaatcacctctaggaatgtttctgatcccattttaattaattctattatttattatgattataattattattagcttataaattatcaaaataattactagaagatcgatttattgactttacttctaataactctacaactaatcctgaaaaaaagaagcttatttgatggaatattgaaaacttgtgtatgtgtgagctaatgagcttcataattctttcatgatgagaaaattatggagttatttaagctaatatatttgaacccctctaccttgcattaaaattagacacataccccatgtactagtcaaactactattatttttatttttattattttttaagaatatttcatttttttacattaaaaaaaatataataataataataaataatatttcatttttaatatattatacatccccattctccatacatgttgttgagggtgaaaaaattgtcgtacaatacttgctctatttggaaggcgaatatttctggttcaattcgattccctccaaatattttgctagttcttcctgatgggaggttcgggagttttcctgtagaaaattgtctaatgcttgtcagtagacattttggattaaagagagaaaacacggtaacacagaaaatttgaattgagagagagaattcagtaggttcaatgaataacccactaatcgaatgattaaattgccccttaaaaatagggaaattgatgatatttttcctatactttcgtgagttgttaagacccaagggttggctggccatatgatgtccaaaaagctggctgacctatgatggccacagggtcggccaggggtggccaaccagtccccttgaggtggctggtttatcatctcgttgttcctcctaagtactcggatccctcgttggttgaagtgctgagtagatggcttgaccttcttgttggcgagttgtacttccacgtgacattgatgtaggccatgtggacataccacgtcaagtgggtaaaaattgagataacaaagtgaatcgaagaaattaataacatgtatagaattttgtgattactgaagatttaagttgatttactattgatcatctttatgataggtctttatagtaaactgtatgtttgataaagacaactcaagaagtggatccattaatataatgttgctgcaaacttgagagaagtaattagaaagtcccatgaggaatgacattatgtattccatatgatgttgttcttgaagttttttacaccaccacatgtataaccattacaagtacatgatggtctatagtttgataattcttcccagatagtctttaatctggtaaaatacatgctgatagattgtgagtcttgtttaagattcattaaactcttctcaagattgtatatatgtggcccatttctttgatgaaatatgaccttgagatcaatccaaatcattgaagcagactcatcatagagaatgctagaggagatctctttagaaacagagtttaggatccaagagataacaatattgttattcctgacccaggcattgtacaaggcaagatcggttggaggtggctttggaatggaaccatcaagaaatccaagtttatttttgacagagattggtagttgcatagctctagtccaagaaacataattttcttgagcaatatgaagttgtgagataaggatattacttggattgtctccatgatgaaggtaataagggttggcaggatcctcaagagggtttttcaaattagttgtctgaaaactttgattgccatgaacgtttaaagctagagtatcttctgttccaaatttaacggaggtttgatcatcatttgacatgcttgaagaaggtagaggagaggattaagaatacgataaagatagtgtcgacgaagagaaggaaagcacgacacattcactagagaagaagaacatagtggacagagcaagaaccaagatcgatcagagaaagctcctctttctctgctctgataccatattgtggaatggaagaataaatgaatgaaaaatgttatttaattgattgaaaaaaattacaaagagaaagccaggtatttatatatataccactaactgactttgactaaacacaaaagtagctaaccaacggttaactgacaaactaactgtacacaactaaataactctcctaacagaattcaattgtaccaacagggtatataatagagtagtggaaaatgtaaaagttattactggggtagtatgaggatattcatattaaaatacttccgctgaaaacttgatctagtacgacaaaactaacacaacactccaccaaagtttgcaacctcaattaaagcaagctcaaagggcttgatttgataaggtgtccactgatcttcacaactttggattcaagtcttctaaagctaataaatctctttttgtacagtacaatgtacacatttcaagcttacacttatgtgctagtttatgtacatgacatacctgatatgggcaacaccaaaaccattgtctctacactacagtgatcaacaagctaagtcacacatttgctttaaaagacttgggtcaagtagactatttcgtaggcactcaggcttttcatgctgctaatggagtgctattgtcttaaaccaagtatctgtaatacatcttgtgcaaagctaagatgcaaggagttaaaactcacaacactccaatgaatagtggccaaatattgtcactgatccaatgcattatacaactttacacaagtctattgtaggttctcttcaatatgcctgcatttcaaggtctgtcaattcatgcacttttcatttcaatttcattgggttacaatcaaacaaatcttcaattacattgttggcactttagattatggtctcatgattgcaccatctccaaatgtacatgtccaagctttatgtgatgtagactagacttagatccaaatgaatagagatccaccacaagctactacatttatcctggacctaatttagttgattggcaatctaagaagcaaacaaccctttatgggtccttaacaaaagttgagtttaaaagtcttgctagtgtgattagtaaagtcacttagattaagtcattagttaatgaacttcaatttcctcttaccacagctccaattgtttggtgtgacaactaaagcacaatcatggttgctgccaaccctgttcttcatgtctagactaagcacatagaaatcaacttgtactttgtaagggacaaagttctgctacatcgaatctttgtgcaacatgttccaaccatggatcaattatttaactgtatgaccaagcctatttcaagctccaggttccctttcttcatgaaaaactgtgtcaagtctagagccacactcagtttgtggtggctgtcaggacaataatgataaatgaagctctaaaataataacctaccacttgttagttttctgttaattctgttttattcttggttgtttgttagagttagttgcaggttatttcttgtaaccgattgtgtaaaagcaacccttgtaagctctttcaatcaattcatgaaattcatttcctccacccactttagaatctaaaaaaatatgtatatattttaaaaagcaatttttttatttggacccctaaaatgagtgggccctaggcgcgggcctagcccgtctatgccccgggccggccatcatgtacatgtagatgaaatcttgcagatatacatctaagcttgttcaaaataatacaattataatatatataccaaaaaattatgatttaattgcatatatattactgtgtaatactaatataaaacaacataacacaagaagaccatcctggaaagaaactacatcatacctctttttattaatttttgtatgcattttgtttttaatctgctattttcacccgactctacaatattttatagaccaaaaagtcatacaatttctatgtaagttcctagcctaggagggcctcgaacctaaaacaagttcaataacatgttaagaatgaactttattataacaggaataaaagaaatattttacttctgaaaattagacaaagacaatcaaaccatatgtactgcaccatagataaactcaatgaaaaaccagttcctgaaagcaaaatccctcagtactattttcttccaatagtcaaaattggttggtcatggtagaaattcttgaagtgagtttgtctccgtgcaatgtaaccttccaacaatctacttggagtataaagactgagacctttttcggtacaactgcaaataatcctttaaaatgttaggaattatagtagcgacaccatagctcctccaactatttcaagaatagaaacaaaagacaccagttctatcttagttttggatggttttaaataaaattggcatcggaaacttaattagaaatgctcaaaccataacctcaatgcataaatttttcctatcaaacagaccaggggcattacttaatgcaaggaactttggtgcctaatgcatagatcagacctgagcttagttactaattagactgtaaattacctcggtatttgttatcttgtgtaacaatcccaaatgtttctgcagtttcacgaatcatgataccactcactccagtgaaagcagctattttacactgggcaactgagaaaagaaggcttgagtaagaaacaagagaagagatatgcaaaatatagtaataacaaatactaacatgaaaagtatatattggtttagactgtttaagatcaaaagtagaggcatggtggtacaaacaaatatatactatatccatacaaagaaagctcatgacctaaaataatagcaccatgtaaatccgcatccagaagacactgagccaactgatttttcctgtaatgttgaataaaaataccattaaaataacaacttgtcgaaagaagaattgaaaactaagttagcatcaatatcagcgacagaaacccacccactacttttaagaagttgtgtcatgtaacctttccaaagctcgtgcattggtttaaagttttcaaatctgcaatccatacacattaaccaaatgaagaatgtaaacttaagccaaagattgcaaaacaggaaaatatatacatgcacttgtcaagagtgagatgtaaactcacttatggaactcttgaggcaaatcaagtgacccatgttttttatgttgtttcatggacatgtgtttttttgaacgctttgagtgcattcgcaaagctcttatacgagaaccagtagatatacttcgtccatggacataattatccagcagaatccaattgtcaattcttttgtttctggatccttgcatgtacttatgagctgaatcaccattttgaagaagttcatgcaaaatatgatcaactttgctttcttctctgctagaaatctacattacaccaggcagaatgttacacagaagcttttaacggaaagaagttcagtgcaagagatccaactggtttagttcaaagccaatagcataccccctcaatattggttgtcaacagattctcatgtacggtttgagagagttttatgtatgctttatcatttttatcgacctctgcgcaaaacacaccaacatagttatctctctcattctctttctataaatatatatattaataagagtacaaaaaatatacatagctaatatacaatctttcttctcttcaaatttagaatagcaaaactagtgcaataccttctgaaggagcatgacctgagaaggtgaaatttcctgcagacaagtaaggtttgggtacaattaggttaatatgaatattaagctacaccaccatgaattttttatgatgttttaaaaggaaacaatagaaaccagtaataaaagtttggattcataaaagaccaacctttcttagaaggggctatagctgtagtaggagccatagaagaagaaccaatacatctaggctcttttccatattttatatcctttttttgctgctgaacaacaagatcagctttcgcagctgcaaaccttcgctctaaggccaccaaactacgcttcatttgatctcgcggagttgtgtcactagacatggaagctacaataatagtttaaacttcatcctcactaaacaaggttgcaaatttacaagcactggttagaaaaaaagacagaagccaccgaaaaattacaatgtatacaaaatttgctgcaatattagtagctcacgtaaccacggttctctcaagcattttggcaaacaccttccctacatgacttattgaaaaaataaaaacaataatttttcaaaaagttgattcgaagtagaaagctattgcaactataatattgtgtttcagttgttaccatctgttgtatttaactaacatatgaaaactcttagacagtatataaatttacggaacatgagcattaataagtaatcgattgacttacaaatgagaattgagtggaaaagacaatggtcaaagtgagagttgcaaggagaggagttgacgatgaaggtgtcagacagtcagacagcagttgaagtcctcacgagcgaggccgtccgccgtctctctcaagtgtaagtacacggctgagaaaatattcttcatgagttgctatcagcacttgtttcgatcttgtaatttaataagggaaaataaaggtggtaaataacattttggactctgtgttttttaaatgtattttgttaaatgacaaaatagactcggtattttttaaaatagtaaatataaaatcttaagcttaattttggacaactttttttttctaatataatcaatttaaaaacaatttctaatacgaa

SEQ ID NO: 295237 - DNA, 4872 bp, Cannabis indica
actatcttataaaaatgttaaagttgctaaatgaaaaaataagacacttgaagggttgccacttgcacatgaaaaccgaagactgttaggcagtttactagtctactatacatgctttcatcttactgtcaaacaagtccacatctcactcactagtcttcgtccagaatgaggttggttggttggcaaaaccccatgtcgcgtgaccaaacttgtactactctctagactctactccctatccatctatcttctactatagtaatatatatatatatatatatatatatctgcacggtcatatactatattcatatttacatcattgcatgccctactgagcttttctctacctacctctttccaaaacggctcttataaaagccacgaaatgtttaacaaacaaagcacgtacaaaattcaatatacaatatttctctcaattaagaacgttctctttgaatagtaagagaataacaataataattttaacaatggtgtcggcagctcaaagagtagagagtttatcaagcagtgggattcaatccatcccaaaagagtatgtgagaccagaagaagagttaaagaacataggcaatgttttcgaggaggagaagaaagatgaagggcctcaagtacctactattgatttaaagggcataaactctgatgagcctggtgtgagggagaaatgccgagaggagttgaagagggctgcggccgagtggggagtgatgcatctcgtcaaccatggcatctcagacgagctcatcgaccgggttaagaaagccggccagaccttcttcagtctccccgttgaagagaaggaaaagtatgctaatgaccaggcctctaccaacatccagggctatggtagcaaacttgctaataatgctagtggccagctcgagtggcaagactacttctttcatcttgtttttccagaggataagcgtgacttgtccatatggcccaagatacccactgattatatgtaagctttttctaacactaaatatttatctatggctttttcagtatcatcatcatcatcatactcatacactctctgtttttttctttactctgttcttgcttgactcaagagtcaggactaatttgacttttcaatatataacattattaatacgacctcattttcatgctcgatattttattagactatctctttcaatgatgtaaattttttgctagctaaatttcacttaaaaagaaaaaaagagttaatgttatgtttagtttaaattttataattgtagttcaatgtattagagctaaaatatattttattttaggtagaatgtgtaaaaaagtctacagaaatattaaattttcattaaaagtatataaaaaaaatcgtattaaatatacaaaaatataaaaaagaacctattgattattaatgtggaaaaataataaatgtaaaagtaatatttaatgtaatataaaatttggacaatgccatattttgtgctaaatttagcacaacgtttagcatgtgtcaaatttaaaacacattatataagtttacttttatagacataactataaaatacatgtacactatatttatatgttcttaatttatagtattgttgttaaaacttttatgagtattaaattacactaataagaaacactaacattaactttaacatttctatagttataatagttaatgcatatatagtaaaagtaatgttactatatgtttacttataataagtaaattttcaaaaaaaatatattcatgattttgttataaacagataaatgaagaacataataaaagaaaactaaatataacaagatttataatttagatattattagtgaataatttgatactttattggcatgcagtgaggcaacaagtgagtatgcaaggctactaagagggctaacaaccactatattgtcagtattatccctaggtttgggattggaagaagataggctagagagggaagtgggaggcttagaagagcttctccttcaaatgaagatcaactactacccaaaatgccctcagccagagctagccttaggcgtcgaagcccacaccgatgtcagtgcgctcactttcctcctccacaacatggtcccagggctgcaactattctaccaagggaattgggtgacagccaagtgtgtccccaactccatcatcatgcacattggtgacactgttgagattttgagcaatggcaagtacaagagcatccttcataggagtttggttaacgaggaaaaggttagggtttcatgggctgttttctgtgagccacctaaggaaaagatcatccttaagcctctttcggaagttgtctctgaggctgagccaccactcttccctccacgtacttttgctcaacatattgagcacaagttgtttaggaagactcaagaacttaatggttcaaaataaattatataatcataacaaattcatcattaatatgttcaaggacagttgagtcttggtactacttttattaattcaaatgtatttttatagtgtcatgttttttctctgcttcatgccctagctaattaaagaggccttatttttaaaataagtgtctgtttgttacttgtatctagggctttgaataataaatttattgggtttgatgtttttattccacaccctcccctttttactataattttataattttcacaacattttatacctaatgtagcatattttataactattcatgaagaacataagcaatgtaaatataattcagaaaagaataatgtaaaaatacatttaaataatatatttttattatacttgtattaagaatatctttgggagttcgatttcatggtgaaattctgttatttatgattaccaacttaattatttaaaatagataatttattgatgttctgttacagaattatttacgcagacaaaaagtcttttaaacaaaaaggcaatatgtttaaaaaaaaattcatcacggaagataagaatgaacttgactaacacaggaaatatacatggtatcaatattctttcagctattactagttcatgggaccacgctcagagaataaaatttattagaagaatattcaatgattacaaaaacaaaattattgatttcaattgggggtgagaaggacatatgtatctaatggtgtctttattgattagttgaagattatttttaactcttttcagacgagtgaagtctgtaagattgtaatgctttgctggaaattatggaagggaaatctgacatttcatgcttaaatggtgtgcatagactcttcatattccatactacaaaaagttttcaaaatacacttcaattttactttaactcccaaaatacccctcccatttaaactctcaccaaactctcaatctcacaaagtctctcacgctctctctcactctaacccttcactgtctctggcgctcaaccaccactgaccatcgcctccaccgtgacttttgggcctctttgtctctcaccatctttctctttttcttgaattaaaacccacaagaactgccctcgaaacccacaacaattgcccctgaaacccacgacaactgccccaaagccccaaaataatgactgaattgctattttaccaacatttcgacatcgtcgatgtagattggaagacctgagacaccaacacagactaaaacccattattcagtaagttcttggttttttttttttgttatttttctaagattaggttttgtaatttatgcttgagtttaagggaatttgtttgattttatgttaaatttctgtgtttgggttttgatatctattgccaatcgttctatttttgagtttttctatagttatcgatgtttctcggcatagttgacgacgtctaacgatatcaaaaaacactaggataggaaacataaataagtagtgatatattattgacatttcaccatatatgggtgtttagggtgttggtcttttcttggggttttttgtaatgagtgatgtttctcgacatagtttgtgatttcttgtgatatcacctatgctagctaggataggaagtagatatagttagcgacaagtagttatatgttattaatatttttgtgacatatgatgttttgtgtggtggatttcttgtggtttctataattaacgacgttcatcgacatagtttgcaactactcacgatattagctatgctaggatgagaactagatatagttagcgataagtagcgatatgttatcgacatgtctcagcatatggcatttttgtgttatttatacctaatgtgtgtttttttggcgattaatagtgatatgttttacgacatttagcagtttcatccaacataataataagatgaactatttagcaatgtattgataaaattgtcgatatgtggcgagttttttcttgcgacatttttcgatgtcgtttgtaatttttagcgacatgtcattatgggttttaatatgtctctatttttgttttcttaattttttttttttgtagatggctccttttgaacttaaactttcagttttagagcatttcataggtcgtcttacctatcgggggtcaaacaaatttaaaaatattaaggtcaagtttgaaaccctcaggttgactgagaggataaggccaaccctttcataccattttgggaagctggagatttgactttttttggcgcattgggccacaacctactgttgtgaaagatgaaatttgataaagaatctcaaaatgagatatggttttatgtgggtaaaactgacatgagattcaagcgacttgagtttggactgattaccgacttacctgtgggtagtgctgttgggttttatgc

SEQ ID NO: 295238 - DNA, 5671 bp, Cannabis indica
gtaaaataatttccaacaagtgcccttataggggaggagatagaagccaagtccatcgaccgtttagtgaggacgtattttttagggaagagtggtgtgaatttggatacacttttgctatgattgcatagatgcaagatagcagatgacatgtacaagcttggactatgcacttttgttgagagtgtattggtttcgaaagaaggcaatgaccaagtttggccagacacattgacatttgctgatgaccttgagtttttcttcaagtatttgtggggtgagtgtgctttttgtaagttgatgtatgagtaaggacatgcaccattacatggagaacgttaagaaggaaaaggcaagaaagttgcttagaaggcaaagtatacctacatggctatgtacctaccatagagtattgggtatatgaagccatagagaaagtgggaaataagcatgatacttgtagtgtgaccaagttccctaggatgataaattggaaaaccaaagagggccaacaaaaatagggcgtgaaggcgagtgacatcccacacttgttcaacacaagcgtaagttcttatatgtgtttcatgttgatattttaatccatttttagttgacataaatcaatgttagtttgcaacatatttgtgacatttaaatttttttatatttttgtttgtatttggttataaagaagtgcttgtgcccccgacctagtgaggaggattatttcaagtccgtcaatgagagtgaagcccctcttttttttagatggatattaatgagatggtggacgacgatggcacaaaattcaatgtttgaaatgcaagccaacaccattgctgaagtcgtgcgtaaggcaaatatagttccaccaccacttccttcggaagtagacgagccatctgcttcgactactctaaccactacagctaatacattagacattacgacgctagcaaagaggttgaatagacttgaggcctaacaagctgccattatactcttgttgatggatttaataaatagccaaacaaatatgaggcactcttttctgaatagtcgaaaagagatggagtttttgatggtttagttggccaatgtgacaactttgttgaatgagaaggacagggcaccacaaccatcccaactagcagatgatcgaccacatgagagtgagtatgaagatgagttcctaaaagattaggaataagatgatgctgaggcatcgtctactctaacggatgtcattatcatgaccattggtgatacacagtcacaagacgatgtcctactcctgattggacccctagaagaggtaccatttgtgagaatgaggaagaaacctttctatttactggactacactgaggaaaaaaggaagaagtgacttcttctagagaatgtagattcgacaagaccagcaaatcgtagattgctacgtacgttcaagaggtgggtgcttgggcacatcctaaataactgtcccaagaatctccacactgacattggtgacgtcaatttctttacgaagttattaatggttggaaaatagttggatgatgatgtaagtatttttctttataatgcatttcaattttttattgttgtattttatcgatatgtagtgacatctagtgactttttgccattaggttagcaaattcacacgatatataagccaaatatcataagaattcagttgtagcaatttttattgttatttttggtgacatcttgcgacatttttgtggatttattatgattatgtttagcgacacgtagtgatttcatttgtgatattttacgatatgttggctatatttttcttttggtataattagttgtttttttgaattttcatgcaacatataaatatcatttttcacatgacgaggaggagacgacaccttttcccaaatccgtacccttagtcaggtgtggttttggactcatcatgcccacaatttatgtatggtattttgggggcacacatgggtgataggagaacctttacatggtcagatgttattacagattaatactatagtatcaaagactatttcctaccatgttggaaggatcaaggcttcatatacttcaccctgaacttttaatctcaaaagcattgggtgtatgttgaggtagacattgaggtgtgacagatttggatttatgataatgacacctcttgtaccaaagacgaggtttttgacaaacttatgataccctaaaaagagctattttcacatctctcacagtcaactagttatttctcgcttaacaattacattctcaatcacacactaggggatagtagccaactgagaataatacatgttaaacgcatgccaaggaaggttgttccctaaagtgaaggaaggtaactaataatgttcctacaactatctacatttcccctactaatgcattgtttttacttgtttgctaaaattgttatttttaattttgcagtggtgattgtgggatgtaggctattgagtacatcaaatacctcatgatgaaccaatcattggagaagattaaggatggtaaatgatggtgtacagagaatggtggggtgtggacctgttttaccgaaacctagtttagtgatcatagtagaacgatagggatatttcttttgtaaattttgtatttttgtaattaatagacattgttatcactatatatcgataaaggcatcactatatatcaaaaagtcatcgccatatatcatgtcttgtgtcgctagaacaactaaaatatttttaaatttaaaatcaatgttaatatgttgctacacatcgtaaaatgagttgtcttatgtcactaatttttaattttaaaaggttactggatttatgtttatcttatcatatcgataatgtaattgataaatgtggctagcttttgtgatatactttcttttgtatttatggcttatataatcatattgatagcgacttatgttacaatatcgataatataaactgataacaattgaatgtgaaagaagaaaataaacattagtgctttggacggattaactcgactaaactgaaaaatttattgagcggttaaaatattttttttttcttaattgggcgggttacatttagatttttgtaacctgatctttacattgaattaaataaaatgtaacgtaaaccgactaaaccgaccgacgcacgaccctacttttggggccacaatccagagcagagatgtcttagtgtagttagcccctctccttttaagtcttcttgtacaaggtaggcagccattttcatggctagttggcaattgacatggtagcgtggattagagctatcaaagatatctttttccaaaaaagtaaacaaaatattagagctaatatagtcttttatattctgctatatgtgttatacaacgataactttgcagcatatcatactttgattaatatactaagaatattgaaatacttgaatgagatttgtgccaaatgttaacacaaatctaaaataagagaagacaagttcatgtaaatatatataattatacatgtatataatctattttaattattgagtttattagtgatcaagtacgttctagcttagtctagctcaccggagatagcaagggcttatcagaaaagaaagctttaaggttggctaagactatctggatcatggaatcaatggaaccttgggttgacacagcacaatgtggagacagaacaacattgtccaaattatacagctctttggggacatcaggctcgttttcaaacacatcaagaccagctccaccaagctctccttcacttagaagatgaaccaattcttgttcatcaactagatccccgcgccccacattgatgatcacccccttctttccaagggccttcataacatctttgctaattatatggtgagtttcagttgtcagagtgcaacacaccacaagaatatcactttcggatgcgagatcaaaaacatttgagaagtaagggaaaggcttagattgcttctcctttcttgaagtgtaggaaattctacagccgaaggcagagagccttttcgccacctcgaagccaattttccctagtcccactatcccaactctcttccctcctatctgaaattacaactatgaagatcataaacattacacaaagaagtggcttaaaacacaaatagagcaaaacagagttgcatcctgccaaacacctcatcagcactctctatatatgccttagcaaacacaacaaaacaacccacataggtttacgaggttcggtcaagaagtgatctatatcttggaaatgtagtgaatcttattcaaccaacaacgtaagttctttcttttttcaagtacagagaaaaaagtatcatcttggaatctaattacaagctctatgaatcaaaaatggaattttttttacaccaaatttaataatcaaaagccgaaacaaacagaaaaacctaaccttagacccaagtgggtactctcctccggtaggccagagcccggaacggacatagctatcggcagccgaaactcgtctcagaacaccgaataacagagcaactgtgaaatcagcaacgtcatcagtgtacgcgcttccggcgttagtgacggcgatgccacgtaggcgacaggttgacaagtcaacatggtcggtgccggttgaggaggcaacgatgagttcgagagaaggcaggtggcgaagagtgtcttcggtgacttgggcgagctccagaatgacgagagcacgtacggagtgagcatggcgggagtagaaagtgtggagcggcagaggagactcgtgagggtcgattaagagaaaatggttcttcaagagattagtcaacggagggaaactaacggaaggggtgcggtgaatgaggataggagggaggtgttggtcattggtgttggctgccatggttgctttcactctattgttttttctttgggagcagagtctcagatgggctgagttgagattttttattattattaatattttcgaataaattattttttttaaggatgtctaaagaacttgtttgtttgtaatgattgggacatctttagatgattttatagactacaatataagtattaaaaatattatgtacattaaaaacagagaagaagattactttagaatttgagaatatcacaattaagaacatataaaatgtttgggtaagtaccataaatgaaatatgaatatttaaagggaaaccacaaaagttagtataccatgtaaattttcctatctaaatacttatgaacttcatttaaggtccgtttggtattcaagattagattggattagacagattaatttgtctaatctagtatttgggcatgttagaagtatcgataactaatctagctaacctcatttgtctgagattatttatcttaagggtgggataaataatctaatgcaagtgtagtttttttttttttttttttttttttttttttatcgttttttaattttaattttattaatatattttaaatttaatcagaatttcaaggaaataattatcacacatttatttatacattttttaaatcaaaaacttattcattaaaattagtgaaaatatataattttgaattattatacataagttttcaaaattttagaatattattaatt

SEQ ID NO: 295239 - DNA, 1842 bp, Cannabis indica
gttttgtaatttagtatcatcgccaatatccactcagggctctccaacacgtggttttccgatacccagtctagtctctctaatgtagtgagtattggtagtgttagtttcttgtgtgcctggggtgaccctagccataggggttgttactcctggtctcgttgatggaggaacttatggaggtagaggattggttggatcaagattcctcaccgtagggtttcttggattaccaagagtttgcacattaggatccgtaaccattggattggttgaatcagtagatttagactgtcttgtagtcacaaccatctcttaacgatttaaagagaatcaaatcgataaaataatgctcttttgctcttaatgaaaataccaaaatattagcctcccttttagccaacgatgctgagtcaattaaagagataagataataattaataattaatatatttaagcaataagaacactagaatttatagagactcggccctgtgattatggcaatatcttactcttttacttgtattactttggagaattatcaagatcacaaggagttggtcaagtgagtttcttaataattcttaagaaaagtttatagttatccagacaatgtaatggctctctaaaaaaattagaaatcggatccctaaataataaaatggctccactatttatagagaaagaaatacatcaaattagtttcccaaaacaataggaataaaagaggaaactaagttagtttcctgttatctctttacaatacgtcttaatctcacaaaaataatgatttgagggagatatttatgggaaatatcttaaaaattgtgcttaagctgcgtttaccctactcggagtacttggcttcactgtaaggctggaagctgcttggacggtagcaattatcctgtttggatgttctatgctggtctttagactttatcatttttggacatgaatcatcctaaatagtacattgagggaaatactgtccgtccaagtttcagaatgttctccacgtgtcactcataataacaccacgtcatcttgtggggaaatgaggataacattaattttttttcattacaatttatggtgtcgtataaaaataacaggaaaataacagacaacaatacaactaacaagaaaacaacaagaaaaaaataggtaaataatatgaaaacactacaatgtgaaatgatagtccatatttttgttaaaaaattataaaccgcaaaaatgtaggaaaaatctatagtacaccctcctaaaggggtgttttggtagacactcctatctatttcgacagttatctacgttataattatttaggaccattggtaaactcttaaaaaaaatttaataatgtacaatgtcgaaattcaagcaataattgcgcgtataagaaaaaaaaatcatgtgtgcaaaaaaatattcaaatcttagaacatctctaatggaggcactatctatttggcacattttttttacgaaatttattccaatggtagaaaatcctaaaagttgccaaaagtatacacatttcttttgattttttttatgacaagtgttttttttacaaaacaaaataataaataaaatgaaagaaatgttgacatggacgttgtttaataatggcaacacttacattgattttgcttttacttttattgaaatttggacaaagctcaatatgtgtcatgtgcattttattgagcaactttcatagagatgctcttattttcgacatataaaccattatggaggcgtttggttggggggaatgaaaatataggaataggaatgggaatgggaatagaaataggaatggaatggaat

SEQ ID NO: 295240 - DNA, 1065 bp, Cannabis indica
agggcacaaaacccaacattgaccttcgtgtttctttgtttatgttggcagagcctgtgcctcagagtgctgagactaagggtttggccaagaaagtggtccaatacaaggcttttaccgaagcccaactgaaagttgagggcttgatgaccacaccactgctctacgagcatggagttattgcaaactttcagagcatcaatagtgtcggcagcaagggccaaagttaggccctagaggaagttaaggaggtgattgctcgtgacttttccaaaatcctcacggaggctgttaaagaagaccagctcctaaaagctagcttgggagaggtatgctactataaacctagacgagggcgcatcgggagctagcacttccaaaagaggtaatagaccattccgcgtgtactacacccctagtctttatttcatattctagatggatcaagggggatttgatacacatttcaaaaatttggatcgcactaagtaccccatgagttaattcatatatagggtaaatgagattgttaggagacctagcaatccagagttatctccaaactctattagggtggatcctatagtaaccatgtccttcccattcttcagagaacacgacaactttgttggttgggaggacatgactcttttcgcttgtggagaaccttatagctgctcacttaatggttgcacccacatgcacacttttaggaatttactattgtatgctacttgtacttattgattttgttgttttgggttggttccctaacaatgtgcttgttgtgtttccaaatactaccgaagcaagaatgctgaaatcactgagtgatggagcccaattccatgtcataattgcaggcaacaataaattatttcctgaaggcgaactataactccttccaggaatgaatttgtaatgaccgctctagtttatgaattagtaaaggcaattagcactaatttttattattttattattatttgtgaattaaatttatttgtggaccccaatatttagaaataaatattagagttataatttctcaattctggagatttt

SEQ ID NO: 295241 - DNA, 2288 bp, Cannabis indica
tctgacatcaccgttttgattatctttatgttctatagagctctgtggtcctacattataatcactctgcactgaatcaatgctagttccagatttcggttggttactatcaagatcctgtcgatcaccatccatttggactcccttttcaccatgaaccttcaaatttaggtcatcataaacaatgctgacatttcgatcttcaacacccaaggtattttcttctatctcctgtactttgctaacttcagttgaattctccttgctggactcggtctcttgataacactcgagggaggcagcttccttgtccaatttttcacctgcagctacattcttcgaagttacactatcaaaattaccactttcagacttctcagtatcaatcactaaattagagctcttctcaacctcacccccagcaattttagattctatttctcctccaatactaatctcagaaatctctttcaccccatcttctttgttgaccacaaaagaatcacttccatgtaccttcacttcaaatggcacatcttcaagtacagtcttctccccatctatctcaccaaccaccacatccccctcgacaccatttgcaccaccaaaatcctgcaccttctctttggtagtaacacgtgtctccttatccacctcttctccaatctgatctgggatgccaatcgcctcttcaaagttctctacctcatctccaccattggaaatttcagtaacacccgtcaaacttgcatcactcaccgttaacacatttccttcttcaccatcaacaatctgatccccacaatcaacttttgccccaccctgctcatccaaacgctccggtaactctacagcctcctcaaaaacctcttccacctccatatcatccaatccatcagaccccgaaacagccttctcctctacccgctcctgaaaaaccccaacctctgcagtagtttcgtctagccagcgagattcagaaacaatctcagtcccattttccatccccaaatcccaaaaatctcactcctcaatccctgaacagccaaaagaaaaacccattcaaccaaaaaattgacacaaacaaagcattttcaacgtaattcaacacagaaaatccaattaaaaattaacaaaaaccgaaaaatcatattacaagaagagaaacgaaaaatgcaaacatcacaatcaaatatatacacaaataataatgagaaaacatctcttccagataaaaaaaaaaataagccaatattatcccgaaactctcagatccctgtccatggttttgtataagggttttggtaaaaactaacactaattaaataaaaatgaaagccataaacaatttctaataatagcagacagagaaaagggtcaccttgttcagactcctaaagagaaagattatgctaagtcctggagagagagagagataaaagatctcgcttttgggttgcttcatttatatacggaaatttacaattttatgtaattaattacattatatgtctataaaattttatttataatttattatatattttattaattaggaaaaacatgttcttaatttcatatgcaaactatataaaattaaaataaataataactatataaatgtatttaaattttaataaaatattatagcaacatatatatatatactagtaaaaagttacgtgcgaggcacgtatactaaattttatgctaggtattttttattatattaaaaggtaatacacttaaaaatgtttatctcatcttggttcaacccaattttatgttgttcccataggattgtgtgttagatatgagcttagaagaatagtattcgttagaatgggtgccagcaatggcggtgctgatgtgagttttatcttctgggaaaaatctagctactccgacattacaattacacctagcctttcaaaatgagcatcatcaaaaattcaaggattataaattgaaaaggatatcttgttacttttggtgtgcccaacaaactctctaacggatgacattatatttcgcatatcccaaagctgtttaaaagtaaagcaatatagcaagggaatagaagacttactcaaataaataattacttgagcaacaaaggataactcgctaatagaacactgaatattacacccaaataaacaaaaagtgaggaatcgcagcagagaggccatgaatcacggcatagaagatgaggcaataattcaatagcaatatagggtttgagggtttgagatttagaaaaagaaattataaatgattatcctaaa

SEQ ID NO: 295242 - DNA, 4064 bp, Cannabis indica
ccttcaacagacaccatcccagcccacccataaaacagttccttgtttatctgaaccttctaaagtagatgaagaagaagaacaaggaaacccagatgaagaagaagaagaagaaagtggaagccaagaaagttttgtttgtgaccacttttacggtggaacagcaccaccaatgccagaaccacagagtgcttttcagtgggatttcttcaatccttttgatggggtgagaacagaggaggtggcaagtgggtttggtgagaatttggatgaggatttgagtgcggtgagggagcaagaggggataccagatttggaggaggatggtgaaaaagtaactagtgttgggaaagttgtggatgtgaatgatggggttgtttgtactgatgaagctaggggtggtggtggtgggtgtcaggcattggccaaaggggaggattgtttagtgagccaggaagagcaaaagtgtttgagtgtgattgacacacccaatgatgggagagaattgttggaggcattgaaggatgttgtggaccttttcattagggcctatgattctggtttggatgtttctaggatgctagagaccaatatggttcaagttcaatctgccatagaggaaattaaaggtgggttctttctctttaatatccttgtttgtgtcttcatttttgaattattgacctgtgtgtgaatttcatttcgttactgcagttcatgtctctatattgtttgaatggttgaggtgttctgttataaattttgttaactaataaaatcaatacaatactccttttgccaaataatggagcctataattttgattgaaggcatgcttttgttagtgcaaaatctttagttttagttccattatggatccaacaattacttttggggtgcagagaactcgaataagctcattcggtctattactcgaagccgatcaacctcatccaccttatcttggtctccttcatgtaagagtttgcttacatctagctccaaaagctcttcaacatggacagatttcaagagtgaaatgtttgatgagtatggaggaatggaagctgggagtcactctcttacactaggaaggctttatgcttgggaaaagaaactttaccaggaagtgaaggtattaaaagaaaatacaatgaccccccatcagttttatggtctaatttttcaactttttaaaatgagacatatttgattattttctcttgtttttttcttaacttttttgttttataatctataagttcagtctgctgaagaaacaaggaaaatttacgagcaaaagtgctctctattaagaaatcaaaaggccaaaggagatggcaaccttagacatgatgacaaaactgcagctgaagttgattctttatattctaggatcttggttgcaataagtagagctgaatcaatatctgaaacaattcacaagctaagggatcaagagttacaaccacaactccttgaactgttaaaagggtaagaaagctaatgtagtaatctttacttgtaatttgacttttagtactgtgttatgtaaccttaatgttcccaacttttgcagcttaacgaggaactggaagacaatgcaggaaatgcatgacacccaaaaccgaatcatgtatgaagtgaaatcctttcactgtccatcctatggaaaattttgcaatgactcacatcgccttgccactcttcagctcgatgcagagcttcaaaattggcatacttgctttgcttcatatgtttcttcacagaaagcttatgttgaagcacttaatggttggttatccaagttcattacacctgaaattcaacactactcgaacagcaggcccttggtgtcagctagtgcaatcagtgcgccaccattacttttaatgtgtcatgactggttggtttaccttaataagcttccagataagggagtgagttatgccatgaaatgctttcgaaaagatgtccaggctttgttggttaaacaaggagaggagcagcaacgaaaaaggaaagttgacgggcttgcaaaagagcttgacagaaaggttctggcatttcaaaaggcagaaaaaagagtgcttgaatcgaagctttcgggacaggaggcagaaatgcatgttaggagtaggattgagtatttaaccgagaagaaggaacagttggatatgtttcaaaagagaatagacatggagaaggtgaagcatcaaactaacatgcacgagacacaaagaacagcagtgaatggatttcagactggattttcttcactttttgagtccttggctgagttctcacaggctgcagtaaaaatgtatgtcgagctagtgacattcagcgaaagttcaatgtcatacgaaaatggtagtaaagcttcaataaaagaataagcttaagcatttcatttttagtcaattgatagataaaacttgggaaagagttttgagttctgaattgtatagttgttttagttaagttattggatgtttggtgcttcctaatgcagtagaatataatatgctttgctcataagtgcctttgcagatgtaaaacataaaattattagatgtatacaaagaggtaaattgaaacataataatctcctctttcctttttcttgattttaaaataaatattgtttgttcaaattagcttatgataatgtctgaatttatataatatactcactgtacttgagaatcaagtatctttcttggcctgttcaattgacaaagtgccaccacaatcagacaaaacccttttcttctccacccacagaaaagaatccatggaaaaaatgactgacacaaactccactagatcagcaaacaactgtctttacttttgctcctcatatcatatataccttcaaaagtgttcttatcaatatctatactaatactattatcctccaaacacctcaagacagtgctctgaaaggagagactctccatctctacatgaaatctttggaatccaatctcatttatgctcacaaagctgctatgagagtactcataatccatggattttcttgaattccaagaaaaagaaagctgttttttcatggggttttcagccttgtaaagagctttttccagttcttgccaaacttgagtcattgtaggccgttgtttcggtacatgtgctacacatctcagaccaagtctccccatcattagcatcatcttcatgttgcaaggctctgagagtagattaacatctataatgtcctcaacttttccactttctaagctagaccttgcctgaaaaatatgatctttttgtttatttgttaaatttctaagctagatgatgatgattacatactggtgaaagtgttggattgattgcttacccaatctatgatatgataattagaatgcattttagttgattcaattgcaggacgggcagagataagctgcaaaaggataacaccaaagctaaagacatcactgaatgtagacaagtgaaagcttgaacaatatgcagggtcaaggtatcctggtgttcctttgactaggctgctaacatgtgattggtcatcagttggcccagatttcactagtccaaaatcagaaacctttgcttcaaaatcatcacctactaagatattgcttggctttatgtctctatggattatacttggcttagtcccttcatgcaaatgtgcaattcctgtcatgatttgatcaaacatttaccccattaattaattattatgtattttattcacatttccaagttgaaaaatcatctgtaacaaccaacacctactccactattaacactcaaatgttaggtgaattgtttgataacctacttttgagtaaagtactatagagcactaacagttgagtattacaaaataaaacatgttttaacatagatgtttcattttaatataattatatatatagggatatgatttatcacgtgattgtactttcacggaatgcattccgtgatgtacgacagccgtcagatgagggagttatttgatctgacggctgagattgatctagggttaattagggttaaaaagtagaaac

SEQ ID NO: 295243 - DNA, 4877 bp, Cannabis indica
taaactcttatgtgtttatttcattattttagaattcatattaggatgttaatcaaacatacttggtagtaaatctagatcctggtaaaatatttccaacagaatatactccataaaaactgatgaaggagagaggattcatgaaccagctcgattaattgaggccttttatcatattataagaaacttctaggtagcactatggagcagagaagagttgtattactagctattgttgattagggtccttttgttaccaaccaacaagctgatatgaacttaagaatgtcatttttgatattcctggccttaaagccccaagaccaaatggatacaatagcttctttttcaaggataatatggatattatgggaaatgacatctgtgatgctatcatctcgttccttctgtcatggtagattcttaaagaaatcaactcaatagtgttgacacttattacaaaaagaaagtgtcctaacattgtcattgattattaacccattgtgtaacatcctacttagaggaatgtcgcgtgtcatgattacaataaacaaatcccgttaatcagggtccataagccaagttatttaaaatcaataataaacttaatttaaatgaataacttgcaataatacatactttaatttaaaccaattttaaaaaattacatagctaggatctcgtaaaattattttcaaaatattacaagttatttcttacaggccgacctaagcatcaaaattagaatttctacacaattccctgttggacccaaccctcgtggtttagcttggctgacacacatacaatttatcttcaaaaccctcaaactcatggtaatctaacactgctttactatttcctggacaatagaacacatgtgagccaatgcccagcaagacagaataataatacaatatgaataattatatcaattacaattcatacattacacctcagcatatacaattgtgccaccacactgtttatcacttgaaggagtctttgaggacgaggggagcactttttaggaaagtcatatttgcaaaatgcaccaagtgttagtaatcgcataatcaaagacttgagattaagagtgttaggggcatcactaccagcagctgtttttgcttccgtctggcaaggcttttctcaatcttcactttttgcttctcaaaaggttctttacatgtgtgttcacattggagtctgatgtcttaaaaaattagacagtgctctcataacttagcaattgtacataagatcctgcaatcgcgatccttaatagataggctgctaagtacctctacaatttccaatctatctcttaggagcttcaatcgagctggcctccctacgagtataataaaaagattagaaatttcactaagtaaaaaatacaagaataaaaattatgcgttgtacttggacaacaaagtctatcctaatccctagccatgtgaatgcataaaaaaatttatttccaatcacccatattggaaactccaccttcaattccatttatctctaagttggcctattttttgaagcaatagaaacctttgttgttgccaacatttttaatgtcatagaaataactaaaatcctcgaaagtgggcgctccctgtgcgaactctttatacattgcgaagaattcgagtataatcctatagttatttggggctagttggaatagagagacatcgtaatgggtcaatatatctttgaagaaatggtggaaaggaactgggactccatagcaaattatgagaattaagataacatggacataatatttgatgatctcaagattagtaaaaggaaggtgtggtcattgcctagccacaagatttgtgcaaccagcttgaactagatttagtttctaaaaagaaattaagtttgatagcctcaccctcaattcgaggtccatccaggagaaaggcatgtcaaagggtgcgtcctcatcaaataccccaacctcttcatcgtcactcgcttcttcttttttgccagtgggcaagttgaagtcttgttcaacttcctcgatttcactgttcgggatagcccttggatggataaactttgggcagatacggtggactcgcttcctcatactttaaccaccactggttcttttaacttcctaaccatgcaagctatttcctctgtgaaaaatgatgtttgcggtcctgccctcttcagagtcgcattgtttgatagtgacgtgggtatgaagttgtcactcctttggggtttatttgcaaaagctcccccatcagatttgtacatctgactgtccgagcgatcactcatctgaaagatagaagatctttttagcatgttgtacatacaatttagaaaaaagaggagtgccctcacacgtatataattataattttaagttaaggaaaaataagttattctagaaaaattacgagtcttcgtacagtttttcatgttttaagtggaaacctatatgtatgtacgagtatttgaagtgtcctagctaaaaacatgcgattatttaaagttcatacaaagaagatgcgagcattcaagaaatagggaaaaaattctagaaaaagtagcttttttagtctttattgcctaggattctattacccagaaactatcctatcatttctacataatttttaccctaaaaaacccaaaaagcatgtgattattcagaaaaataaaaatgaaaataaccaaggggagtcaaaggaacttaccttaaatctaaatgcactgttttcttttagattttttaggcgtgatttcgagtagtgtagcagcaaaatcttttaaacaatcttcaagagattatcacgaatttgaattgaaaaatactctggttctttgagagaaagaagtttaagagaatttgagaatgagagagaaaataaaaatttcgcatttcatataaagagggtttttatagtcatctgttgtgatcatgacatatgttggtcagaaaccaaaggtcatttaatccaatggtcttctcaagtcgtgtctgcatataccccaaagggtttgatgacatggcatcttgggaagataaaagtcataattgcagtcgtcgtttcaaaaatcctcaataagacatccaaacatgatcactgcgatgtgacaacataactcgcctgtcactcgagatagtttcaccatttgacagacaactgtcatcgtgaaactaggaacatgtattatggcacgaattttttaccttataatacgagtatagtcttgtaaacaactgacatgtagatccagttctcgatggaaaaagatggcatgtcaataaatagctcctgtagagttaacctcacatgatatgaacttgcgagaaggtgtgatcgagacaatgatctagtcaaacactgtgcacaacatagtgtcgagaaataagcaggaccgagagaagctagtattgattgcacatatatcaattatacacgatgagcaagtatatctctcctgcgacatgtaaagactgtttctttacacgtgtttggtccgaaagactaatgtgttcgacgactcattaggaactcacaagctctaagttgtcaacacaggaatgttcaaatatgtgattaaggatgatcgcaaacattcacctaataggcctaaaggtccattatgcgagtaaaacacaacagagtctgcgagctcacgtgcttggaatatagatagtcaatatgcgacttaacaagtcgctcacgttcaggcaattaatcaaagaacgaacgaaattattcttacatttattctgttaatatttatcttaactaaagtgtgtaattattgtataaacggtcttgtctaatcggttatgtaaaatcaaaggacacttgctttttatataaaggagtgatccaaatcaaatagagtaagttaaaagaattatctaaagtagactaagcataccaagctctcactgaattactatacttctatgtctcatttactttttactgtctgttttgtctacttcgtaatctaatctttaagtattcgtcactttaggtgaatactcgcatatttgcaagtgtgtgttcttcttctatttgaatactcgctatttttagtgttgtttaaatttttctaagaacatgtacatattagcatctaaatcgatacaagtatatctcatcttgctcgtaaggatacaagtaagtattagcatcttcttgtttctcacataaggataccaagtacaaaaaaaaatattttagctagtttgtataagaagtgtctcgctagtatatttatatttacgcacgcatttaaagacacctgtgttcatcactttttcattcaagagtttgaattaagatccatctgcattaattagccggtcattagttataatgcgataataactatattcaacttctattaatatcaatttaatactaattaaacaaatggataattctattgaatacgtgaattaataattgagcattgttattaggcattagtggtgtctaacaccttctcaacatgtagcgttgtgattggctagcgatactccctaaaagctattatattaaactagttaacaacccgcgctttgcggcgatatttaaaaaaaaataaaattactgatttccatataattttttttgaataatatgaaaagttaggtgtacaaataggtcagcttgacatgtaattacaaaatcactttttttttataatggaagcctgatatggttcatatagcactcttccgtatatctcgatctttcaaaattgttctcatcattgtatatcagctgttgttattaccatatctcactaactcgctattattttgacttacaaaaaaattaaaaaagaggtgatagatttggagttattat

SEQ ID NO: 295244 - DNA, 3160 bp, Cannabis indica
agaaaaaaaattgactaaaaaactaattcgagtgctaaaatagataatgatgcatcaatgtatctattttaagagggtgcattgaagaattttccgataattatttttaaatatatataaatatttttagattgatattttatatgtgaatcaatatttaattggtaaagtgtagattttaaaattttcaatttaatccatttcacgaagggcgaatatttgcattgaattagatagcatgaattaaattaaattagatattttataaacatttttaatttaaatttttaaatgacttttttatgataaacaattaataaataagctaattttacatattttgtattaattgttaatttaaattaaatatgtattactatggtaatgataaaaaaaattgatacaaaatgttcttttagtaagtatacatgattgaaaaattcataaaaattaatattgaaaagttcataccaacccctatataactcatgatataaaaaccggttgatgaagctctgaaggtgaacatgcatggtgcgatttttgctgatactggaagatttagtttggctttcacgccgttcagcatgtagacaaggtgtaattcaactaattatagtgttaaagaagcatgagacgttggatcaaacagcagccatgcaagaagatggtgcttgttgctggttcaagctctccatatcaacgcttgtctgttggtggtgagccactgcgttcctattttttgggggtagttgagttttgtaagagtttgttaataatgactcttccttcatttggtttctttattttttgttgtacatcatgcaaatagggttgttaattgtttattgttgttatgaattttttccttattaaataaaataataataatgttaaaaaaaattatttatttttattaattagtataaatatactccaaaaaaaaattattatataatttacaattagaatacatactgttcttgttaaaaaaaaaaaatacatttgtttaaaaaaaacgaagagatatataagtacggttggttaagatttggaaaagacactttcaaaaaaaatggaaagataaaaccgatccgggaaatacaaaactacttctcaaaaaccatatttctctcgatcgaattgggtgtggtcttttgcattcaaaatgctgggctcttttatttctaggatactcctgtaagttattgattaatggcactgtaccgaaatttctctcattttatgcatttggtcattcaaatggtaatgattagagactttaattgcttttatgagcagaatgacatttggttacgtttatccggcttatgagtgctttaagattgtggaaaaatctaagccagagattgaacaacttctattatggtccaaatactggtattttaaacgtatttattaattaattaattaattaccttattaagtaaagtttttaaaaattgtttttgtaatatttgttctcaggattctggttgctatgataactgtattggagagaattggagatgtctttttttcttggtatggaaattttggttcttcttatgttaaatcgtattctgttttcttttctccttgaattattattgtcactatgttaatgattttgaattttcattgttaaggttaccattgtacagtgaaatgaagttggcattgtttatatatctatggtcttaccaaatgaaagtacgtaaatctatgtatgtatatatattattgttttcatataatttgtaattttgtaaatatttattgaaagttgggttgataaagtttcaataatacacaggggacaaaatatatatacagtaggtttctgcagccttttatgaggcgccatcaagaggaaattgatcagaatataaatgaattgagaagaaaggcagtaagttgttcaatttattattggaaaatggctttggaatttggtgagggtagattgttggagatcttacagagtgtttcttctcgtcataacgagcatcattgaagaagacattatcaaaaactatattaactgttgtatataactttaatttgtgtattggagtattttgatatattttactgttatttcaacaatgtcagataattggctcaaattaaaaaaacaaccaggtaggggaaacattttctttcattgttgagtgttattagacaaacaaagcttatacaaggctatttagcaaaacaaagttcttactctatgaaagacagagtatcaaaaacatatggagagattttattagtggggaaattagtatttatattttgtaatttgaaaattcatgtgtattggtatgcacaagacttgatatttttcatgttagaatagggcgtcgatatatgcataatccaagtaaagaagaagtcgtttcaatttctcaaagttaaaagtgcagtggattccattgtatatttatagtgctattgatattggtttcaagtttgaaggggctgcggttatttgttcttattatgaatatctaactagactcctctaagcttcatctactttcaccagttgtgtaaggatcacagtttggtaaacctttgctttgcagataacttaattatcttctgtaaaggtaaccaagacttagttaatatgattcacgaagccttcaaacttttaagttgctgcttctctgggttgattgtaaacaaatctaaatctcatgtctattttggaggagatcagggggtacaaagcaaatggaagaagataattttcctctcaagtacctcaaagttaatatgagaccaacaaagtggaaagagtctgagtgtgatcataattgtttgtaagaagttgtgaattgatagtgtttggagttgtagcttggtttgttgattaatgaattctttatttgataaaaaagaaatattgatagtaagcacctagtcaaacatattaattctaaatagggataattgcggcaaaagtccccaaaaacttgaggttgatgccgattagtcctcaaccccaaaaattggcggtgaaaatacctaaggtgccaatttttgtttgtccgttggtccctaacttaactgatccgttaaacacaaataaaatgccacgtgtcaattttttattggtccaaataataatttaattaaaaaaaattaaaat

SEQ ID NO: 295245 - DNA, 5353 bp, Cannabis indica
aaaagtaagttacatttattgaaagctattacatgatttacacagatcttagcttattgaaatagaaaaaacttctaaacggtatatttcgtctaaaagacattactaaagggcaatgattgttaagatagacaacactttgggagtggtcattcagaccttagtattaacacctttatcatcctttgattggtaaccgttcagaagtacaccacttaatagcgatatttgagcactatgcaattatgtggtcttcaaacccttgcatttattagtaatattttcttagatgttcgtcattccaatacagtgatactagaattagcttcatgttctcatcataccaacccaatttgtatgctcctgattttgtaattttagttacttggtatggcctttcccaattaggttcaatcacacctgctgcacttttttcagtgttaaggaacactcttctgagcaccatattccctacaaagaattttcttgcctttacatgtttatcgaagtaccaagctactttttgttgatgagcttgtaagtttgccaagtctctcctttattaaatttcatcaagtggctctgctaggaggacgtggttggtctcttgattgtacatcaatctcctataggacaaaggctctaattccacgggcaacattgcttcatagtcataagataccaaaaggagtttgcctggtggtcgtgcactcagtagttttgtatgaccaaagtacttcgggtaattcttcaggccaattttctttagcttcttcaagtcatttctttagagtgtcctttaatgtcttattgattacttcaacttgtccgtttgcttgggagtgtgtgattatcgagaagctctttataatcccatgtgccacgcagaagttagtaaacatcaggctattaaatttctttccattatctgaaataatttttgaggaagtttataccaacatataatgtttttaccacaaaatccaaaactttattggaggtgatagttgacagtggttcggtttccgttcactaggtaaaatagtcaatacctataactatgcattgcactccaccctttcctttaggtaactgtttgattaggtttattccctatatggcgaagggccatagaccctacatctatatacattcattgggtggtgcctgagggaccttagagaatctctgacacttgtcgcatttcttcacttaagctcttgaatcttctatcatggttggccaaaaatattcttgtaggaggattttcttagacaaacttttccctcagcatgattaccatagaacccttcatggaccttagtcaagagccgtacaacttcttcatttgtaacacatctgtacatcacactgtccactattaaacatcttgtagctttcctcatcatctttcatttctgtcgatttgaagttcaccagtgttaaggtaggatgttattggtgtcatccaacatttcaatttcttctatgcagatgatactgggttctttcatgaactgaattgggaccaagtttgctttatcagtgactgtgttgctcaccaaccatgcaagtgcattagtggtagcattctcttctctgggaattcttctgatggtatatcctttaaattgtgtgagaaagtcttgaattttacttagatacgccatcatcttttctccttgagccatatattctcccataatataatttatagccgataaggaatcactaaaaatctctaaatattcaacacttacctctcgtaaaaattttagttcggtgataagtgctttatattttgcttcattattggttgttatgaatccaaattagatttccccgtgcaaaggttgtcctcaggtgtgataagagcaatccctacactagacagttaatcagtggatgatccgtccacgtgtaacttccaaattagtctgatggaaatgtcttcttctgctggggaatctttttcttatgccctttttggctcgacattgttttctgaatattttatttccttgcccgtgcattcagctatgaagtctaccaaggcttgaccttttattgctgtgcggggctggaaggtaattttgtattatcctagctcagttgcccatttaagtagccggtaagaagcatctggattttgtaagacttggcgtaagggttggtcagtatacacccagatgagatgagcttggaagtacgaccttagtttccttgaggccatgagcaagcaataggttacttttttaatcagggggtatcaacttttagcatcaattaaccctttgctaacatagtagaccagatgttaggtgttattttcttctttgacaagtacaacaattattgcaaatttggttactgcaaggtagattcctagttcttctccgtttaggggtttggataaaataggcggctgtgcgagttgcttttttagctcctgcaatgctttttcacactcctcagtccattcaaatttcttacttccttggaggatgttaaagaaaggaacacatttatctgctaactttgacacgaacttgcttagtgcgactatccgactaatatgactctgaacttccttgacttttgttggtgacttcatatccagaagggcttgaatcttccttggattggcttccattcctcgagcattaataataaatctgagaaacttagccgagctgacctcaaaggaatactttaaaaggattgagtttcatgttaaattttttgaggattttaaatcattcgtctaggtcctctatatgccccttgcctttttggatttgacgagcatgtcttccccatatacttccatattatgtatgatttggtctttgaacatcctgactagcctttagtaggtagccccaataatctttagtccaaatgacataactttatagtagtacaagccaacatatgttcagaagctaatgtgttcctggttaggtggatgcattcttttttattataccccaaataggcgtccatgaagcttaggatctcatgacctactgtagtatccaccagctggtcgattcttaaaagtggataatagtccttcagacacgccttattaaggtcggtgaaatcaatgcacactcactatttgttgttcggcttgggaactagtacaagtttggctacccaagctgggtagaaggcatcaattatgaatttgtttgcacttagcatgtttacctctttttttaatgcttatgcatgctctttatctagtagtctccttttctattggacgggacaaaaattgggatcgatattgagggcgtgagaaatgaatgttcgatcaatcccaaccatgtcttcatgtaactgggaaaaaatgttaagattgctcttagaaattttatcaaagctgattttattttgagtaataaacctttgccgatttttagtgtcttggtgataggatcaatttcaacttcttccaaatctttgatcgacccaacatttgtacttggttccccaaggcagggatccatgtcttcgtccccaccttgggcggatccctatttggcaatacctttacctttctttgaactttggctgaatgtttcttctttttgggcttggtaagcaagattgataacattcccatgcagtcctttgaatgcttctcaaacaacctactccattcctcattggaaatttcacacataagtgatatataaaagtaacttccttcaagtcatatagggttggatgacctagcatgacattaaaagcataaggaccatcaattaccaagaattgggccatagcagtcatggttgtcagagcttttcctattgtgagtggtaaacgagtatatccaagtggagcaatgctctggccgaagaattcgtacactagctctgtacaaggaaataaatctcttagttaaaggcccatcttctcatatatagttttgaaaagaatagttgaagaggttccattgtcaatcatggtctgagccacagtcttattcataatttgtacatcaacaattaaaggatcattgtgcggataaataatgtggttggaatcttcttcactaaagaatatgacttgttcttccttacgcgactatttagactttttttcttccacgaccagtatttcatctttctgctcgtactgtagggtccgatcatacctctctctagctttgttcgagtctccagtaatatgagggcctccaataatcacttgtagatgcatgtccacaggtggggacatcaactggttctgattattatctgattgagcgaccctttaatcctggtcgaccttaatgtacttttgtaagtgcggattgtttttcctgatgaggaatttgatttcttattttagattattgcactcattagtatcatgactatagttttcatggaaatgatagtatttggtggtatccctcttgctcatatcctccttcaacagaggaggtcttttgtacgacaccacagattgggttgtcatagagatagtttctatctcttcagtaaggatagtaaaggcagtgaactttgaggctttctttgaggatgttgttattcagagttattgctaaaatttcctttgtttccatttccttgttggtagccattatttgaccttttactaccttgacccaagctgctattattatgatgcgagttttgagtctggacagatgtattggtagcagtggtgtgactttgatttgtttttttttaccaactgtgtctacttgccgatctgcttcttcaagcttaataaatctattttctcggtctagaaactctcccattgaccctacaataagtcttttgatgtctttccataccaaaaattcagttccttctaggatagcaaccagttttccctcttcggttaaccctttcacttttgtgccttcaatcataaacctactgatgtagtctcttaaaggctcccttggtatttatttaacttcgactaggtattctatgtgagttgagagttgcctagaagaggagaactgcacgtgaaactccaacatataagagttccatgaactgaattttcctaaagctaacttgaaataccactgttgggcggcctctgccaaggtagctggaaagattctataccgtacatcaccttttaccgcttgaaagtccatttacattttaaagtacttgatgtgggacaaaggatcttccttgcccatatacattttccatgtaggaatcttatgttgggaatattttgccaagatctagatttactaacaagtatgttgaattaacatcctaaatatgaattctctaaaacaatgaaataaacaataagggtttaaaaaaaccttacattg

SEQ ID NO: 295246 - DNA, 2250 bp, Cannabis indica
gaaagaggatgcactcatcaatattgagaagaagcttaaggaaagcaatgggcgcacaccaatttttggatggacaaaaacctctccaaaaaacaataaatctgtggcagttccccgtggtggtccgaaaagaagttattagtatgagggagaaaataaaagtgcttgaggtatgctaacatgtttaatgaaaactgcagcaatatatagctctgctatgaagctaagatggaataagtccagattggctatgactgatgattcttctacttgtttatgtcaattgcagtttatacaaataaaagtagtaatggtactttttttttggctattgcagggacaaataaaattaaaagaagcagccctggaaatctcatcttcttcgtttttggagaaggaaaaagatcttcaaaacaaaatcgacgagttggaaagccggatggaagaactcagtcataatagtgcatttcaaaaggttagttgcagcatgcttagctcagaaaatgaaacctcttaaggttgttttagatggtggtgtttatctgagcttttaccgtaaacatttactgactaaaatccattccgcagaggatccaaattatttgactaattatttattgcaattgtgatcgtgctaatgaaattttggtgttacaggtagttaaagatgccagtactttaacttcaagcgagaatgaaatgtcactgataaagaggtaaacttctgagtatcatgctcttttcttccaatttgaacaatgtttttcagtggagtctaatttttatcttcatatcagagatgaatttgtagcagaggaaggaaacaaaggccaaaatgttgatagccaaaatagcaataaagttgaggaattactaagtgaattggcatctttaaaggagagaaacacaataatgggaagtgaactaaaagaaatgcaagagagatactcagaaataagtctcaaatttgcagaggtagaaggtgaaagacaacagctagtaatgactgtacggaacttgaaaaatgccaataaaaagagctagctagtaataatagtaagtgagactctactggttcctgatatagttgcatttttatctacatcaaaaccgtacaccatgtatagttaaaaagtgattggttattatgctcacatgagaaaatcccagatgccaaattccttggattgaataaatttagtatgtatacagccaaaatatgtatatcttttttcttttcttttttaatatatatatatccaccccattgggtttcatacagaatacttaggctctttgtctcctccattgttttgtagtaaatgttattcagttctctctctcactctggtgctcgtttggcaatttttttcactttcaattgtaagagctttgtcattatatgtaaggtgttaattataagatgcattcttttatttttcacaaaagaaaatgacgattttatttttaattggcttcttagttcttatgctattcagtgatattcttcgtgcttatctacagaagtttcttcccatgtgcaatatatatttatatattatagccatataatgaatatctatgggtgtgtttgactataatcaataataaaataatttgcagtataaatacttaagtttaattctcaactgtaaattaatattaattttttttacggtaataatatttttataattttaaaatttttgtaggtatctgactgttaaatgttaagtaaatggtcacgtaacaatttttgattggtctaaattattaatttttatatttttttttaaaaagtagtttaaatataccagtaagaaaatgacacatggataataattaaacatttattagttaggtacctacaaagttttaaaaatataatttaagtattattatcgctaaaaattaaactaaggtatttatttacaatcaaaagttaaacttagttatttatgccgcaaattattctaaaaaacatatatgagtgggtaatgatgccaccgaataagttagtgcagaaataagatacttgccttgccattgtttgatgccgagcacgaaattattattttaaaaggctaattaggtttgttttttttttaatttgaatttcgcgatcaaaatatatttttttgaatgtttctgtttaattatttttttttaattattgagattgttagatttaaggattcttgtgttaagatattttttcaaaatagggtgaattggaaatttaaactaatt

SEQ ID NO: 295247 - DNA, 681 bp, Cannabis indica
tatatatatatatatatctaacattttttatggtgcaccagtagtgcttaacaccacaactaatacagacacgggatcaacactagagattatcactgtggaacctgtttgtagtgtgtagttgggcaccattggtggtgcatttccatatataaatatgtcttatgagatttagccctttataaagagttaaacaactgcagctttgatttgggttaaggtttggtgcacttaacttgaatagctgtaggtgtcaggtgtgcatacatattcatggattattttgtactataaaatagatcatttagcttaaaatccaatcagtttggttttccttttcactaattacttctttgtttttgtaccatatcagtttggctggtatagaagtcaggatgtacaaaaagtacacttaaaaactgctttgttatctcgatttccagcttcttgaaggcactctctcttaccaaacatctgatcatttttttttaacataatggttgttttcttattcaggaggtccattataatcagcatggtttgttacttttggaaggacagggcatttaccgcttaggcgatagctggtaagagtttaatcttaagatgctaagctaaattgctaaatttgaaaaaccgtgtttttgcaaatgtcagttgtatataagaaaatataaaaac

SEQ ID NO: 295248 - DNA, 3559 bp, Cannabis indica
aaaataaaaataaaaagataaccgtatgaaaagaaaaataaaatatgctaaagataaagcggtgagctaaattaaattaaaaactgtcttgtcccttaccaaaaaggctacaagataacgatggaatatcacctagcgaattaccatatttaaccccgatctcccaagaattttcagtaatattcatttctagttccagaggactgggggtgattttgtcaatgactttgtttttttttttttgactaagaatcgatttgatatgggattggcgggtttggtcaaccagcgtagaaagttgttctggaaacagctgtataaaaagtatattgatccaacggctgagaaagttgcttgatctggattaattaagaaccgctacactcattttcctttcacggttttgatgtgattattatggcttcttcttcttttttaatactaaatctaaacgtataaaatcaatctgtaacaacaaagatggtggtcgagaaaaaaattattttcttactttagttgacgggtgatttttaggtcagaatatctactttattaatttgaaaatcaaccaaattaaatgatacactaaatttgaatttataaatctaacatgatattttggttatttaagaaaatcaaatggaaatacgttttgctttatttgatgattccattgaaatttccagccttaacaaagtattaaaaatgtcgttatttattatctaattgaaattattgtcttaatagctttttttgtgatttttttttagaaaagtgaataatttttttttgggtaaaataattctttgggtaaaatttccagccttaacaaagtattaaaaatgtcgttatttattatctaattgaaattattgtcttaatagctttttttgtgatttttttttagaaaagtgaataatttttttgggtaaaataattttttttagaaaaaaataaataatttcaataaaaatgccaaaaatcaaagaaattaaatgattattaaaggatgataaattaaaataaattaagctagagatcaatcactagactcgagaatcatcaaaagagagtcaatttaactaaaaaatgtgctacagcattattaactcccttacaataaaaaatataaagactaaacaaacttatatcatactcattgcaaacttatatcttactagaaattgaattcactagatgcaaataatcagaaaacatattaatgcgagaataacccaaccgcctacatagaagaagaccttgtaacagggtcgaagcctttgccacatgcaattcaagcatttcaacagctggactagcaactcaacaaagcacatcaccattagaatgtaacacaatcgccccatgctaaattacctccttttcgagcaaatactagcatccataaacaaattaaactccaccaaatccaactgagaacccactcccattatatgagaagaaatagcatgttgagaactcacaagaatcgacatatcaaagtggtgttgggcatcttggaatttttcataggtagctatgagctcaactaataaccatatcatcagaaagcagcttattatcatgcacaaaagtattacaacgataccaaattttccaataaagaataagaaattcgttaacttttacggtacataaaatattcataaccccaatcaaaagctcataaaaattagacgtcattttcaaactatccaacccccttaacccccacccatactgaatagatttaaaggaaagacataatcacaaggcatggagagttgatttattgttctgtaaacagataggacacaccttagaagcgttcattccatatctagttagattagcataagtttgaataaaactcggactatctttccatacaaaatttatgtctttagaggaagagagagcttccaaagaaacttctaccattttgaagaccctaaagtggacaatttttgaccccgtccaagtcgagcaaccaagtttcgataacaactttttactgtaaactagccattgtcagaagaattgcaaattaatcatcatttctaattaaactgaaaacgaaatatacaaaacagatctgcatcatttaaaagatctcaaataagaggaatataccatcctcgtatcaagcataaaatcacacaccctatccacgccaactttgccactccctaagcgaataagtctgtcccacgtggtctttagagatccaagagttctcccttatgtgaattgattccctactccccaccaaccaacgacactcttcttttcaaagattgctccctcaaaagatacttttccaaaaaaagtgaagctcatttagtctccattacatcaataatggaactattagaaaaaatagtactctttcaaaactcgtgtcgctaaagaatcgacaaaaattatacaaacgagcaacttgtttaactaagagaaactatataaaaatatatcttgaaaactcataccaccatcagttttgtaccaacacagatgaccccaagtgtaccagtataatttacattaatcagtatcaccaccccaatcaaaattaagcacacgtgttatgaatttcatttacaatcccgatcgggagtcgagaaaggctcattgcatacacaaggatagcatgtataacatatttcaacaaaacctctttaccaccataagaaaaaagctttgatttccacccaaataacttattccaaattttgtctttgatggagtggaataaatcacttttactctgatccgcaaagaaatagagacccaaatatttatcatgacacagaattaagggaaccccaagaacacggactaatgactcataaagatcatcaggtatacggggagaaaaacacaccaaaaactattcacaagttgacctgaggtagatttatactactaaaaaatgagcttgaaacgggaacaactctcccattaactttaagaaaaagaagttatcatcaacgaataaagtatgagaaattgtagggctggcctcccacaagtcaaacttaaaatattatttcttattgatgattgactatagcccctcaaaacagataaaaaatgataaatgagataagggatccccttgcctaatccccctagacgacacaatgttaccaataacatccccactaacattatcgcataggtcacaattgtaacacactcatacgctactgcaaatatcagaattcgcgacgatcctaaaaatgattttttcgggacccgttaaaaaaattaagtaactatttaaaaccgtcaagaaaatttagtattcctgacggtttaaaatcgtaatacacataataggtgatgttttttttttcaataaaatacgattttttaggatagccttatatccgacagttttagatgacagttttaaactattgcctatactatacccgacgattttaaactgtcgggtataagggcccactaaaaattatcacctacttctcgccatatttcccacctgcccacctacttttttttttcttatttctcacatgcccacctatttctt

SEQ ID NO: 295249 - DNA, 4882 bp, Cannabis indica
ctaaaataaaatattattaatctatatatattatcatccaaatttctatacgtatacaaaaagacacttgttgtgttgtgtacatacatacgtatacatatttaattgtaacggaacaaacgtcataccttgaagtttgaacaaccttagccaagccaaaaatgaaccaaacaatatatatatatatgttgtaatgttgtttgtcttttaatccatagtacaaataataaataaactctttacattaacttatggcaaaaccttaaagctttggctttgccaattttgatctgctgctgctacttcaaacttgatttcacctgaagaaaaggttaaaatattatacagttctatgccattatttttagtcataatcatattattattacaaaacaacacaattaaataactttatcaaagaaccaaattgaatcacacattaataataataataataatagtgttattatagatgatttaaaaatgaaaaccccaaaccaaatgaattgaattgcaaactaaacagagaggcaaacattaaccataaaaataaattatacttgtttcaagcataaacagaattacagaactcgacgacgcccattgaaggatcacagtgaaaaagaatatatatcgatcgattgattgattgcacgagcacaacacaacacaacacgcacccgactactaggacgattagcaaatcattaaccatataatatttatgcctatgtattatgtgtgcgtgagtgcttaatgaatgattgtggtctcccaacttagatgagacgacgatttttttttcttagcctcggaccacactactcgggtgaaatactatcaacgacattctcgtttaacatgcaaaacacaatccgatccctctcatcaaacactaagtctactcccaacttaggcaatccttccgtagtcttttcttccacgagatgtcggtggaatgctcgagacaggatgattgaccctacgccctggtgttacgattacaattttaattaaagtgctaagagagaataaggtaagtgagatgaaaaaagataaggaagaatcaggaaataccccacgagacgccattgttaaatgtgccatgtgttgttccccctgctgctccaggattataactggaagaaggcggtaggaccttcgaatgattccagtcgttacctctacttgtattgatgggtctcccgtgagacccgtgattgaaccgctgatgttgctggcccaaacggcttggtgaagtttgtgaattattatgaggcatccaatgagaaggtttagatgccacacgtgaatatccagcatgtgtttcgtcaaatgattgaacatgcccgttgttttgtctgaaacaaatcacattataaaccaaaatcttgtcaaaagtattattcacagaaatccaagagcaaaaataactaacaaattccgtacatatacagaagcacacaacaagacccacctctggaaaggcatactcgagctagtacttgacggatggttaaatcttccatgaccaaccaacggttctacagaaccaagatccataccgttgctgaaatcagcagtgatgctggccaaatctgacccatcctcttggagaagaagttcttcactggagtgcaagttaaaataataataagtcaccaaccacaagctattataaaccaacatgccaactgtctaagtaccaatgaacctatgaatatatgtattatgcatgaccaatgattggctaatcttatatataatgcctcaagaatcatattaataagaagaagaaactgaggaattatcttactcactagtcagtcaactactctaagtttggttggaaagaatcaaaatataagaataggaatgagagtaagaataggaatgaaatggaatcaaaaaaatttaaaatgcacaaaaaaattattaaattttttctcattttgcattgaatggtctttccttcctttgcaaaatgaaacagtggttccaccaaaatgatgaaaaagtcattacattagaatgacattccaatattttaaaatgcaatcaaataaagtaataaaataaaaactgtttcatttcattggaatgacattccaatattctatgctgctttacaactacacatactatgcaaatcaattatttgttttcaattattacacagtttttggttccttctaatgccacaacagcatatactttaattgaaaattcaatataaattacgcgcatgtatttttgcatctaaagcatgtgtcagcttatccatagaatcataacaattaaatatagctaactaacctgtaattgggatcccagtcacctggatcaggcaatgtcaggctattatcgtgcttatcatgattaactcctgctgctgtttgtgaatattgcaaattggaaccgtggccaatgtagcttggcacgctctgagcagagtaaccggtagagataccactgcttcctccatgttgcttccaccttacagcattagaatttgaatgtagatgagatggtgaaccgccaggtaattgagaggtaccctcggattggctatagttggtgccatcattagattgcccttgccaatttgaagatgaactctcttgagagctcgcgggatatccccaactttttcttctgttatactggttgacagcagtcatctttcctaaaggcgatccatgacaacttccccttgctggagaagtcggaccataatgtccaggagagccagttggcacttgagcgtaagaggttggtggagtgaattgcgagggactggtgccgaggggaagtggagcaaagctcccagtcgatggacttacaccaagtgcattcccatgtgaatattgaacaattctccgtcttgcatcgggactacttccaagtactgacatatttcctggtgcatgcatgttcatgccagatggaccaacaggtgaacaatatgcaaacatattacttgaatctccataactcccgtagctgcttcctaaccccgtactatcgttgtagctaccgtagcttcccatactgccataactattagctgtgtacggtggtaccatttggaaatgtgggctaccgtgcacaggaactctgttcccacttgaaatctaaaaaaaaaaaagcagcagtatctcaaatggaggagactcaaatgataagaaagagggaaaaaagccaacctaatagaaaaagtggtttatattaaaatatggaacatttcaagaaggaagtttgctcacattaggagagagaccggcagcaaaccaatgccctccaccaggatgatggtcaactcggatattttgagaaacaggctaagagagaagccaaaagcaaagaacatcaagaaaaacaaaaatgtcagtattatttcagcaaaaataaccaagtcctgctttaattctatgtcaattaaaacaaagcatgaatgaacgaagtataacgtattgatgaaaaccgcatggctgcttacacagacagataacagaaaaagaaacctaaaatttgtctaacatattggtacttggtagatagttccccaagaggcctgacaaactcgacctaatcatgggtggaaccgttgaaagtatagttttatagaaggaaagtgctccaacagaaatattcaagagtttaacagcctgaacatatttaacaaaattccaactaaaagataaatattggtcaaataaattcaggcattgaaaaaaggggaatatgaggaaagattataatgaaacattcaacaaaaacactagcatggattaatcatgtcattcaattaaccaagaacagattttattatctaatttagaatgtcggtgtgaagaaccacttaccactcgtgggttctctggtggaggtatgaaccgagatgtgaaaggttctcctgttaaaaaagggtgttttgaagcctgcaggcacatgagttcacctctaacaattcatagcaatgaacttattttgtattctacccgatataaaggggcacatatgattaaagaataaagaaaaaacacgagatgctagttggaaaacctgaaatggtgaccaccgctttgcaggatcaaactccagaagtcccctcaacaaatcaatcaaggcaaaacgtgtttgactttctgcaagacattgtatatacagaactcattgtggacttctttagagaaaaaagcaaccaaagattaagcagactaaaagcagtctattctactttgaaaactgataacacggttttaaaagagaaatcagacctttaatgatctcctcctcattcaagttctttttatatgggtagctagtgataatttcctcaaggttcttaaaattgaaatactctttaccgagggctggcttttttgcttctctctgaaagaaatcatcaacagatgagttaaaaacaacaatgttaccatctcgccctcccatcctcacttgatggggacaaaacaaaacaagaaacgtattaaaaccaaacaaaacaaagaaattatatcaatattataacatactcctaacttttgaaagaaagcatcgttcagatagataacaaaaaacttcaaattgaactattttacttattttttatttaatctgtaataatacttggtccttacagcttcatattcttcttctgttaatgcttgatacacactcccattctctgtactgtggatgctcccaacacacttaaaaaacttgcttgtgtttttcgcctctttaagtatataatcagggggttgtcctctgcaaagcaaaaaagagtaagaaacatggaaaagaaaacttcatgagtatttttgggattattattcaagaaaggaaataattttcttttttttgggggggggggggg

SEQ ID NO: 295250 - DNA, 2371 bp, Cannabis indica
tccctattttaagtagtttaggaaaaaaattatcccctaatgcaagcatagaaattcaaatttccctttagattctatattttttaaaatagtataaaataataatctaagctcaattttcataaatataaaacataataataacttgactttgggttattatgaccaaattgattatatgtattgtattatttaatgttaaaaattaacttggcgatagttatattaataagaaaattgataaaaaattgagctcaatttaacaaaatagataattcaattagtatcttttacaaaatacagaattcaaatagtatttaccattataacttgtattcaaatgaaaccatataattaagtttcataataattattttattattttatcccttaaattccttgtatatttacaacacagtcgttgaacttagtctaaatatcccaccaacagaagtatttattatagttgtatcaaatttataatttggagttaattactaattaaaataaattaattcaatgaattttgctacaaaaattaattttagaaccactaattaaattttttcccctaatcgaaaggcatatttgctaatgtgtgttgttttgtctttaagctttaatatattctttgaatatatatgaagttagtttttaataacttctaaagaaagaatttcctaggtaagtaagactcaaagaaagtcaacatagaatcccaaccaaataagcttaaactataacttaatttcaatttgacctaacaattaagtaaaattatatatttatatattgagatgaacttatctcattatgtattatattgagtgaaaaaactatagaaatttctctatctcaatccccttgatgtactttttttggtggatttctcttgtgtacttatgttagttaattctagtatataagtctctttcaagctacaactaactttgaactaccacatatactttcaataatggttcttatactcaaatcctttaattctttccatttggttggtcacaattcattcttactaaaatggactcatactttgaaccataataaataaataaaataaaataatatattttatttattaatttcatttttcaactacttctattctatatactctctcttttctcttttgagagtttccaattaattattaaagtaaccctaaaagaatgttttgtagttgtacttttcctagttacacacatatatttatataagttgaaacacattggattgtgttgtgtttttcttttttctaatgtttaaaattatgcctcataaagtagtgagtggagaagattgaaatgggccgaaaatattaaaaaaaaataaagagagagtcaaatatggataatggatacacatcatatgcaaatgtctattgtctactatatgctcaacaatttcatttacaaaatttggttttatgtgtttcagatttggaataatatttggattatccatatctaataataataattactctttttacaattaaaaaggaacaatgatagtttgtctacaaattgacccaatttggttttttgttaataaataatttgattacatattttggtcgtgtattgtttaaattttttgtgtactacactacttttttatgaggtttagccgagcatgttttatgtttattgcactttatacaaaaacatctcaatcaatccaacagccaaagtgataagcaaagcccaaaaaaatgattaattgggttgggccaactgggattctgtctctggcccactatttactactgctcgaaattaaggcccattacgtaattgaaaaaggttatttataattttgtatattatctatcaccaaatcagagtggcgcagcggaagcgtggtgggcccataacccacaggtcccaggatcgaaacctggctctgatatataagagtagcttccattgccatcaattcttttatttttatttttatttttatttttatttttatttttattatataatgtccccctcttttcaagtcaaataataatattaaaaaacttataagagcattaaaaataagaaaaaaacttataagagattcttcacttaggatatgtttggcaagaaagaaaaaatgttagaagaatggggagttttaagagaagtgatggatggaatggattgttactttgtttggtgttaagaatgtatttaaaattaaatgtaaaattacaaaattgtttattatatatatatttttttattttaatggaaaagtatattgtaattttctataaaatgatttttcttattataaaatccttcttttttttttttttgtaagaaaagcgtacttatattagattagaaactgttag

SEQ ID NO: 295251 - DNA, 1407 bp, Cannabis indica
acgatttagtacatgtcaaggttaaggagaaaaattactaattaacctttaatttaatatataaatattgatatagaaaattgtctacgaattataaatttattatatcaatatgttgttagacatcttaatataaacatatatatatattggtatgcatggcgcgtaaattaaatattattcatttataaggacttgtattcttatgattatgagaattgtgaaaatgtattattagtgttttatttagttttttttttttttgtgtttatactgttattagtctagcagatactcataatacttaagaaaataatttttagagattaattatcgctaatcgatcaatcataaagttttatttataaaaggtaaaactttataaaaggtggtagacactaattaataatcaataacaatgtcatattattataaatcgattataaatattacatgcatgctaattcatgatgatcactttcccatgatattggtgcatttttgtagatatatataaataatatatacatgaccactttatttaacacacaactatataatatattgaatatcacgtatactttaaaattaatcataattattcaaaaaaaaaaaatcataattattcatggctaggctacatgcaatataattatgatacgtacttatatatgcgactgattaatcgacctatgatgagttaaattgagctttattattaattactatttatatatatagtacttaattttggttgtactacttgtaggaaccactgaaaaaagaagctggctctaccatgtgccctacctatatagcactccaaattatgaagaaaataaaaaaaaaaaaacactttaattaatgaaatatttttgcttaattatggcaataattaagtggctgtatagttataatttatatatatacctcttaaattgatgattcacatattcttcctcaaatttgttttttttttggggccatctctagttttaatgggtcgacctagaataaaatttcaaaaataagtttttatttgagaaataaaataataaaattcaaataagtttttaaattattcttataataaaaattatttgagcgagcattttttatctaaatgagaaataaaatgaagacgggttaattaatttttaattggtagggatattattgatatttcccataaattaattcggtgagattttaaagttgaatttcgtagttaaatagtttgtctttaaatatttttcatttttttttatgatactatttagtattttgaattataaatattttgtatacactaaaatttagggtaaataccattttggaccctgtgttttgcaaaagttacagattagaccctgtgttttgttaaatgacaaaatggaccttgtattt

SEQ ID NO: 295252 - DNA, 10867 bp, Cannabis indica
ttcatccaaatgctgagttgaatcaagcattagttttactaactcagtaaatgagtgattgaagtcggactctaattcattcttaaccttcattcttcctgtatttttcttagttattaagcagattggatggaaggttggctttgatttttaatttttatttctcttttcagtatgaattatataaatttaaattgttttatttgtgttttgattatatgatgtgaatcttagtggagagtttgtattagtatatgttagtatgtgaattgagttatgaattgttgatcatctgaagccaaaatatgtaatggagaagttcatatgcaccttcaatatgttatttctgaataaagtcttagtctttctctgagaaaaaagaaagaaaaaaaaaaagaaaacactatgatcatattcaacaaaacttcttttctcaattaggagttcttattctaatgtatgagcccttctgaagataatttgacacttctgttaaggtttttctgcatttcaaaagattttatttttattttattatatttgaaataacattaagaaactaccagaagtttagtttgaaggatttatttacactgaaatgttaagaaacatgtaatttagtacagcaagcccttctcgttctcatatagctttgtgtatatttgattaataacatgtttcattccttattttttcgattataatgatgtgtttgttctgaaaacttccaggtaaggacactgtaagaaatgcgctctcagttagcaatggcgtcgaagaatagaatccttaaaagagagttcaatgggcttaagaagaagcattcttcaccaaccatgtcgagtgttacctacgttgaacgaaacaacatcgttaattgattgctttcttaatttatttcaaagatgtcacaagggaaactgccactggcaaatccccaaaagttcaacttcttctacggtcaccgtaagccttcccagaaccgccccatagtccgaggtggcctcttttccaaccgtcaaaccatcagacctccaaaacctgaacccaaacaccaatcacagccgtctgatctctctaaatgggacccagatcactttccatcccaacagtcgaaaccaagcaatgttgcagccgcaacactctcctttttgtcccccattgctcggttcattgtcgatgcttttcgtaagaaccagtcccagtgggggccacctgttgtttttgagctcaggaagctccgaagggtcacccccgagcttgtggctgaggtccttaaggtacaaactgaaccagctttagcttcgaagttcttccattgggctggtaagcaaaaaggttacaagcataactatggttcttacaatgcgtttgcttattgcctgaatcgtactaaccggtaccggtctgctgaccaggtgcctgagttgatggaatctcagggtaggcctcctagtgagaagcagtttgagattctcattagaatgcactctgatgccaataggggtctcagagtgtattatgtgtacgagaagatgaagaagtttggtgttaaaccgagagtttttttgtataataggataatggatgctttaattaaaacgggttatttagatttggctttgtcagtttatgaggactttaaggatgatggtttggtggaagagagtgttactttcatgattttgataaagggtctttgcaagtccggtcgaattgaggaaatgtttgaggttctggagaagatgagggtgaaattgtgcactcccgatgtgtttgcgtacacggctatggtgcgagtattggcttccgaggggaatttagagggctctttgcaggtttggaaggaaatgaagagagacagagttgaacctgatgttatagcttatacaactatgatcaatggtttgtgtaaaggaggaagggttgagaagggttacgaattgtttaaggatatgaaggagaggggaattttgatcgatagagctatttatgggacattggttcaggcttttgtagtagacgggaaagttgggcaggcttgtgatttgttgaaggatttgatggattcagggtatagagcagacttgggtatttataactctcttattcaaggactgtgtaacgttaagcgagttgacaaggcacacaagctcttccgagtgactgttcaggaggatctagggccaaactttgagactgttaatcccattttggtgtcttatgcagagatgaaaaagatggatgagttttgtgagttgcttgtgcagatgaagaagttgggatcttccgtcatggatgatcttaccaaattcttttactttatcgtgggaaaggaggacggagtaaagatggcgatggaagtgttcgaggacttgaaaatcaggggttactatactgttgcaatctacaatattctgatggaggctttccacagaattgggatggcaacaaaggcactgtcacttttcgatgaaatgaaagatatgaatgttcagccagactcatcaacttatagtattgcaatcgagtgttttgtcgaagatgggaatgctaaagaggcttgtgcgtgctacaataagataatcgagatgtcttgtgttccatctgtttctgcatatcagtcacttgctagagagttatgcaagaccggtgagattgatgcagctatgctgctcgttcgcgactgcttggctagtgtgagaagtgggccgatggagttcaagtatgcacttactattatccacgcttgcaaagctagaaacgctgcagatgtcctatcggtgctgagtgaaatgatgcaagaaggatgtcctccggatgatgttgtatgctccgctgttatcttcggaatgtgtaagtatgacgctatagaggaggcaaggaaggtcttttcgaacttgagagagcgcaaagttttaagtgaagcgaggacgatcgtgtatgatgaaatactaatcgaacatatgaagaaaaaggcggcagacttggttgtatctggattgaagtttttcggtttagaatctaagctgaaacgaaagggttctaccctgctgtcgaattgaagatctgaactcggggaaacttactttcttgcctactaatcttacagaaaggggtcctcaagggagctgccgatgatgatgctattatgtgtcatgacgtcttagacaggttatttacttccacttaattctgatgctatataaatgttatttgagattatacttacatcttatctgtgagattgtttattgtttattgttgcccttaaatgtgttcatctgttactcccatcaatttcttatattaaaatgagccctttttttattgcctattatgtgatctattaagaattaagatattgtttttgacagaggacgatgttctaaattagtttttaaatgtttgttttagatgttgctagaacgggttgagatcgattgcaatacaataaatataaatcatgactgatctgttgttatttttttgacataaataatcaattttctttttcttctttcaaatttcaaatgtttctgtagtttagtatttagtactgtatgagcacttgtgaaggagagtttgaatctaattttgtgactttccttggtgctctttcagcttgttctctcatgctaggctggtagataagggtctcaagatctcaagatgaagcgttgatcttttggggtgagcaaggcgtttgaatcaagctcgggagtttgtaaaggcaatacctcagaagcccaactcagatgtgtgggttgctgctgtgctgaatttagtttgtaagatttcatacaactcttgctataattgtggcagtggacaatgattgctactctcctttgaagcagcagtagagttgtgtcggctcaaatgtacgactcgctgatgacaccagtactgcagcagaggaaaacagtagagataccaaagaagaagaaaaagaggtttggtcggagggttttcggttggtttacctgctgcttaaaactggtagaattttcaaagaattgttatgataaggagaaacaaacgagtgtgataagaatttaagagttaatttccttaattgagatttcatttcagtggaaataatatcaataataatggaatcgaatggtttaatctgtatcttcttcttctgattggtctcaaaactacacattaatttgttgcatgaattaatttataagtgtttgtctttgccatctctctttattttcttcttaatttaatttcatcattatttttccattaatgggaatcgtacgtactggagtgatcatatcaaaacatatgcttaaatttgagaatatcataatttatatttatcattagctcttgcaaaactttggatgtgtactgctacatatgttgcttgtaatcttcaatactcaacagaaagaataatttactgtgactatgactatgagatatgcaaaactggattgaagaatcaatgagcctcctcatcactaaatagaacactctgaattctgaccattacgaaaactcacaccgagattgttgttcagagtgacaaattctgctacagaaatctctaagcactgacactgtctctgataggattcaatatcctccacatctctcaagaagaacaacttgtgacatgttgcgaaatttcacaagtctacaccacccaccagaacttgtttctgaaaatatgcgtcggtgaacttggagaaaaatgtactttgagtgtactaaaatcctgtccccttttttaacacaaaggaccaaaaaaatctgtcttcttattgataaactcaagacattgtgagagtgtgatccctcctgaaacggttagcatctgtgcaagggtgcaggatatatgtctggtgtttgatatcgcaacttatcattatgtggcaatggtccctcctgaatcgcaatgatatgatttttgaaggtatgagagagacaatggtcaaagtaaattaggaaactaacaataatagaaagtacctgttcttccatgtttatctggaatggttgtacaaagtcttcaaacatcactggagaaagacccttcagtttctctttaacctcctatatatcaaaggtaagaagccaaggttaggtaaggtaaagtggttgtaaataatgtcatactattcgaaaaccataccataactttgataacttaccagtccagttacccttgatttctccaacagttccaaggttatcatgtccaatatgtccttatttttcctcagtccatccattgctaacttctctgtctcttcaatatactgcatgcaagcaatatcagatattgctaagctaaatacatttggtgtttaccattacatgagaaaataatgcaaaagcaataaataactagttacccttgtcaactctcgagtgaatagctcagacacttccggtgtcattgttgcaggaataacgtgaggatcgtcccactagcagaaagtacgataataaggaaagagttagacatggtaaatatacaaataatggaactgtttgaagaggaagagagtgcttactctgtatcttatcaactcgccatcgggattatctggacgatccaccattccaactttttttgtaagaccaaaaagtcccaacctccgattttgagggctgattaccatctcacgagcaatctgaagaaacaaattaatcaatcaaaaaattcactttgttagataataaaaacaaggaaattgcaaatacctttgttatcttctcaagatcatcccttcctccatcagttatatcatcgccaaatacaacccgttcagcacaacgaccaccgtgtgcaactaccatttgcattttcatgtagccgaatgtagtataaccttggtccaccatattttcccggggaaagaacacggaaattgcagtctcctgctcacatagagaagaaaccacttaaaaaaggcagctcggggaattcttaatatagtctccaccaagaattcctgttattaaaggcagacactgtaccttgccaccaggaaggagctgagaaaatgcatgccaatcaaactctggaaacaaatgagccaacactatgtgcccggcttcatgtacagccagcagccgtttcttctcaaacgatacctgttgcataattattattgaaacactattatcagctaaaagttttgatagacaagaactataaaaggagagccagccaacacaggcaaacatacactttctgcacttttctgctgctcttcttcggtgagaagtacacccatcccctcaagcaattgtttgtctaatacatcgacgacatcttcctggtatattttcgtacggccttttctcacctgcaacacaaaattatatgacaatgtaacataattaaccaagtaacttttcaagggtcaagcattctaacaaacaaaaagactttatcgacgatgtttttgacaggaagaccaagagctaactctcaagattttgggctatctcacaaattcttctgtggatagtgctctaacaaacaaggaagataataaagcgaaaatgcggtcaactagtctggaaaaactaaaatagtaattcccataaaaattaaatggaatctaagaggttaagcaatgtattgtctaataaatgtaattgctttactcaccgacataattgctgcttcattgacaagattcctaatatcagccccagaaaatccaactgtacggaatacaagctgacgagtccataaaagaaaggagatcagagaccatgactattaagaaaccaaaaaccaaaaaggaacatgaacaacttacttttccaaagtcaacatcttccgcaagtttctttcctgaactgtgaacattaaacatttgaatccgttgttttgaatcaggcaaccctatgtacaaacgacggtcaatccttcctggacgaacaaattcgaggtccaattcatctggtctatttgttgcacagatgaatatcactgcttgcctaagcgagaaccgatcaaccccagttttttccttgctgacataaatgagacaaaaagaacgaattataaatgaatgatttttcttttccttgcaaattaaaggacttcactgttatgcatttttatcgcctttagagttcaagggagtaaaaacacaaatagacaccattttctgctgaataattaaataaagttgcaccactatactcactccccatcaagttgtgcaatcaaagcctcaaaagttgcccttcttctcggatcctttcttgcatgtcgtccagcaattgcatcgatttcatccacaaacagaaaacaaggagcctgcaaagacataaggcataagaaagaatcatgaagagaggaagtgttaacggaatagggggttttctcattgaaaaatctcaaaactttttactgaatttaccaaaacttaaggttacagcatgctcctaagcttaccctccgagtgtactatatgggttcatgatctttgtttaaaagcataacagaaaacatgagagaagaatgctcacatttctccttgcaacagaaaacatctcattgattctcgcggcaccacttttttcactatctgtaaactcagcacccgaagcaaaaacgaacggcaatccactttccttagcaagcgtccttgcaaaaagtgtttttccagttccaggtggtccagagagaagaacaccctggtacaaaaaattaatcattttgtattttgaccgaagctgaacttgtctaaacatagcatcaaaataaataaataaaatacccgaacaaattgaacgcctctttcatagtattgcattgggtttcccatgtaaatcattagctcatcgagaagatcccaaacatcacctcctaatactacctccttgtacattgattttgtttcaccaacatctccaactggctgtactaaacaaaatgaaacttagaaatcgacatatacaaaagctcggggaaaatgactgagcagagaaggcttaccaggatgaaattttctgcataaaccatatcataaagttgattgtacttcttgtgaagaaaccgcttagaagtgatgagaagaagcattgcagattctcttaagagccaaagaattagaattccaggcagcaatgcaattacaactttcaaaaagtaatggatttggcgcttttgaagaagatctacttcaacacccgaacttgtgatagtctcgaacaggtatggatccaatggaatatcaacctaatgaaacataagtaaattttaagaattaacaaggcaaggaaatatgaaatttaaattttatacaatcaaaagattgacttaccacatattctagaggaaaaccttctttcattgtaacatacagccttttcatatcctcggtaaagacaacagcagcgacctgtacagcagaatcacagaatcagaacgtacaaagaaaactagcgagactacaccatcacaggcaggaatacagcaacttacctcagaactatcaagtttttcaagaaaataagtgtaagggagttggggacgataaagccaccatcttttagatatccacaaggccctagatccttctgtatctgttgtcctttccacaacatccttgcgaagactgttttcaacctctttcatgtcgaattcaactgcatacttggcattctgtgaatctatttgctcactttaatttttccttttgcatgatttccttccacttttgaagtctttcacgccaagttcctccatcttcttgaatttcacctgccgagcacagataaaatctaacatagatgaatgctacttggatttcgaaccatagatagtacatgtatgaaaaatgtactctactcatgtgaagcagtattccaataaactcacttaggaccctacattgactaatgattggttttaacaaaagagttcatataaaaacatacatcccctagattaagtttgaaaggagaaaataaactactacaagtccaaggcacaagtaccgaatagcatgtctctccttggcacagaaaaatcattacagaaaatatagatgatatgtaactcaaacttaaatcaaagagaaatgcagtgtgatgcatacggatcctaacaaacctgaaattcccagttcttgcgtaagctctttcttttcttgtgcatttaactttgcatcactttcaaggatttgttttacgctgtcctcgggctttgaatcatcatcccatgcatcttctccgacgtaagaaatatcacgaacaactgttccatcaggtttctcaataaacttcttcaatttgaggcctttcggcatgttcttcctccacatactcttcttcaacctgcaattctttcaaggaaaataagatgccataaaagagtacaggtagactgtggagaaaccagatactctaattctttaaaataactagaatgtcaatgtatgctgggaatcatcattgatacgaaaacaatgatcaaattactgactctttaacatttctaggagaaggctcaggaatcaatgcctccatataagcctctgttaactctcttttctggcgatcgatataaggagctcgaatcgcagagtataatccccgagacgacattacagcaacaaagagatacagaatcaatgcagcaattcttttagagtcccatgccttccaatcctaagaacaataattatgcttttggtcattgtttagctcatcatagactagcatacaaattaaataaatttacacaaagtaccacacatgatcatatttgttcaaactataaatgttggcaaagcaacatcttcaattgaaatatatattgatcaaatgacattattaacattcatttacatgtcacaagcaaataaaaaagacattttgggttttaacaatctccaagagagcaaacaaaagactcaattatgaatcctcacaatcaaaagagaaaccaaaacaaaacaaaagagtaatcttaatttcatcagattaccttccaatattgccacttgttccaattaacaaactccggcaaaacctgttccaactcactcccaccaaccttcactccatctctaactcggccagtaaactcagtgagcttcacattggcattatcaaaatcaaacccagtttccttcttgactgcctcaccaaaattggaccagaaccgagccgagccttgctgtagggagcgagagagagttgaccaagaaaacccatttgacccattggagtttgcttgggctagaacacgaaatcccagtttgtggcgggaaagtttgtgtctttggttcaatggtaggttgaaaagaattgggtttggtgggagtgaagaaaagagaagtgggttgggtttggaggagatagtgaggtccatttgatgagtgttggagctgaaaattgaagaagaagaagaagaagaagaagaagaagaaagagtgagggtttgttggaatcaatcagggttttgggttttggttttggggtttatccatagccattgttgtaatcaagtttgaaactttagtttgggtttgattgaactctttgttacaaatgaataacttgggtcgtcgtcgtcgtcaatttcatgttattcaacttcaccacccaaccgattgagttgtcactaaaattaacgataatttatctcacaaactataaatatttatttatttattttattttattttgtgagaacaaatttattttttttcttttcaaaaataaattggggtaaaaataaataaatacataaagaaatttttaggaaatctcttttcatttcaagataagtttttacttattgacatatatagtcttttttttttaatttcaattagggtaaatatcattttggaccctctgtttt

SEQ ID NO: 295253 - DNA, 2610 bp, Cannabis indica
caaattacaaaaactacaaataatatcatcaagttctcaagaattcaaaatctatagccttaaacaacatacctggtaattcgccattatcttctgcttatattctttatgcctgtgaacctgttaattgaacaaaaagttttataattcacaatcgctcaatcactcactttggagaaaaatctcgaatcaagcaacaaacaatgtagattaaacattaaactcatttaattcctttcattttctcactaaccaaacaaaattaaaaaaaaaatacaggggcgaattatttaaaaaagactaatccaaaaactcaatcgctcacttatgagaaaaatcttgaaccaacaaacaaaagctgaagcaaatttctcaagtccggcaatgtacattaatgattaaactacaaagcagattccacctcacgatcataaactcatttaattctaaccattttctcagtaaccaaacaaaaaaatcgctcacttaggagaataatatcttgaaccaacaaacaaaagctgaagcgaatttctcaagtcccgcattgtaattaaacaacaaacaagattccacctcacaatcataaactcatttaattcttttcattttctcagtaaccaaacagaaaaatcttgaactaacaaacaaaagctgagtcgaatttctcaagtccgataatgtacattaaacattaaacgatattccattttctcattaaccaaacagaactaaaaaccaaaaataaattattcaagagcaaacaagaaagaatgaacgaaagaaggaaggaaattctacatacacgaacacgttcgccattagacgagtagcgacgcaagatagtactcatatacccgagcttagattcacgagtgtcattgagcatggactgaggaagataccgctcgagcgagctgaagagcaagggactgaattccaggtggtgttgcaagtcttcgtaactgtccggcttgtgatccttactaggcttcactctcaacctgatggtttcgtgacctgaaacgacgccgtttccgttggcggtgaacggagcttgttcgtttccgattccggacatggctcgagaagaattcaaagctctttgagttttgattttctgtaagagaattagggtttgattgagaagctttggtatttggtttggtttagtaatagtggcactcaagatgtctagctggattttcttgtggggtccggtgatgacgtggaggattttgattgggtcgatttggatttcttacgtggtaggtttgattaagaaggttggttttttatttgtctttgaggaggggattcgaacttgagaggtgtgaaccgctaaactatgtttatgaccagaataagaagtttgtttagtaatagtgtaatgaagagcttggctggattttcttgtggggtccggtgatgatgtggaggatttcgattggtttgatttggaccgtttgctttcttacgtggtaggtttgattgagaaggttggtttattttttgtctttgaggaggggattcgaacttgagacgtatgaaccgctaaactatgcttatgaccagaataagaagtttggtttagtaatagtgtaatgaagagcctggcaggattttcttgtgggtttcggtgatgatgtggaggatttcgattggtttgatttggaccgttagctttcttacgtggtaggtttgattgagaaggttggtttattttttgtctttgaggaggggattcaaactttagacgtgtgaaccgttaaattatgcttatgactagaataagaagtttgctttagtagtagtggcagtgaagatgtctaggattttcttgtgggtccgatgatgatgtggaggattttgattggtttgaattggaccagttagctttcttacgtggcaggtttgattgagaagtttagtttagttacattatgtttggtgtgagagaaaagtaagaggatgaaaatgagggaaacgagagggatgagaggtcaaatcctcttgtttagcaagaaggataattggaagggagaagggtgttaattataactttttattacaatctcttagtcaacttttatatctgaaattacatgttggaatatttttaaaaaaattcttaatagtttacagtgtcaaaaatagcgtttctaatattccagtataccacaagtgctcaaaaaaattcaaatttattttcatcacggtaaactattaaaaaatttaatttataaagatgatgttgtaattatagcaaactccgtcgtgaaaaaaaatttcggcatgtgtttatggaggttgacagacaaagaaattataatagaaggttgacgataacacttggttgacgataacacttcttttaagaaaaaaaaaaaaaagaaagaaaaagtaagaagataataaatcaactcaaatgttcaattttgatgaatccttccattaaaaaaaattagtactcttcatttttattttgttcaaaattacaaaattactctctaaaaaaattaataaaaatgatatagtaattccattagggaaatttaattttctatacttagaaaatcaaaaaatttgattcctaaaccaataatttaa

SEQ ID NO: 295254 - DNA, 1950 bp, Cannabis indica
attttttggttttcatctattgctcgtatattggtatgagctttaacgtttacactaattatatgtgatcagttttttagctacacaacataatgattactatttaagtaactttgaaatgatatgcaatttgaaatcatgccccatctgtagtacataagttgttcatttggttgagtgtcgtggcaccttaggattacttgtattattctcagtattacgttaatttgcttttgcatttgtctgttatattactcagatagtcttgaaacagaaggcaaaagacatagtttctccatgtgaaatggcccaaacagtgatatcgtacttggaggcaaaagggtatctgcaggcctgagagtcaaacagcaagaaggcgccactacctggtttccaaagctattgcttccccagtataggaaattcctcgtttcctaccatatctggttccggtaattaatcgatcaattaatttgttttaatctttgtaagtcagtttgtgttgtggttagtggctccctattttatattagtaatacaccccaactatccaattgaattcatatatggcaaaaggagtttcatcccacttcattgccatataaaaaagttagggaacaatatttattctagcaaaaacaaataaaaggaaccagggggaaggaattggctttgttctattgtgaattatatcagttaataaatgaattctagtaaatgagtgaagttcttgctaaacatttgttgatatgagtaatgtaaatgcattgatttgattgatcagttctgccattttaataatgaaaaatagttagcagattgatgaaccttggttagtaatttctggctcggtttatttgaaaaaggacctgaactactgtgctttgggctatactgaaaattgaattatatattctgctagagatgttatatgagataacctcagaatgtactgcattctacacttgctaaagcaaacgaacaatgctaattctactgagccaaatacatagaaagttataactaagatcataccttagcttacactgaatgtaagtttctcaagtaaccaggataatagattcaattataaagaatggaacatcagatgaccttggcaaaaacccttctgcttgtctatatctttatgaataggcataaggcatagcagataagaaatccagtcctctgtgacgacgaagggagataaaacatagcatcagtgaagtggttatggacaccataactgagctcacaacatcgaaagtgatcgagaatcgtctctcctgaagaccccaaattgtccaaagaaacatttctaagcgatccatccacttcagaattccttgaactagcagaatgaaacacagaagaaggtggaaagatgattgaaaagaaagaccaaatacacactccaagattgcaaaaaccaatccttttccacttagaagtgagaagtgatctgtctaagcaaggaatgatgatggtaggggatccttgaactcttttatatgctttttaactacttttttttttttgaaataggaaagttgggttttgaagagagaacttattttacgttgcttccaagttgcttcttaatgtcatactttctaaaacaaagattttcctaaatccatgaacagccaaaaaaaaggggttgcttggaaggaaggtaataataattttggcttggaaccttgttaagttgtaactgatagaactgatattacataggaactcaaaattttatatttttaaaatttatatattgttatgttttgtagttttccactaagtgaccatagttgatggtgaagttggctaccaaaaattctaaaacagagatagagaactccccactcttatgtgacgtacaagatataatgattgtggttttggccctttgggaagcaaatggtagggactagataagatcttaggccttag

SEQ ID NO: 295255 - DNA, 5105 bp, Cannabis indica
agagagagagagagagagagagagagagagagagctagtataactagttagtactacgtaggtttgtttacatacgtaagactactaagtcttttactttctttttcctttctttctctcttattattagtttctcattttcttatatgagtttgttttttggagttgcagataacagtgtagaaaaactccacagagcatagatatggggagatttacgttacccattttgggttttctgcttctatgctgtctagtagcagaagcaacaacgaccccgaaatacaaagacccaacacagaaattgggtgtaagaatcagagaccttatgaacaaaatgacattggaagagaagattggccagatggttcaggtagagcgaactgtggcaaccccagatgtgatgcagaagtacttcattggtacgaaaaactctttaaaaatcagtcctttaaatcatgctaagatcaccctttttgtgtgtgtgtgtgactatttttcattaatggcttttgggttttctttttctttttctttagggagtgtattgagtggtggagggagtgtaccagctccaaaagcttcacctgaagcttgggttaatatggtgaatgagattcaaaaggcatctttgtcaactcgtcttgggattcctatgatttatggtattgatgctgttcatggccacaacaatgtttacaatgctactattttccctcataacgttggacttggagtgaccaggcaagtatatttacaaatccaaaaagttaattttggttccttttgatttcaaccaagtcatttcattttttttttggtctgtttatcttattgtggatgatttttggtgtgtattagagatcctaagcttattaagaagattggagaggcaactgcccttgaagtcagagcaacaggaattccttatgcctttgcaccatgtattgcggtaattgctcaacttaatgtcaaattcaatgttatactcattttgagaacattattttactaaaatatcttgtttttcaggtctgtagagatccgagatgggggcggtgctatgaaagctacagtgaggaccacagcattgttcaagcaatgactgagattattcctggtttgcaaggagatctccctgctaactctagaaagggtgttccttttgttggtggaaagtaagaacttttttctcttttactttttttcttttcataatctttgttggatgtcaatttatttaaaaaaaaaaatcaaactttacttagttacatcttgtctgtaaatgtgaatgtgtcaagttaaggtttgaagagtttttttttatacattcatctgcatcaaagtgaatgtgcttccacaatccacgcaatcttttgattttataattttgtttgcattttttcttgtcattatcaaagtggtcacttgaggtaatttacttgtgatagttatttttttttcaatgtcatctgcatagtttgaaaaccttgcttttggacattttgattcctgtggtgttagtggggggggacccatctaaatggtgttttccaattgtcccccatgttcaaacttctcaaatacgcaaaaattgttttgtactaatcaagatcagctggagcctgcttgtttcaaaaatctataataatctatttatctacttttttgtgtggttaaagggtatctatcattcatatgtggtaggcagtaagttttaaatgggggccaatttggtctttcaaaagtgtggcatgagcttcacttattgatctcccatgtgcaagcttcatcttcatgttttaatttaatatgaactcataaagtaatgtaattttacagttccaaatgtacttgatgacatgaattttttatcaaatgacctcaaaagctaataatgtttgctttttcttatgcatagaacaaaagttgcggcctgtgctaagcattatgtgggagatggtggaacaacaaagggcattaatgaaaacaacactgtgattagttcaaatggtttgtttagcattcacatgcctgcatactataattccatcattaagggtgtctcgactgttatggtttcgtactcaagttggaacgggaaaaagatgcacgccaatcgcgaacttgtcactggatttcttaagaaacaacttagattcagggtaacaaacagatactataaataatttgttttaaagctgttgattgaatggagattctataactaatcatgttttttcttttttggtgtatcagggatttgtcatatcagattggcagggtattgacagaattacttcacctccacattctaactattcatattcagttgaagcttcagttaatgctggagttgacatggttggtctaaattctaaattcaattatatgatttatatactttcactacttatgcatttgaaaatttttatacatcaatatggaaaattcttgttgacaaatgtattttatatgttattgttgcagattatggttccttacaactttaccgagtttattgatatcctaacatctcaagtgaaaagcaacattgtccccattagtagaattgatgatgcagtgagaaggatcttgagagttaaattcatcatgggcctctttgagaacccacttgctgatttcagtctgaccaaccagcttggaagcaaggtctgttgttttcgatttttcattttgtaaccagcagtatttttggcattctttaaacactctctcaccttattaattattaatctttatacaggaacatagagaattggcaagagaagctgtaagaaaatctctagtactactaaagaacggaaaatcggcttctcagcctttacttcccctacccaagaaggcaacaaagattctagttgcaggaactcatgcagacaacttgggcaatcaatgtggaggctggacaattgcatggcagggacttaatggaaacgatcttaccgtcggtatgtttacttttaggctttagtttcaatcttgagattacagtatattagaattaatctcacattgttaatgtgtgaaaataaattaccatatataagataaatgggatagaaactcctattgccaattggttttgagatggaacatcattcattttattttaaattctaacacagtaataaagataaaaagattaataagaatccaaactacagacagaaaatcttttattcttttattctttgaaaatgaagcattgatttatgtagtttgtatatcaaatcaaagtatgtgtgtgacaactattttttcaccaaacaggtaccacaatcctcaatgcagtgaagaacacagttgatcccaccactcaagttgtatacagtgaaacacctgaagcagactttgtcaaatcaaacaaattcgactatgctattgttgttgtgggcgagcctccgtatgcagaaacagctggtgacagcttgaacctgacaatagctgagcctggtccaagcacaatgaaaaatgtttgtggggcagttaaatgtgtcgttgttgttgtttctggtcgccctgttgtgatcgagccctatgttgctactgttgatgcgctcgttgcagcatggcttccgggaacagaaggccaaggtgttgctgatgttttgtttggtgattatggattcactgggaagcttgctaggacatggttcaaaactgtagaccaacttccaatgaatgttggtgacaagcactatgatcctctatttccctttggtttcggtttaactactaagggtaaatactagaaaatcaatcaaactccacatgggaaattctcccctcacttttccttgagcctgaaaagtatatatctttgtcatttattcttgtactaaatttgtcacaacaattttatgagttaaattatatttaagaatgcttggcattaagattttctttagtgtaatcttatatctcacaaggaaaacaatcgacgttttcttcaagtaatgaaacattcgatgtttacttgaagtaataataattgatctagttacttcaaaaatattaccatatttcgtaatcaaattaaagatagacgtttcatctcaaaaaaatataataaaaaatatagtcattataggttagatttttgtggttgttacacttgggaagcaattgtatttaaataaaggttataaggttataaaccaaaaattataagaaatgtatggtatcacattggaatgaaatggcgttggtttggtggaatgtacactattccatttgtccttctattttccatcttctctttgctgatgacagtcttttgttcaccactgtcactaattataattgtagagctattcaagatattctcttactttataataaggctacaggtcaatcggtcaatttctctaaatcttccattctcttttctcctaatattaatccttaccataaagaatttttttacaatactcttggcattgataatagaccttttgtttctaaatacttgggagtccctcagtgttttggtaggtctaagaaatcttctttccattacctccttcaaaatctagtgctaagcttaatgtttggaacaataaatttttctccaaaactggaaaagagatacttattaaagcgattatccaagcaattccttcttatgcaatgtcctgtttcagaattccagtttccatttgtcatgactttgataaacttgttgggttttatgccctaaataaaactctatttcaatgtcatccagattattcaatatcaataaagtaacagaagtatttttcattcatttgtgtatgttttggttcacttaatcaattgtttgtctatttgatttataaattcatccaaacccctttcacatacttgatcatgtttattgtgttgtcaacacagtggaaagtaaacatgactatgtgaataaagtattcctagatttatcagagcactgggttttactgatatgacaatctacaacagagtttacttgtcatttggagaaatgttatgttctttccagagcattggtaaagtaaagctcaggttggatgcaaggagtatgcattggaatggaccgatatgaactttgaaatagatttatg

SEQ ID NO: 295256 - DNA, 5447 bp, Cannabis indica
cgcgtgctgtaacagagaagtacgaactcgtgtaaggaaggaatcgacatacagtgagatcggggagagagagagagagagaagcaatggaggaagagctgaaagaggtgctgaaggagctcaattctctgaagcaatcgttcactgatccttctcaccgagcgccaattgacaaggtaatagttctcaatcaattcgaaatagctacactgcgggatctaatcgcgaaaactgataatctctttcaattgtgatagaatttggatcatttggtttctagcatgagtacttgaatgtgtcagaaatgatgaaattcagaatctttgaatgttaatcttaattgctaatcttatttcaagtaataatggcatataattcaatttcagtttcctttcaagtttagtagtttgtttgtatgtgataaaaaaagaatgagttacgaggttttgaagattttggttctacttcattgaatttacagttcaattgtttgtagatacaattgcatgtagaacgtattgcaaatcttggaaactctggagttcggcgttctaaagtaaaggtattttggacattgtaagtttgaatcatgacttgttgtgaggtaatcatacctattgtggtgacttttgtgtttgaattgtggtggcaggatatgagtgcggaggttgtggatagcaatccatacagtaggctcatggctcttcagagaatgggcattgtggagaactatgaaagaatacgggatttctctgttgccattgttgtctgtattcatctcctctttcaaagttctttacttttgttggaaatacaagtttgaaatttcctatacgtgaatgttttggcaatccaatttttttttaaaaaaaagaaaaaacttaatcttgtgataatgtatgcccataagagaaaaccttgaattacgtggatatcttttgtaatttgcgtttataaaaggaataaattggcaaaacggtctctttttgaaggtcattttgcactgccgtctgaatattttaaaacagaattttgtaataattgtgcctctaggagaaaacctcaaatgttaatcttgtcagtttatagctttttgagatatgttatgtgtattctgcataagcattcttgtattaatggtgttttaaagtaagtttattgtttggtcatttccatgggattgcagggagtaggtggtgtgggaagtgtggcggctgaaatgctaacaagatgtggtataggtcgccttttgttgtatgattatgacaaagtggagctggctaacatgaaccggctattttttcgtccagagcaggttatcattaatgttatttctcattatttatccttctggctttgaagttctcagacagattttgccttattaagacaatgttgaatttatacgctacaaagttatgagggcttgttctaagattcatactaaaagtcttctttcgtttggactgccagtgtcatactttcatcagtcaatcatccaaacactgtacgaactagcaactagttatggtttataactatattctgcaatatatatttttttctcatcatacaatgtatgaatattctttcggatgagcagcacttagccacagaatacttaacatgttttcctttttagttatttttatttttctttatgtgtatgctgtaacatgcatgttgtgttatgccttatcaggttaacatgacaaagacagatgctgctgtacagacacttgctgacataaatcctgatgttgtacttgaggtaagattttctcctcaattttttttcatgttctcattttctacaaacatttttaatatgtgatgggctagaatacctgagtgctaccatttcgctgatttgctttgtatcagaatttaagtgatgttcttaagaatttgagtgatgtctaattagaaaatcggctccctactggcataagaaatagaaactataggatgtgatatgtatttgctgatgtctttatattttttttgaatttgtacggttgtgaattttgtgacagcattgcatctaatagtcttgaatttcgacatttgttattttattattttagagaattaaaattcaatatagcttatacttgtcaagcttttctgagaaagaaagtttatttagtatgcagtctattttgctaattgtacaatttacttggtatctagagctatacgctgaacatcactacagtgcaaggttttgatacatttgtatcaagtttgaaaaataaatcttttcggccaaacaaagaaggtagtggagtggatcttgtacttagctgtgtggataactatgaagcgaggatggctgttaaccaggtaatggttgtaaacaactatctgataattgtgtcaaaagcttatatagaacctttcccttcagttattttgttactttgaataaaatttcaaatatgattattttatgttttgatacaggcttgcaacgaactgaaccagacatggatggaatctggtaagcaacataatcctatatttttgtatacttgtgatttatgacaattagaacacttaaaatcgctttgaacattatgctggacctgcttgtaccaaacattgtttcatagtttctaaacataatcttgttagatgtttgtgcccatgtttttggtcgcttatgaacatatttacacatttggcttttctatgtaccaccttagaattgaattcagttgcaaaaccgtaaaacttgtttcaggtgtatccgaagatgctgtgtcaggtcatattcagttgctgattccaggcgaaactgcctgttttgcatgtgcacctcctttggtatgccttccttatttatgtgattttggactaagttgatgaatgttcttaacatttttatggagatagtgatttgttctgatgtaaacaaaagtgacatgaatgtctttcatgtctcacattgcttatattggattgttaaagatagtttttgtttttgcttttataatatcataggttgtggcatctggagtagatgaacgtacgctaaagcgtgaaggggtttgtgctgcatctttacctaccacaatggtaagttgttcttttcaatcatatgttaatggctctacatacttcaattttaatataatttcacttgataatattaactgttgatttagaaaaactagatgagttttgattttgtgacttggttactctgttgtatacaatatagagtttaattgattgaatgaaactcaagtttctggcgactcattgtagcgggatagagcctagcatttttatatctgctaattctcttctattgtgcagggagttattgctgggcttctagtccaaaacacacttaaatttttgctgaactttgggcaggtctccccatacttggtaagtttttctttaactctcttttctagacacatcataaaatgtaactgtagatgtaactgcatgtttcaattatttcatgaatgaatcgtgttgttttcaccttgctgttgcttatcaaatgtggcagaacctacaagtaacttatgccttagatctttgtatctacttctgttgcaaatgtgaaggttccgtatttgatttcgacgttacatttcatgaacacagggatacaattctcttaaagacttcttcccaaccatggaaatgaagccaaatcctcaatgttcaaatggagcttgtatggaacggcaggtaatttaattggatcggatgtgttggtctagcaattttctctcattatgtccgcacgccgttcattaggttgtgtaatgattcttcaaacacttcttacttgcagaaagagtacttaattttaaagccagccagggatgctgcagctaaagcaaaaatggaagctgaaacatctttggttgttgaagccccacttcatcttgataatgaatggagtataaggtgctttccctgattattgattggttttgaacaagatgagttgatgcctgttttttttctttttaatagtaatatgctgtttggaaaagaaatgtttgcaaactgggatggttagttattaatagtattacattagtatatttgacataagtacatgaaatttttcgaattgcatggagttcttttgaaagtggtactggcttacattgtattaatgattcctgttccttccttaaactatgttttttcgggagtgttaaattttcattatccttctcttgaaatttcagtgttgtcgatgaaagtgagctggataaggtggacgccaaaacttcaggtaattcttctttctttccagaaacctcaagtaaaggaacttcgactgtaattcattttacagttgcttgctattgtattctctccatttatcaacaacgcaattggtaaatggcgtacaacattgcatagacctttttctaaatttgtgacaagtggtgtgtagttaaatttccactcgcttattaacgatacgtgctaaagctcaactggaggttgcaaatatgtatattcttattgaaatctctccaatggtgttacaaccgaaagaaagcacttaactggcgattttatttagctaccaactgattcaagagaagtatggataaaaaccatccttaaagagagtgaatgtagcttatgcataatatttttatttcttcatattggatttctcctgtcgttttaagtttaaaacaaggttttaggatcatgaattttcgaaatcgatataaataaacatgtttgcatcaaactcaggtttcttatgttgtcatttaatttcagatgctctaccagatggtcttattagggagcttccaagtgcagatgattaccaaacacagcccaatgaagcatcagcttcttctaatattgacgatttagaagatcttcgaaagcagcttgaagctctcaacggttaattatggttacaaaacccagacaaagcactcttgtcaaccccaattttcattaaaaagatacgcataaagtttaagccaagccaacattaatttttcttttttaatttatttactttcagtctacagaaaaactcatacaaaacaattgtgaaaagtagtcaaattttggaaacttttcatcaaagaaagaaagaattctgaagctccacatcagcaaaaaagcacatgaccctggttggtggtaactatctaaaagagtaatgatatgacactaaaattatgcaccaaaatattagagactcattttggtgtataactacctaaattaacgatcgaatcaaaatttctgaggaatagaaaacaggagtttgggttttcagattttaaaattgtgtttttaaaagtgagaatagaaaacagttttttgtcattttaaaaatttaatagtgtttgtcacaaatttttaaaaactatctttagatttttttttaggaaaaaaaaataacttttaacaccataccatgacattaa

SEQ ID NO: 295257 - DNA, 3193 bp, Cannabis indica
tccattgcagcaactttcatctttatcattatgatatttatgctcaatcttatcactaattggagtcccacaattcatgcaaagttcataaattgtgtcaatgcactcccatcaaagtttgtctcttaaggccatgagtgcagtgtttgatagtggcttgatgaagaggtctgcaacttgctgtgtagtgggaacaagtttggtgagaagtccaaaatggtaagatttagctagtaacatgtatttcttgtttgaaaattataatttagatacaaataatgttacagttgtttcttttgtaacttctcaaataatcaacaaagctgaaatgaaaaacaaaattactatctactaccagtaatctttgcatgaacattgcccccttgtaaagcaatgaaaaccagaagtgtccctaagaaaaatgtccctaccactaacaatagatacatatttgaaaaatgaatggcagtctccacatagaactatattcttaacaattcgaacaggttttcctggcttggtagtcaggattccataggttgctgcaagtttcgcactgtgatggaacaagaaattcttcttttgatgctcttctacttcatgaagaacacagcttgtgtcaggctcataaccagctttcaagcattctaagatcagtagttctagtgcactgtgtatatcttttgcttggggatgagatttatctcgagcgtaaaatgaatggatcttgttcttatgaacaatccagctctgtcctggctgctttttgaacccctttactctcatatcctccctaaccatttcagagcaatgccatctaccagatgcagaatacaaatttgaaacaagtatgaaggtagaagggtctttcggattcatggaaagtatctgtttagtgacccgtttttcgattctcctgttcaaatggattctgctactgtcaagcaaggctcgccaaactgatatatctggctcaaatggtagcttactaattacttcctctgcttcttccaatagaccccagtaacctaaaactccaataaaggaggcaatgtgatctgaggttgggtcaacatcataatgtgttttcaaagagtaaaacaaactacggcaactatcaactaagttggagttagtgtgtctataagctgaaatgactaaattaaaggtgatattgtctggctttattcttgtcttctccaactctgaccagacagctaaggccctgtcaccctgtctatgtagaagaagaccagcaatcagaccattccatgaaacaacatcgcgtctagccatggattcgaataccttgattgcatcctccatgttccagcacttggcatacatactaactgtggcatttcctacttctaattcagacataaggccagatttaagagcaaggcaatgtacttgctttcccatttcatcaaatcctaaccttccacaaagaccaatgaccgaagtcaaagcaacctcatctaaaaccattgttccttctgattgactgtaatggaaaagtgaaatggcttcctccagttgtccatttcgagcatatccacatatcagcgatgtcaagacaattgaactgtcccgatcaactggccacctattaaccatcttcctggcatctgacatcctatcacaccttgtacacatatcaagcaatgctgattcaatacaagcatttgacccacaaccagacttaacaacgaatccatgaatctgctcactaattctagaatccccaagcaacccacaagcataaacaacactagtcaacgtgaaatctgtcaactctaaactgttcttcactatactcatgaacaaattcaatgccatcaacccttcaccatttttacaaaatcctgtcaaaagagcattgtaagaaatagagttcctctccggcatcttcttgaatgtctccaaagctaaatccatcaacccaaattccatgtaggctgtgatcatttctgtccatgttatgatatctgtaactggcattttctcaaacaaaagtgtcacatctcttacacttccgcacttggtatagaacccaataagcgcattactaacacttaacatgtcttctaatccacacttgattgcacggcaatgaacttcttggccttgagccaaagcattactacccgcacaagcagtcaaaatggtagaaacagtgaaattatcaactccaaggctatcaattctttgcatctcacgaaacaactcaaatgctttatcatacatggactcattcactgcgctcgatatagtagtattccaagttgcgaggtctctgtggggcaatttatcaaacaggttgagtacaaaatccaaacagccacacttaccatacaaacccattaatgcatttgaaacaaaaacacaatccaagtagcccattttaaccgccaaagcatgaacttgaaatcccaattccaaattcaaaacccgaatacaagcagttaaaattgccacaaaaccatactcgttaggctcaatacctgaattcctcatccgaaagaagagcttcatcgcttcatcttcacgacccgactttgaaaacccagaaaccaaagcagtgtacgacactacatcggggcaagagaggcccataaagaccttgtaagcctcaggaacaagacccaatttaatataggccgaaatgagagcattacccagatgagtatcttcttcaaacttgagaaaggaggcatgaaccgccttggcgagctcaacatcaccggaacgaaccgaaagtcgaagcaaatcgaatagacctttaacatcataatcctccgagcgctgtggaggtggggaagaagaggataaagagcagccatacaaaatctctgaattaaaaagggtttgtcgtttaaggtcaaaagactcgtaacagagcaaggattgggtaggagagttggagtagaagacgtgattgtggtggtggtgttgacgaggtctgtgtttagcgggaaaaagtgggagacttgatataacagtagaggaaaaagaagaagaaaagggaagagatggcggaagaggaggaggaggagcaaccgtagccatatattccaaagccgcccataaatacaaagctaaacactgagctcaaaattctcagacagctccacagtttttcatgcttttcttattatttttacccgaaatttagtaaggaaggccatta

SEQ ID NO: 295258 - DNA, 7484 bp, Cannabis indica
atcatacctttacatacaatctaaataagaagaaaaaaaaaaaaaactaaactttacctaaaactaatctttacgtacctcggcacgtaactcttacctagtatataaaaaagagtgcaaaaaaaaaagtttccctcagtcctctaattagatacttgccatttaacgagcagtaaaatattaaaagttccaaaattttaataaaaatgtatttttcctgccaaaaatgagttaaactttgagtattttcgtgataaattgaaatcaacttgagaaatatatttacgaatcaattaaaaaaagaaaaagaaaaaaaaatccgaacttcgcaatatataattcaggaaccacgaacacttgagatgataaatgaatttaacatatatacaacattcataatctgtcgtataaaattcacaaagattatgataaaaaaaaaagcaacaccaaaattaattgtatattattcatttccaaaacgataaatatccataaatatatatatattcccgaaattcagataaccgagaacaaaataacagaatatttgaaaacaatgtatctgaaaaataaatcgccagatcacacagcctcgaaagcagaaaatatacaaacacaccccctacaatatactatatattattatttttaatgtgtcgtatttaagctctgaaaagtacgcgccattactcccttcgcctccgcccgccacgatctttcgcgcgtgccgatctcaccgcctctccttccaccacgtaacctctccaattttcccaggtccctacgatatttttttctggtcaaccaaacagtagagcttctctcaacgtgtcgttctcagacggacacgtaagcctacctcgccctcacgtgtcgaccgattagacgatggcctcctcagaaaggaaaaggtaggtttcaatttttattttttcggaatggctcgctgtgcttcggtagcctaaaatagaatgagcactattgttaaaccttttagcttcatttcattagacaagagagtgatggcttaagttaaccacacatgtaccccgagggtgaaaaagtaacttaactatggttaggttgaattatagtttcggtgttgtggtcacgtggcatgactttgctcctcctgtctacatcacgcttcagtttttagtacaattgcatgccagcaagattttacacgtggagaccttcttacggtctatgaattattcgcacgtggccccacatcaccgtacggtcctttctgtcactccccacgttatcctatatctatacgccacgtgtgaagactcctgatttattaactgttaattataattcgactgtttttgtatcgtgtaagaaagaaattatttttattactgtttaaattgaaacttcaattttaattaatttcatttatttattttgataaatatctatttatttatttatttaggctgtattaaatttataacatcattataaggttgaaacgtgtaagaagctcgaatgagagaagaaacgccctctttttagatattctatatgcgtcaacaaagtagacaactgggcccatacgtctcaatcgaaaaaccaatacgttgtagcatttgattggaccacaatgctagagaagggaataaagtttaaaattttatttttttttcccttgaatgattgtatttttattttcttcaataaattatggtactttaatttttttttatatttttgttttgaaaatcgtggctcagtctatgaggatgaggacacgtggtggagaagactaaaaaaatccatgaagatcaaaatttgaactggaaactaactcaaaggaccacatgcgtgtccataaaggaaatttactctgttggtaatctgtaaatatgattggtccacgcacagccgtgacccgaagcaggagatacacgtgtttgattgggttgaaatgaagaacttgatgaacggtggagatgtgttatttaggcagaagagcactcggtcacgcactatagcacatatctgtacaactgcccaagcctagaacgggtagctgcccgtagcaatcaaaatgccaaaaaagagagatactctccctctacctgcgtacaaaggtatccatggaacgagtccttaaaaacttttctcatgagcgcgcgagcgtttcctcagatcttttgtcacgtaaataatgactaaaaaaatttcataaaaattaaaattgaaatgagtgtttaatgaaattaaattttgatcattgttaaggggcaaaaggtttcgagaagttttttcattttactcggaaatttgtatttgtgctatataagaaaggagagaagagagaaatggcggagatttgttgtgggttagtgagtgaagaagaggtctcaacgccgggcgagtcgagttcccgcgcggcaaggagacgaagaatggagataagaaggtacaaattcgttactggtgtgggctctccgccatctgatacgcagtcggagagggaacaaaaacgctctaaagctaactcccgagactgtgagaacactgttttgagccacgttttggaacaagagaggtatgattcaggaaattcggataatagtgagaagatctcagtctcattgtcgagttcgtctccttctgcggtgacccccacaactatttcaagtaaacttcccaagtttgggttcgcgtctgtctgcggaagacgaagagaaatggaggatgctttggcaatctatccttcgtttttccgccggattaaggaaacgatgccggaattacattactttggcgtttacgacggccatggttgctctcatgtgcgatatattccctttcattttcatttctgtttttaatttttaaatttgtttggtttttagttagtgacttttctcttcttcaaaaattctttctcgtgatcaggtggcaacaaagtgccgagagcgactgcatgagctcgtgaaagaggagctcgaaagtaaggagaactcgacggagtggaaaagcacaatggaacgaagcttttttcgcatggacgacgaagtgattgcgtggaacggcagtgggtcgggatcgaattgcaggtgcgagttgcagacgcccgagtgcgacgcagtggggtcgacggcggttgtcgcagttatcaccactgacaagatcatcgtcgctaactgcggcgattccagagccgtactgtgtcgtaatggtacggctgttcctctctcttctgatcacaaggttcgcttctctcgatcacttttctctatgacccataacgtaatggaatttagttcagttcaaattttaatcgaattaggttcaataagccctttctcttttttccctctcttttagcgctttcatagatttttctttttaattctctgtgaacaaacggtaccgctcatgaatgatcacgagacattgagtattgtgtgcgcgtacattgtcttaccgtgaaccttttaacactcaccgttggattcttcagatcataagaaaaataaccgttggaatccgttacaatcagctgatcattccagctcagcggctttccttgtttatttatttattttctttgcattattatttaatctaaaagacttttattttttatttttgggtgccacagccggatcgtccagacgagctcagtcggatccaggcagcgggtggtcgggtcatctactgggatggcccacgggttctcggagtcctagccatgtcaagagccataggtaaaacagaaaatggataataaatttaaatttcttaagcattcacggctcacgttagcattaattcttgtcttatgatattattgatataacaggagacaactacctaaaaccatacgtgagtagcgagccggaggtgacgatcacggatcggacggcggacgacgactgtctgattttggcaagcgatgggctctgggacgtggtgtcgaacgagacggcttgcggcgttgtccgtatgtgcctacgtggcaagggtgcagtttcggcatcttgctcgtcttcggtatcaccggaaagtaaagtaccggcagccgacacggcggttgccgataaagcgtgtgcggatgcgtcaatgttgctgactaagttagccctggctaggcacagtactgacaacgtgagcgtgattgtagttgatctccgaagggacacgtaacccacattgatgtgatttgttattttatggttttttttttgtttgatttttgccgggttttcgctcgtttgtatcaggctcgtatggttttttttttaaaagaaaaaaaattaaaactaaaaaaagaaagaggggctattaatactgacagagcccagccttgattcgctggtttttaatttttcgaaagaaattgtttcaagcctgtcaagtatatcagaaaagaaaaatgtaatgtagtagctacttaattgtagtatatatttaatcaaagtatagcagcaactagcaagtagtagtatcttctgactttaggcttttaagtttcaccttaattttatgtttttcggcaagaacttaagaaaacatagtttgattcacaggctaatccctcctcaaagtcaccttaaaacttgtgtggcttttttgcttttattatcaatcctttttaaactaggagtttatgtttcttttctttgaaactggattcatttaattacaaaacaagtacaaaggattaggtaagtgaagttgtagagcatgacttacacaaaagtttgattggttgaataatgagttacttgattagcttcacgatacacaattgaaatttcaggaatattatcatacaataataacacaattgaaatttcaggaacattatcatacaaataatagtctttgaatgttctttagcatgccatcaactttcctccttgttttggattaattgcatagcttcaaggtaatttgattcgatgctaaaatattaaaatcgttgttgaatccatacttgcagacccaaccccacttgcagaccctcttgaattgctcgtaactctatctgaagaggcggtagttcttgctgcagcgctgtaacagaagcataggacacccttcccgcacccttcccgcactattcctcaccacacatcccaaactagaacaaccaccccccctcctcgccatacgcacttgagtattttcctgatctttatagtttgcataatatttagtgcaccactccacaatattcccaagtctaggcatgcatcacccccacccccacccccaatctccacacacctgtttaacaagtccacacaacttccaatttccaaactgcttttattgtgtttatattcctggagtgcatgaaaatttgtctcttgaccaccttggaaccatcttagacagtgagaataaagttccctcttggcaagagcaaaatttgttagaagccaatgtgagctaacttccaaataaaatgctttaccttcggaggaattctcatctttcataatttctttcaccacactgtaacttggtcattcgattgttcttctcatatcctcaactcacaagccattttatatccgctcttgactgaatactccctattttcactatagtgccacatgatcttgtcttcaatctcccaattagagctcagtaacctcagtattagcccaacatcttcatcattaaagatatccttcacaaactccctgtcccactgcccactttgatgtttagatcaataacatacaactctggtggaatgataggcttgtcataaattttgaactaacaggtttcgggatccatggatcctctagaaccctcacattatttccatttcctatcctccaccaatatccatttagaattatcttttttttttttcacacaccaaaaacctccacacaaatgaagcatgcgaaccacacttagcctcaagcacctctccgttaagaaaataacttgccctcaacgcttgactacacaaagcaaacaaatatcttatacacctcccttttgtttagggagcaaagtttggttaaaaaatttaagattcagaaccccaacccctattctctttcagtttgcacaactctggcaacttacaccaatgtattttactcttttttctgcgatgatccccatcaaaaccttgcagccaacctatgaaggttattgattgtatttttaggaatctgagaacaaatcattgtgtaagttgggatgtcttgtatgatggctttgataagtaattcttttcctgtcattgagaacatagatcgcttccaactatgcagcttgtttcgcaccgtattcttaatgacatcaaaaagttgctttttattccttccgctaaaggacgaaaatcttaatatttcccatgattgtcaactacccttacatcaaacaatccagccaacctttttttatccatttccctaacatatctcccaaaacaaacttcagacttattaaagttcactatctgccctgatgttgtagaatatatctctaataccctcttgaaaacttggcattcgtccatattttcgtcaaaaaataccaggatatcatctgcgaagaataaatgtgagactgatagacccatccttcaaaaatggagaccatcgagtctatcattattttcctccttttgaatcaagttagaaaaggcttttgcacagaaaaggaacgaaaaattgtgataaagagtctccttgatgaagtcctctttgtggtgttacttctccttgaacttccccattaatcataatcttttcaacccaactcttatgatagcccaatttcaacatcataccataaagggacctctactcgactctatcaaaaactttatccatgtccaactttaaagctaattttcttccattttgaaaccttcaatttctcatgcaatgcaatctctcatatcccacaataacattatcatgtataagtctccccttaacaagcgcactttggttctcgaaaatcactaccaccaatgtttttctcattcaattagctaagcacttagaaataattttacaaataacattacataggctaattgacctaaaatcctgtacccgtgcaggcttctctgctttggaaattaaagcaatgatggtgtcatttaagcattttagattagctccatgattttgagaaagaaggcgaaccaggaacacatttgaaagaagcatgctccaaaacttatggtagaatagagcaggtaatccatcttcatcaggagcttttgaggggtttatctccttcaccgcctttactacatcttcctccgaaaattcttcaaacaatttagcgttcatcttccttgtaaacattaattgtacaacatccaacacctcttgcatctcagtattattaattttcgtggcagtaaaagagatgaaaaataatcttgaacaatatttgttgtggtaatttgcacacgcaagtatacgtatcgttaacaagtaatagactcacaaagagtaaggtcgatc

SEQ ID NO: 295259 - DNA, 3554 bp, Cannabis indica
aaaataatttccaacagtttttaatattatatccattttgtggatgattttagatatacatggtattacccttttaatttcaaatcaaatgcacttgatttttttttacaatttaaagtccctgttgaaaacaaatttgacagcaaaattaaatgcttaaggtctaattggggtggtgaattttgttcctttaatgagcttgtccataaacatggtattgatttcaaccatccttgtttgcacaccttagtgaaaaatggctgagctaagcgaaaacatcaatacatttttgaaatgggacttccaattctagtcgaggcaagctttctgctcaaagattagtgtgacgcttttcacacaacagtatatctcataaatcgactgcctacagttatgttgacacataaatctccttatcaaattgttgattcttgcaaactggattgtattttctttaaaatctttgttgtcacatgtttttcttgtctcacatcatatcaagctcacaaatttcagttccattcaataaaaagtgtgaaattgggttatgttgatgatcataaagggtactgatgcttaagtccaacaaggcgcatatataactctccaaatatagttttcaatgagttagaattccctttcactattgatttttaaataatcatcaatatgaatcttctcccattatacataacacctcatggtccactcctcttacttaatcttttacttccaatgctcccattatttccacttctactgcaacatcaccaacactccctagagtagctactttatccttgtcatcacaccatcatggaaatactaatggttcattgtcaccatctggtacgattttagtttcattagaggtaaaatctcctcacagtgagctaattaatttcaatttcaatcttgatcaatactcgcttttctaattttatgttgaaatcatagatcatgcataagatggccattcaaacacacctaataagaactatttactgagttttttggaaactgactatatttagagcttacaaaagaaacaaagtaacataattaatacaaactttttacatgatttagaaattaactatcctttatctacaagtccattttattagccacattggcaggtgatgaatcttacaagtggatacacaatggactagaaatctctattcctctcgttcctcttgaagaagaagaagcttaataggaatttttttagagttttagtaagtagaatgaaatgtttttaccttccaagagttaccgctatcttatggaatgcaagggtatttataggccattttcctttcacgtgcttgttgggcaaatcttgctaggtaaaatcaaaccattgatttggtaggtgggcaattcatcacatggaatttaagagtgtcagttcgtactgtcccaacaacttacacatgtcacctcaaagtcttccctttttgaattgcccatatcaatggctattggatcactcaagaaggtacaactgggcatgcatgctctatactactgcataaagtggaggacaaaaccttgcatcatacatgaaaaaggatggctatcatgtctgcagtctgacatatacggccagagtttccccgtgacactgaacaggtttacaactcatcttgacttcgtctgtgacctgtattgtcctacttgaggaagccttcatccttcgcaaggcattcagctttagtccctgagactatgagagattactgatcgtggacattccttgcatcctttcatttcatgggagtatccttttgcgaaatcccttttttagagctcaggtagtctctcgcaggagctactgtcaaaagcattaccagctaactataatcaatgctttcttagtcagggtccacgtgtcaagcttgtaaaaatccaaacaacatttaccccacgcttctgggacggcacacggtgtgggagcttgcagtatttcttcactttctcatgattggcttctgacatgtggagtatcttcaagaatttcattatatcatgcaagtggtcgtcagctgatgttttactgttaggggatattattttctttgtacacttgcagtactttaaacgtagactcttgcaattcgcacacgtcttaggctcatgtctggggagacaccaaaatggcggtgaatcgattgagtagacccttcatttaataagaactttgcacgatacatgttgtgatggatgttaaacgtttagagacgatgcatcttctcagctccccgtttgtcaaatctttagatactattttggtgaatgatctgaatcttatacttctcgtggaaggcacccctcttggattcattaaatactcacaacattcatcaccttttaagtttcaaatttttttttcatccttcacgctggagttctatcaatttgtctcatcttttcgtttgctttgcaagactcgatcaactaaccatcctcagttgtgcacgccaccggaccaacgtagtagagccatccctcgtaatactcttgttcatcaactagtaagtgtaatcagccactttttacttgacgcaaaaatattgaggttgaatggtgtatactatatacgagtcactattctgagaatgtttgtcccatttatgcggtcttttgaaaaaaataaggaaactggatgccttgtcctatactgacgtgcttaaccccacactaacttatgcaggcacttcttggtctaccatgaggagggctagctattcaaaatttatgggagacatcaatcttttcaggaaaagaaaaaggtaggaaactactcctagtaccggggaccactccccgcttacaagacccacaactcaggctaggccagccccgcccatgctatctatctattctcccaaaaattccctctatggggtttgcgttccccacaaaaactatccctcttgatgcccacgccatgcagagggagaaggagataaaaaaggcttggaggaatgcttggaagtagagaagggattgttacacaggcaaggtaatgtgcttttggtcgtgaagatggctgaaatctcagaagcccttcacgccctaaccccaactaggccaatggtcaaagtggaggccctagagaaatgtctagcacctaaggtggggagtgaagctttaccttttgcacttgaactccagcactgggtagctggtaatgcctctgagttgcccttggagacttgggcaacctgaaaaactgaagatgcttttgccttaggccatggtgctaagagactggcgattggggtaaggttcttaacctcttcattctaaattttttcattgtatgtagctttcttattttttttctcaatgcaacaggtggctatgctggcaaaaagagtttatggagaggtcggtatgctggtcacggagcttgagtacgccaaggttgaaaactgcaacctacataatgccaatgagacccttcttgctgaactcgcagagaggccaagaggctgtttggcaaaaaattttaaaaactgtttttacaaaattgagttttaaaa

SEQ ID NO: 295260 - DNA, 7293 bp, Cannabis indica
tctctcttatttctctctctaaatcttcctagagagaatggcccagcagatccaaaatctttcgtctaatcgaactttctcatggattttctgaaattctcgccttgatgtctcagctcattttgggttgatattcccagattcttgattcctgatatctggggtctcttccttcttctctgttctcgagctttttattagttctcaactcaaactccactgatatcctttgtgggttcttcaaaatattatttgtctaatttaagaggtaagtctctaatttttattttatttttaatgttttactgatgattgaaacttgaaggccattattactgtgatattttgcttgattttgttttttctttctcattttttttaaaaataaatatatatttttccgttttatagtatgttctaataattcgattatttggtacaggatttcctttttcttatttttggaacattgttgattgagcttgatttaagttttgtggatttattaaaatgtaaaaattatttctttcttaaaatctttcctcggtctctggttttagatagattgagtttttaaatattattatcacatttttggtacttatatttctccatcttgtgacacttcaattcaagattataatttcttttaagattgttctctcttaatatatttaattttgggaagtattttcttttatcttttatttatttgatcataaaatactgtatggggttcctcattctttttagcacaattgtcattgctgtctttctttctagttttttaaaatatatattatatattctttattgttttactcaaacatatggttgtttaataatgtatgtcttatttttagtaaagttaatcttatacactgaagtttcttcaaatcattattcaagctatgtttaataatactgtacttgtacttgttcatatgctcacaggcaattgtacaacattccataactacccttttatttttcctttcattggtttgtggttacctaatgtacattgcatttgataatgcccttaccccttttgtctggcctgttgactggttattgtgtaaataaatttgtctataaatatattgctcacactattcactactactatgttggaacaggtagaaatgggggcaaacatgcagtataatagctatttctcaggatatcactccgcaaggaatcttaacttggatgccaacgctagtacatggcccttagattttaatgacaaagtttcagagagtggaaattactataacggctatttgtctcccaactatcttttaacatacaacaaagaactgttaaagcagacaatgctcaagcatgaaacaatttttaaagatcaggtaaatctctatgctttttgctgcgaaggaataggatactgcttgttctgttttgctgacatttatacagtattttgttgtttaaagactttgatttgtttgtgacaattggtttccagtattataaattattcacagaaccaataaaacatagaaagatgtctatttggtcctgccaatattgactgggttttgggatatttgttccactacatgatatatgtaataacacaatacatgtccaagcattgaatgtagagttgcattaatttgttattgcatgggacccgtgatgcagatttctgagtaccaataacaggaattgtacatttacttatgcttggtacacttgttttgacaatccagattcaggagctccatcgcctttacagaagacaaatggaattgatgagtgaaattagaaggaatgaattgcacaagtcttattcaaggtttgaggcatcacattcagatactgtattctttcaaacatcatctgaacagttcccaaagacttttcaagtccccaaatttggcccaataaaccctgcagacagtccaatgtctatttctggttctgaaaagctctcacctttgatttcagtacaagggaaaaacattcaactatgttctccttactctactaaatctgaagtgtgctcaaaagattttctattatcagaatctaacgacaagaaattcgggaagaaatcgttggatcttcaactgactgctgttgagtactttaatggtgaagacaaggtcctcttagatgataaaatggtttctgatatgcctgagaaatccagtcagtctgtgaagacatctccacaagtagtgtacaccagtgatgtaaaaatcattttttggaagtgatgtattgaactctctttttcacgcgactaacaaaatccctgcttcaatattagagaaacaggaagcatccattaaatattcattggaggaatcttttcaaaatacccaaaaattgccagatcttggtccatcaaattttgtattggcggaaactgaaagaaaagaggggcagttatcctgtcatgacaagtctgctgatttttttttccaaggttccattcaaacaaaagtttctcctttttttctttcttttgatttacattatattaattatggttgtaagctaaatatgttgtctttaaataatctgctaagttcttatttcatgaccctatcctttttcagagaaatccagaagcagcttgaatccttttcatcgaggtctaaatgatgataaattgtcctctttgtctggtctcttgcaaaaggaccgcgagctagttcaggaaaattcatcttttcatcagggaaaccatacttcatttgttgaaagaggaatttatgatttggagtgctcgagaaagaatgatgctccctcagttgacaaatatagtggaccacatggtactttttctgagaacattttcagggaccatggtggtcctcaggtcaatattacaaattcccagtcatcaattcttgctttgaaaaactttggtgactctacacggaatccagttgcagttcaggcactgccttgttttaacacctctgcaccattggataaaaggcgtagattagcaataggaagactggagctcgatggagacagcaagttggtgtctaatcatgacctatcagagcataaaggttcatttaacttgaattccagaccacaaaacttttcttcagagtttgtggtttcgaaaggtattcagccagcacagggagtgagaaaatgtgaatattcagtcagtgggtttgattggcttgggaaagacaatagtggacgtggaaattcagcgcaggtggaggggatggaaaaatgtgaatattctgctagtgagtttgcttggcttgggaaagacggtagtgggcatggaaattcagctcaggtggagtctctttctttaaaagcttgttctgttggtaagcatgttgaacctaagaatgttgaagcacttgactccttgagtaaactgatctctggatctcatgactctaacaaatcttacatttctgatcgtcactgctcttctagcaacaacccctcaataacctgtcaaagcctggttaaagatgtgaggcccaaaggaaaagtatttgacttgaacttggcttgtgattctgtttctgagccagagaatgaattagatgaacatgcagtagaggatggggttggcatgaaacctgcagtttttggttgcctctttgacctgaactcatctataaatgacttagatgctcaagagctggctcatacagcagaaattgattttgatgctcctccaagtccagaaaacaaggagtgttctccacccagaggagaatcagatgaaaaccaagttgagacacccttgattttgtctggtccggatgaacctgatctgccagatgaactcacgagaattgcagcggatgcaatagtttccatttcatcatcaaggtcccagagttctgcccaaataaccagttgcaagcagcttgaaacaatttcacatgactccctactttggtttgctggcatagcttccacagtattaacagattcagcaaatgagtttgaatcacttttgaaaactacaatagatgacaactctgaggagcttctacctgatggaatggactattttgaggccatgacactgaagctgacagagacagaaatggaggacttctgttgtaaaagtaatggctcaaaggaggaagaaactggcacctcttcatctcctactcagcaaaggaagggtcggacaaggcgtggaaagcagcgaaaagacttccaaagggagattctcccaagccttgcatctttgtcgaggtatgaggtcacagaggatcttcagattataggaggtctgatggaagctgctggcacacattgggaaacagggtcaatgagatatgccactagaaacgggtactcgagggggaggaagcggggttccattcctagttcctccaatgcaggagtgggttgctcagttgagccactgttgaaacaactgaatagtagcaacaacaagctggtcaacgaagagagaagtgtagtatgttggggaaaggtgactaggaggcgccggggacagagatgtccggttagagttagtaatccacaccttatactaagtcaagtttagtaaaattgatgcataaagagaccatttttcttcttcttttgttttattctgaattattggaatctcttgtaaatgttttctaagacttggacatacatatatgaggtgtttgaataggaaaagaagccatgacatacgtaagctatttcaggtgtagatagtttcaatgttgtgatatgcttaatttaagctataaaatgcaacttttaactattatgggtttactatataattttttgtagtgatgttaacacttttaaagcaagctatagagcactggcattagcttctttaaaataacatattttttggaaaagaaaagagaattactcaaatataccataaatcaagtagtgtattttacttctctacaagaagtattatttattattttaagtttattttattaatatttttttgttttatacatatgaataaattaacattatatgttgaatcttagcagttcagttggcatatagaaagtatcttaccacagtatgagaggaatatattgagaattaaatttatgttgttttggtacaaattaaattaaaaaaattgaagtttttcgtttttaagtttatagttataggaggttgtttttttggccttctatgagcataggtacgactttggtcgagaatgtcttttattagtgcgatttaatttttgttattatgattagtcttgtctttgtgacatagttttgagtgttttagttttgtttgtgtgacatgattctattttgctttatttcattgttagttctttgtttttcgataactcatcatcaaatagttgttagtggttagaaataacaagttctctgcgactgaaggggttgttaaaatagtgcaattacgtaccttacacaataagtgagtgcttaagttacgaggttgaatgaatctactgcaacaatctcttattgttgtgtcttttgagcggtaaatgaaactgaatatacatgttcttaaagttaactataatgttgtaatcttttttatttgattttattttagttcttttgtcaaacgatctgagaattaggcagctgattattagactcattcttttaattctaatcctggtcgtgtctccaacaggggagatgtcctgattggattacaggtaattattttagttgattgttattaataaaattgtatgaattattgaaaaaataaatattgaatctgaattaataaatatttttaaaatataatactttaatgatgtagagaaaaaataaaaaatttgatgtatggtacatgtaaaagtttgagataaaataagaaaggtggaaatttagtaatgtattttagatgatataataaagaagttgatatatagtataatgtcagtgctagcacgcacaacaaataataagataaaataactaaccatcaaaagaggcaaaataactaagcatcaaataagctagtattacttaagaattaaaaataattacttaaaaataattgcataaatatactcttttaaattaatatcaaatttttttcattaaatacatgcacgcataccaaaatgaatggttctttttcttgttttaagtgacaggttttcttttttaaaaaagcatagaaattttttttcttacttaacttttgtgagtatgcacaaatattttttaagaaaaaaactttcaacacgcaaattaaacttttattattatttttttaatttatgtattactttgacaattctctttcatatttttcttcctccccttcgccttggtggaaaaaattttggcacctaaaaattcccaccaaggtgaaacactttgctttccgtgttaccaattcaaccctccccactgccaaaaatctagcttctaggaaaatcattcagtctccgatttgtgaccgttgtggaaacctggaagaatctgtgtcacacgctctgttctactgtaagagcattcgaagagtctggaaaggtacgcactttttcagtatatttgttcttgctcttctgaaattatttttcacgatgttgctcatatgatatatatctctttaaccaaagaagatgtagaactttttctttgtattgcttggctcatatggtataacaggaacaaagctcttaaaggacaagcacatgatcaggcccatgccattgtaaacttagcaaaaaaatttctggatgactacaacatttcaatgtcggctccatcttctcttgcttgttccagccaacctccagctcccacatcttggtctcctcctgatcctggccttctcaagctaaatgtggatgcagcaatccccaaggggagaggaaaagttggttttggcggtgttattagaaacagtgaaggtctcgtagtagcagccctggctctcccttacatcagaggagaacagtagccacttttgaagcaaaatcccttctccatgcgttgcgttggtgcatagatgagcatttccttgtccatgaggtagaaacagactgcaaggctattacagatgcgctgaatcatcccaaagaagatatctcggtgttcggagaccttataagtcaaattaaggaagctttgtctcacctccctgctgcccgtatatctcatgttaatcgatcagctaacacttttgcagacaagctggcacactgggcttcggggttagatgaagttgcaatttggataggcgatgacccctgcaaccttagtgattttctttctctctagtgggctccctttctctcaaaaaaaaaaa

SEQ ID NO: 295261 - DNA, 3476 bp, Cannabis indica
tacatatcaaaattaataagttaaaattaattaccagaaaagtgagattattgactaaatacaatatgtttttttgagctatatctataaatcatcacgtatatcaatgcctgcgtaacatttgtttgtctaaactacccaaattagaattaagtacaataatataagaaacagtgatattgaaaccggcctaaagttgtatggagtgagcccaagttttacattcttttcgagttttcctgtgggaatgtttgttttgtaagtcgtcaatttcacttggtatgaaaaatgtaagttgataaacaattctacctaccactgatagtatgaaaacaagttcacacaagaaagaactctgcagtaactaatcatagattcatacactaacttcagaaaaacaaaaagttcaattattcataactcaaaaaattaaagacactcttttcctgtggaagcaacagaaagcaaaatgtccctactacagtttaatagccacctttttcttcaactgcatataatactaatgcgagtgtgaagattatggcagttaactggcaaaataattgtcctcgtacaagaccagcttttatttagattacatcaactcaccacttctataatgcagttaactggtaaaacaatagtcctctgtagcttttatttagatttgttattgttctgaaagccaacattcagatgcagcttggtttaagtaagaaaacccttgctctttaaactctctacagaatccttgataatttgctccattggtatgaactgtaatcccatgtcaatcagcttctttgctgcattgtttgccctcaacagcccaggttgagtatcccttgggagactacaaaataaggaagataaaatagcttcattaagaaacttctgaacattaaaccatttacaacacattcagcaatatgaagttccaccaagatgacacaattcaacaccaattcaagtgtcacggtaacaggtttagattttcaaagccagcatacaagagcaaatagtactgctgcttttaacatgcgtaattagaaatttgttcctggggtaggacactatagtcatacatgaaacgcagtgtcctgactcctaaatattgtttctattatagctttgcaaattcatttgtcaggtctttaaaacttgttacctgggcaacttaaactctgggtaaagttcagcaacctttgccgctaaatcaccataatgtgatagggcttctaaacacaagtgccttccacttgctgacttgttctcatacaccaaaatatgagccaaagctacatctttaaaatgtacagacccaataaagaagtccaaataagtttcagtgcaacctgcaaagaagcaaatatcattattattatttacaaccttttcaaaaggaacttcaaatatatgtgtatatcaatacagccttactctttctggtggaagtagaaccttataaaacatagaaaatttacaactgaaatatgatgaattgaaaatccggggttgcctccttgttaacttgtaagtggcatgagtcatgaatcatgaccatgctattggacaggcaacatacgaaaaatacagatatattaccgtgattaaatctttcaccaaaccttattgatgttacttgttaattcttcatatgtggtatattggtactagttctttccttcttttccaattgtgtatcaatgtaactaaatacgcaatgaatgaaaaaggaaacacccacccaccttatatatgtcctataacagttcattacaatgaatttgtaaacaaggcacagtttgatcttcattattagactcatcttaacagaaacacagcatcaaattggttcaaagttgaagaaagtctttaagacaaatgtgtcaagagaacatattaccctggagaaggcgcaagagcatgatcatactagcattaagctttggtgaaataataggtcccatcaccgtacccgggttcaccacaaccacatctaatcctttctccttggcaaattcccacgcagctttctcagccagagttttcgacatcggataccacagctattaactcacccaacaaaatcaattagtaaagcaacattcttggcattgtaatttttaggctcaagtaagagaaaaagggggaaaagaaaaaactcactttcttctgcttgcagtagtcaaggtcagtccaaccatcctcattcatcgcaacgtcggagggccagttagggtttggagcaatggaggagatagaggaagtgaccaccactcgcccaactccagcctccttggccgctgtcagaacgttaatcgttcctttgaccgccgggtccaatagctctttctgcaccaaaaattcgtcaataaaaaaaacaaaaaaaaaaaaaattgtagaagcacttgagagcgaccaacctctggttcatggacttcgtcgacgatgcatggggaggcaaggtggaagacaccggagcagccatgaacggcagcggcgatggagctgtagtcgaggagatcgagctggaagaggcgaagacgggtctgagctccttctaatgcttgaagatgcttggtctcagtttcatcgtctgccacaaaaatgattaagacaaacaagagagatatttttcaggtgaaaattgatgggtaacaaaaaaaaacataataaaaaagaagtaataatattaacttagatctttgacggcggcgttaatggagtaaccacggtggaggagaagactgacgagccaggagccaatgcagccactggctccagtgacgcagaccagctcacccttgttcgccatagtttagtttttttgttgtgggtaatgaaatactacctagtactagtaggaaggataatatctggaattgacatgtgtcacgtgtgagcaccttgaacttgaacattgctatttgcacagtgataactaaaacacgaatattatctcaattgtaaaatagtttaagagcttcagtattattgttaggcacaaataaggcttatttggttattattagtactatttttaagttaattttagtgtgaaataaattttatttttattttgtgcaattttatatttttgatagctattattttgcaagtttaaaattaaaaaaatgaaaaatattgaaaaaatatatgagaaaaatatcaaacaaatcaactatgggataagaacacttgaaaatattgaaaaaaaaaaatatatgagaaaaaggttaaacaattcaactctctaggcaagagtacctagaaattaattcgagaaaaaaattcaaaaattttggtgcacgattggagctcttgagataaagaaattacaaaatttaaaggagtgcctcaacactaaaaatccatgccaaagcattaagagcaagtctaaggacacggcaaaatcttatatatgtcgtgattttgttccaagaagactgtaattgtgccactattttcaagtt

SEQ ID NO: 295262 - DNA, 1398 bp, Cannabis indica
taattcatcttgggcccatatattttcagggccggccctgcccacgtgtcccataccggaaacatggataacaagtacaaatctagattggttacaatgggatatttgcaaacacaaggcattaattatcaagacatattttctccactacttaaacctgctactgtttaaattattctctctctagttgtctctttcaattgggaagtgaaataacttgatgtttatagtacttttctcaatgaaaatctaattgagatagtcttcatccagaaactagagggctttgttgaccctactaaacccacacatgtgtgtaaacttcataaggctctttatggcctcaaacaagcttctaaagcctggaatgagcttaaaataactctaattgagtggggttttcagatgtcaatgtcaaatacatcgatattcattttttgttcaagtttcaagttgatgatattactagtatatgtggatgatatacttgttacagatcaaaattcttctttcattaatcaacttatatcagacttgcatagatcccttttcctaaaggacatggtcttatacactacattcttagagtagagattttcaaagatgccacaggaatgtatctttctcaaataatatatatcactgatgttcttattaaacctcacattgaaggtgctaagagttctccaaatccaactagatctactacaaaattgcctttacatgaagaataaccctttgatgacaaagcactcgaaataagtactataggggccttgcaatatctcagtctcaccaagcgttatgctgcctatactatcaataaactcagccaatttatccatgctcccattgtttgaattattttaccaggatctagatttactaacaagtatgttattaacgtccaaaacatgaacttctaaaataatatgaaataaacacatataaagtattagaaaccatacagtgttagcagtggaatataatgtctccttccactcagattgctaacccttgtatcctttctatagcagtatatcaaaaagatcggagtccggatctccttctcttgaaactggattcttcacatccttacacactatgattgagtactacttgatgtgtgtgggcactcactcttttcactatgtggcttcggttttgaagagagaaagagagagagatggtttcggctagggtagtgaaggaggcttcaacattttttactgaaggaatgagatgcatcatcttttcccttaagccatcactacctatttataggaaaccacctagggctaggttagacttatttggcattaaaataatgaaaaaataaatggtaaattgctattagagtggccggccatggaacggatattgggccccactttgcaa

SEQ ID NO: 295263 - DNA, 1350 bp, Cannabis indica
agagaaagatacagatttaccagtgaggttagatgccagtggagtgttgacatcaacggttgattgaggctgttgagcatggtgaatctattgagtgagttgtgaaatcatttcttgaagcgaagcaagtttgtctgaaatagagtgagaagcaaaagcttgattagcagtcggacctttgacttgggaaccccgatccgaagtggagcgctgtgaagggtcgaatttgcacttgtcaaaatacctgggaggaaaaccatggagaatataacatttctcctttaactgtcctagtttctagcagtaagtgcagaaaggtcacatctttttattgcgagaaggatttgagggttgtgatgaagtggaaacaatgaggttcaggagaatgcagagttttctttgtcgctcatactgaaagatagtagataacaccttcgatagagatgggaagggtttggtgataacacttgatcccaaactgcctggtacaatttgttgaggccattaatgaaccgaatgaccttttcttggttccaaaatttggcattatcagtggaagcttgacaagtgcaaaggagattaggtcggagctcattgatctcatcccatatagcccgaagcttggtgaaatagggattgacagattcatctccttttcgtaaatctgtgagagattcttgaagttcaaaaagacgaggtccattcccttgactaaatcagttagtaagctcagtccacatctcatgagcagtatcaagaaacattataatactcttaatatccaaagaaacacaatgaataatccaagatattaccatttggttgcagcgggtccatgaatggaacaatggattggatggatctggttgtggcaaggtaccatcgacgaagccaatcatatttttggcaccgacagtaggattgaagtcgcgacatcactgttgaaaattatggttcgaaagagggggagtaacaagaatgagtcctggatgatcgcctgaaccgatgaaatacggattgtcttcattagtcggacgatcgtgagattccaaatgagacatggatccagtagaagaatgaggatgatgatgggcaacaagaatcatcgatggagcttcgaaagtgatggaagagggaggattcgtacgatcaggacaatgacaaagatctctaagaggaacatcaccaatgtatgctgtcaaagtgccaatcggaggagttggtctgacctgtggagcgacagactgagcaactggagcttgctcggagacgatcaggggaacaatagaagcatcaatcggaatagcgacagaatctggtacggtagaagtgttagaaattattttacca

SEQ ID NO: 295264 - DNA, 3273 bp, Cannabis indica
catttttgaattttgtgcagccatcatctctctttcccaacgtgtttagagtagtggtttgggtaaataggctattctcaatgccttagctgcaagacaaggctcgatctttaagttttactccatgctaaaaatattgagcgtatacctaaagatcatcaaatgtgaaaattgtggtctgttgattccagtggaacacccactgaggttgctaatattgttgcaaacttgtagagaaggtttggtgcaataaagctgaaggtcagtttgtttaaaatccaattcagttcttaaaagaattagagaataggtatttattgatatcaaagaaagaattacaatgttccaaactttttgagacagctggtatctacgtagagtaatctttactctaaataattcacacaaaattccacatcctcataagactctatcttagaatttataggctagactaataaagactcctaactagccagccaatagcaatctagtattagacatacttaaacaatcatctcagccactaatgacttgacaaattggcctctaaaccctaaaatgctaatgaattgtattattgagacttatatcaaggcgtagcactataatatgtgccgacacctttggctatatgaataaagagaattgattctgcaggaattattagtaggcttctcagttatcatacttcaattagtgaccaggtagctcgccagagaagtcccttacacgatgctgaagtaatacaagaagtaagaaagaagattggatacgaaattgaactccgtgtagatgccaatcgaagctggacctatgcagaagctacagagtttggctccttagtgaaggaatgtgatctgcagtatattgaggtagagtttatggattgttactaaatttactatatgagtccaggttaagcattataataatgtaatttattgtagaatctattctattacgggtcgtgatccgtgatttggtatagattattcagtttgtacatcttctgcctacatttgatttaggagtatatacatcgaattccaggtaatgaatgagaataatgggtacctctttttgtactatttgcagctttcattttgtgtcatacattgccttattcaatttgctctagttctgctgtaattcaacaacctacctgtaaatgtatgtaactaggcttgagtttcatgtgttttaggaacctgttcagaatgaggctgatattatcaagttttgtgaagaaagtgggttacctgtggcactggatgaaactattgattgtcttcaagaaaatccacttaatgtattaatgaagtatactcatccaggaatagttgctattgtaagtgtttgttccttttaattagtacaatttattgatgtaaacattgtttagggtcaattagcttatcgttcttcttgtgaagaaactaagggattgcatatttctcattcaaagtgcattgccacttgggtaagtcacatctaaaaggttttttaggcaatcagatacagaatttttctaattgtatgaccaattggtgcttgactcattctgtagtttctcttattaataatataatttatacaatatgtagtttcttcatgttatattattgataatttttgaaggaggcatattataatatttatctgttttgtacatttcggaacatgtacctattgatttaaattatgccatgcttgtccttactaggggtttggtactgtgttccttctttatcactttagttttagttatctatagttaccacctcttatagggatagaagaatcaacgaaatgtgcaagaatcactagaaaccgcataatcatcaaatgcagtttacattctggagaaatattgttgcaaaatattatatttcttaggaaatgttgtcagtttcttatagtattttactttccgtttggttatttcaggttattaaaccaagtgttgttggtggctttgagaatacagaatcgcttgcccagtgggcccacaagcatgggaaaatggctgttctaagtgctacgtatgaaagtggcctaggcttgtcagcatatatccatttatcctgttatcttgatctgaattatggggaggtaagcagacttatgaatatgaaaacaggcaaaacaggtccatctgtattccatggtctaggaacttaccaatggcttaaagaagacgtggctacaggtcctctcaagataagttgcaatcaacacagcggctttgtagaggcatctattgcagatgctaatcaacttctgcaatcatttcagattaatcataacataatttgtaaagaatatacaggagaggaagttcgtagttacctacttcccgtggatgtaaatggtatatcttattgtatacaggttcaagagattggagaatcatctcatgttagtaaaaccgatacactttttaatagtcttattgtgtgttgcctgtgtccacttgttatgtttattcagaagatcatgtattgcatgttaatctaccttgtaattttgaggggtattgtgaaactcctattcgctgccattactatgtttcaggcactttttttgagtttaatctattggtggtggtgctgctatattgggtccttctaagaaaattaaaattgctgcaggataacatacttattttccttcatggatttcttggaaccagtgaagactggatagctatcatgaaggctgtttccagaggagcaagatgtatttcaattaaccttcctgggcatgggggaacacaaatacaatatcttggtgataaggataccatactgagaacaaggttatcaattgaggtagttgcagatgtagtacatacagtgattaaccatattacaccagagaaagtaactgttgtaggatactcaatgggagccaggatagcattgtatatggcccttaggtttacagaaaaggtaactagataatttaatgaaattaattgtttttgttacagtagagatattgataagtttgaagatagtcacagcaattcatgtttcacttaaatttacattgttaacaaaagctgacgtttattgtgaaggtgaatggagctgttgtaatatctggaagccctggaatgaaaaatgaagcagcaagaaaagttcgtagagccatagatgattctcgagcacaatcccttgtttctaatggtttagatatctttctggagacctggtatactggacaactatggaacaggtaatccattgtttttgttttgtttttttt

SEQ ID NO: 295265 - DNA, 3466 bp, Cannabis indica
aatatgtaaggaagtgtaattgtttctgtaaacatttcattcccttttgttttttgaataatgcatcaaaactttttttcttcgtggtacaggatgaagagaacagcattttccacaaggtggactggtatagggtggtcctagatgaagctcatataataaagtcttggaagacccaaggtgctcgtgctgctttcactttgtcctcacattgcagatggtgtttgacaggaacacctattcaggtttgctttctatattcattaatcttaagcatacattttatccttctgtcatgcatattcaatgattcatacttagtttagtagtctgaaattttagaaccatttgtgctcatagtacctcacagttgatgaatttttgtataaattgctgcagaataatctggaggacctcttcagcctcctatgcttcttgcatgttgaaccatggtgcaactgggcttggtatgacaaaacacttgaactgtgtttctgtttatattgtagagtaggcatctagagaactttagcttgtcaaattgttcattttgttaactcatttattaaattctacatatttacaggtggaacaaattgattcaaaagccatatgagaatggagatcctcgaggccttggactgataaagtctattttgagaccactaatgttgagaagaacaaaggaatcaaaggacaaaaaaggaaggtagtcatactatattttttgtccctcagttttgtagcatctctttttctcttaaatgattgtgctgttaacattcacattacttgtgaatttgtaaccaggcccatacttgttcttcctccaactgatattcaaattatcgaatgtgaacaatcagaagctgaacgtgacttctatgatgccctgttcaaaaggtcaaaggtatgttatgtgatctactattttttccatgaaaagtcccattgaaacttttttgtttcaaaatttagtttcagttgaagcattatcttccattgtttagattttgctcagaccttcatcagtattggtccttcagctaaccacctagacacaatttgtattaacaggtccaatttgaccaatttgtggcacaagggaaagtcctacataattatgctaacattcttgaactactcttacggttgaggcagtgttgcaaccatccatatctcgttatgaggtgagattagcaacatcaatatcatctaagtgacaatattctttctttagtccattttcatttgttctcatctgtggcaactgtggttttgaaacaatgtagtcgaggagattcacaaaagtttgcagacttaaacaagcttgccaagagattccttgacttgaattcttcatcagctccagcaccaccctccagagcctatgttgaagaagttgttgatggcattcgacatggtgataactctgagtgtcccatttgcctggagtctgcagatgatgctgtgctaacaccctgcgctcataggatgtgcagagagtgtctcctttcaagctggcggacaccagctgctggtctgtgccccatgtgtaggcaaatcctcaaaaaaactgacctcataacctgcccttcagagagcaagttccaagttgatatcgagaagaactggaaagaatcatcaaaggtttctagtctcttggattgcttggaaagaatccgctcttccggctcaagcgaaaagagcattgttttcagtcagtggactacatttttggaccttttagagattccaatgaagaagaggagaattgggtacttgaggtatgatggagggctgtctcagaagcaaagggaaagagtgttgaatgagttcaatgaaactaaagagaaaatggtaaaaaaaacttaaaagcaatgctctcttttctcagtcattgatccttttgattatgatgttcatgtggttgtgctataattcaggtactactaatgtctttgagagctggtggtgttggcttgaacttaacggcggcgtccaatgtattcttaatggtactctgttctttttcttttcatgattgcttcaaaaaattcttacaaaaatggtgatatgacatgtttatgctgtgtttgttcaggatccatggtggaatccggcggtcgaagagcaagcaatcatgagaattcaccgcattggtcaagaaagaacagtttcggtccgtagattcatcgtcaaggtaagatccgattattacaaaactgggacgggtttagtttgacccgtaacctcattctgagctgggttttcttttttctcctttggatcctcttgcattgcagactgggcccctgagcctattattattatggtgtaggtccatgccattcaactccaaaacggtcttactaatcaaatataaatacatgaatcattagaaactacaaaacaaagataatatcaataatataaggaaagcatgaataatcagacatatccagtcaaaggtgtatccaaatttataattgccaagcctttttaaatcaggagttattatttatttatttaatgatttggcataaataattggacattgcattggtatagtttctgttagggagatttgattgaacaaattgtgtaacatggcaggacactctggaggaacgcatgcagcaagttcaggctagaaaacagagaatgattgctggagctcttactgatgaagaggttcgttctgctagaattgaagaactcaaaatgcttttccgatgaacaaagtttcaagtctgttttgggttatagggagaacattttattttattttgttggtcaaatttttgtaaagatgagctgggttttatctatgtatgtatctatgcacagctgggcttagtgtctagtcttggtattataattttctcttgtttgggtgagagggcagaggagagcccaattttgtaaatttttgaaagtatgaaatccaattggaaagagagaaccactattccttcatcatatgtatatgtatataatattaactcttttgactagaaacagtgtatatatgattttaataaaggaaaaaggtaatgatctttagaatattctcgaaatgacggttatatgcttgaccagtgaccaccgaattttgaccggtttagggtttaaccgtatctaattggtaacagcattaataataataataaagtgcagctcaactaaacgacaataaggagagataagcacaaatacaacccatgcacgtgtcaatcaaatcttggttctcttaggtctcaaattgaccacgtaagccactcgtgtaccgtttgatttctgctgaaggactaggaagaaaaacacgagtatatgatgctgccacgtggtactcttgtcggttaaacatcgccgtttatagacgtctgttttgttcacatttaggtttttgttttgtaagtttaaaaataaaagggtcaattaaaaaaaaaagaaaaatttataa

SEQ ID NO: 295266 - DNA, 788 bp, Cannabis indica
aacaaataccactatgaaaaaaaatatttcaacatgtgatttcgaacgtgatggttgactatgaggttgtaataggaggttgtaattaacatttctcacgatgtattattatgtaccattaattcaattgaagcgaaaataagagtggttgcaaatctggttaaataggtgtcagatataaaaccgccgaggagggagagtaaagtggcagttcctaagagattggtgagcatggtcgacgattttgttaagctgtaattcatgtagctgaagaaatatatcaccaggcttgctgagtttgatataaacgccatgctttccagtccttccattactatatacatttatatatatatgtatgtaacatattatatgtatgtatacacaatcaattaattaatcaataatattcatatgcatgatacttactataatcaaaaaaatgcagctctgtttcctcctcgtttgccaccaccactttgatcaaagtctctgctcatgacctcctgccatattatgatggtgaatgaaacattaattaactcattgtgtaatataataaaacaccaaggctagattaaaatatcatatacacatatataagtaccataattcatgtatagtaactgtttctaaaaggcaccgaggtgcacgcctgactcgcttcaccttaaggcgaaactctcttggaatcaaatatattaaaagaaaattgtggttgtggtctgaagaaagactttaatagtaaacgtactactcgggtaactattatagttcaatgtaactaa

SEQ ID NO: 295267 - DNA, 1952 bp, Cannabis indica
aaatatggaaagtttataataataatttactttttttttctaatttacaataataacgttactgttattactgaagtgcatgcaacgtcagccaaatctgatgtttctgacactttctttttattttcctgcattgttaaaaataacttttgtgtaagaaatcaattagctacctttatataaaaaactttatttatatatcatataatttgagatatattttggttactctcttaaaaatttatttgtatatattttagtaactagttagtatttctaagttatattatgatagattataatttaaaatacatttaggtaactttaaaaaaatattttcaaaaatgagttgtcatgtaatataacaagcatcattgttatatactgattattctataattcaataaaatgaatgttaacaaagatttgaaaacaaaattataacagtaacatatgtttcccacattttgaaattttcacattgaatagtagatcgcaatgatatttttagctcatccgagtgacgccatcagaaattattttaaaatttgagagaagagagaaaataagaaagagagaaagaagaaggagagaaagagagtaacttaagaggagggagagagagagaactttaaataaaggtattgaaacatacccaaacaaataaaaatgcatgttattgaaacttaaccaaattatttttgaaaattagataaaaaaataagtcattttagataattttcctgtaaatattaataatatttgtaaattgtaatgaattaaattaaaaaaaattacacaatacacctatatatattgttatatccatattttgaacaatcaatatggttatgatacgtatggagaagctgaaaaataaactagctcagattgtaaaaaagtaaatacgttcaataaactagcctcggaaaatacaattggtagaaatacttgaattcatttttttaaagataagggcgagccatgaataacaactaccattttgtaagaccagcgaggtgaacaatcaacgcagaaggtccatctcgagatacacatagtatacaacagaacgacagtaagttggaaagagtaggtaatgagttctttaagagcttgcaacttattaacccacatactcgtgagtatgttgaaagactaagggatatacataaaatataagtccactcggaataatcacatgatgacaacatctcacgtagatatactcagtcatcctcaatattacagaaggacgtgagaagaacttcccaagatcatacttagacacaaaaagttatcttcaaactaaagcatcaaaagatgatcatttgtgttccgaggtgaagaagcgtagtcagtataaccgcgtatagataaagataagagtcattatagcggttatttatttttatcccatgtgttataaatatgaaatatggagattgttcacgtttcatgaacgattacgaagataagatcctaagggaataactgtcatcctaaaatacttataaatagaaggagatcacccaaagatagaatgggacaaattaactccacaagatacaaacagaaaacaactaacttcttccttcaacaaggactattctaatatatatatatatatatatatatagtaataataagtgtacatataaatacttatatgacaagtcacttcaagcagttttttttataatcttacttattaaaagtaacttactatataattgtgtctcatatttaatgcatattttatatatgtgtaggtatcattactcatatacatatatagtggaaaaatacaagtttaatattgatgttttcattaaattctagaatccatatacgtagattatgatacactataaaaaacggttatttttagtgataactttttagtcaaaatataatttttttgtgactaacaaaatattacttgtaactaa

SEQ ID NO: 295268 - DNA, 6011 bp, Cannabis indica
tataggtatggattgagacttaccaggttgctttgtatatattactcgcagagttatgatgctacaacacattttgagtcgactgtggtggatgtactcaacatgtacaccctcattactgggaaggttcttgacctgagtgtggacttaagtgctgctagtgctgcagaagaatgaagaaaaaacacacacagacacaaacacaaacactcctcacatctcatctattcccttctcttctcctctccttgggagtgggtttagggctggaatgagctttttctttacataaaaattcaagaattattatggcatccttttgcagaaggagtggaactggattttaatttatttattttctgtgttttattgtcatgttatgaaaatttaaaatggtgatgtagatttcagacatcaaaatttggctatatatttgtggcgactcgttagtactattccattacatggtcttttctttgtcatgccatacactggtgagtgattcaatacattccaatttggaatgatatacgatgaaatttacatcttctgcagtgctgacttacgtactactagtcttcttcttcttcagaaataaataaataaaataaataaataaatgagttttgattttaaatttgtaattccgtttctccctgcaattataagggagtaaatgacacgaaagaaacaaaataaagtaagtaaaaccgaaaggaaaagataatgtcgtcgagtagcatcaccccaacatttgcagcggccaacctcctcttcaaagccaagaccctcaccggtaccggtaccggcaccggcggtggtgttggtgttggccacctccaatttctccgctcttcaccccaccatctcccttggctgcctcgtctccttgcttttcaacatcatcgtaaccatgatgctattacgggtagtaccagtacgcgccctcctcctcgcatgcctcttcgccgcccgttctcttcatcctccaccgaatcacctgagctctctccaccgaatcacctgagctctcttcttcttcttcttcttcttcttcttcttcttccttttcaatcaaagatgcggccgacatgctggacattagggttgggcgcatcctcaaggcttggaggcacgaggaggccgattctctctacgtggaagaggtcgatgtcggggaggctgagcccagaatcatctgcagcggcctcgtcaattacattcctcttcaccaccttcaggtataatattttagttagattagagcttaggtaggttgatgataatcaagtaagtgttatagaatttcaacggcggatctgaattctgatatggcatggggtattgggtattgggtatcatggttggcaggatataaaagtggttgttctcgctaatctcaagcctaggaatatgcgcggtgttaaatcatccgggatgctcatggctgcttctgatgcttcccatgacaacgtcgagcttcttctgcctccccaagattcaatccccggtgaaagaatttggtttggctctcaactcaatcaagaaaatcagactcttccttctcctgccactcctaaccaggtactctacttacttaccacttgcctctccctatttcatcatcaaacatgctcatttctattgtatgctatgctatttgtctaagaaattgaacatttgagattaaaatgctataacatggtgaacttgatcattaagacaaccagcactttagtaacaagatgaggaagtaagagagactggattttcaaatttggtggcatatggtctatcatctagtacttctagcatgagttttatcaatttttgcaccatatcatttgggtgtaatatctcttgtttgttagagttgggtggagtaaacttgatcccttgcctgacttaccttctattttgacatttaaatttctcatccactgttttatttactccatcagcatcttagaacatttcttttgagcagcaactttgaaagtgcacatatatattatattgatgagcaccttgggcttactcattttattctaagtttgaaaataatatgctagatcatttattctaagatggccacaaagtcaatgaggagcttaggggttgtgattgtctcaagttgagcttcaaattgagactgtcaaaaagtaaacttgtcttcttggagagaagagcaagttgaaagaccagttgattgtgggggttacactttcattttagtatcctctttttgttgcaggaatttgctccatgtttcaaccaaatatctgtagcatgtgtttcttattgtttataatcagctcttacactctcccctctcacgacaaatgcagattcaaaagaaaaaggtctgggaacttgttcaacctcatctgaagacaaacgattcttgtattgttatactcggggaccatgttatgcaaacatctgctggtgctgtgctgtgcagatctttgaagaacgcaaatgtctcttgattggagcaacaactccatgtaacctacgaccacaacttcttgatacttatatgccatttatcattaaagcattgttgtcctctataatacgcgatttcatattttaccatttcatataattcattgcttggcttcatattttacccatctttggtttcacttgaatcaaggacgttgtaggaaaatttgtctttggagatttgtttttgtttgctgcttccctgtacttgggtgatcttatcggtgttatttagccgatttgagacatttgggagagtggtgtgctctgtctacagagggggttggtcttggttttattatttctgattgcaagctgttggtgtgtattttacatagtcaaagttccaacaatttacagcaaaagaataagtaaccaacaaatgaaagattgattccctatacacaacacattgaacaaacttgaagaatatccatacctttaaaccagccctccaagccctattcttcaacctgagacaccttaattttacaaaaactatcccaaaaacgtggatcttcaattgaatgtagttcacatttggcattgtaaagtaactgataggcacttcgaacggaatacattccgaacccctccttacaccaaaaccaaaaatcagaacaaacatccgagggaatccccaagatcaaagcagcatcacgatcattaacctcctcatcccactctttcacccctggcttaaataaatctctgactctaaccatcgtaccttccaaacccaccaactcaaaggaaatgtaagaattcctatcataaggcagccacagatagaaactccccgtgaatagtattcacactaaaaaatactaaagactgccaaattcaccttgtgtcctgaccccgctcaattcactgaagaaaactaagcattctatccacaaaagctttacaataaacatatttatcattcacaaatagcatatgaaaaatagaaataccctctctagccactttgcatccaaccatccctctcaaactttcacatcaaagcttaaaaactttcacgtgtataatggtgtacactgtagcaatttatattgccattcaacagtaaaatttaattgacgcattaaatttgcaaataaaagtaaagtgaaggagtattcacacgaataaaaatataagagagttttgaagccaattcttgtcttgtcttttaaaaaatggagaaatatttttttctccttaattattttactaatttctctaattacaaaatttaaataacaaaaagatatgagttgataacatacaattcattttttagggaattgtcgtatatactatttttttaacggtttgaattgcttcggtaattgctgcataggttgcgatgtgaattttggttacgatttagatttctccattaattattctgtgtatttccataaaaatatataaaaaaaaactattttaaatgtaagaatataaaaaccacaatttttattgatttaaagtaaacatgctagatgacaatctaaatcccataaaaattattaaatttttatttttttttttttatattatttttcaaattctcatagtttaattatgagaattttctaaatttatattaaagtttaagaaaaagaaaaagaaaaacgaacacaattaactagtttaggcggcgtttggtagcatttttgtttttaaatattttaaatcataaaaataaaagtaaaattttgtttttgatattttattttttaaaaacaaaaatatgttctataaccgctatcatttttcaattttaaatacaaaaaatataagtgtattttataaattttatttttatttgctgattttatttaagttgggtctaggaccggggtccaggtccggggtccaggtccggggctgggtctgggtctgggttcggtccgaagtttggggtctaggtcaggatttggggtccgggttgggtctgaggtttgggtctaggtctggtgttcgggtcgtgcccgggtctgaggttcgagatcaaggttgggtctggggtcaaggtcggggtctgagttagggtacgggattgggttccaaggtttaggttggggtcggagttcaaaatattgataaaaaaattgaatgtatttcttttttcaaaatttttaaaattttgattctaaactaaaaagtaaaaaacaactttgtaaaacatgattttattaaatatttttattattctaattttagaaataaaatcgaatttgaaaaatattattaaacatactcttaattttttttgacaaaaactaaggtagtgtttggtttactggaatgtaattgttattgtaatggtaatagaaatagtaatgaaatataatggtaattgtaatgggattactattaccatatttaatttattttgtaatgaacattgtaattaattcttttttatttggtttagtataaaaaagaaaattgaataattaatatattgaccaaaatgtcctcattttatttattgtgaactacctttgataaagaggtaagagagagaagggtagaaaattctttttgtaatgtattgataattgtaatcctcattgtaatgagaattcatgcaagtggtgtaatactcattacaatgtaaaaggattacaaaagttaaaaggcccaatcaaatattgtaattataatgtccattccaatcttacttacatcaaagtaaacatgctctaaatgcttatactaattgattttattcataaaattatgggtaatttatagcataacctctaaaagaatgtgaagtttgaaaattaattttgggagttatgaagcaattcatcttaaaattattaatataatgtaggaaatattaagagagagaaaaattaggagaggaggagaagtgaaggaagccaaaaatagtaataaacacacaacacaagtgtgtaatgaataatgattgattgaggttggcttggagaagaattggagtgggatgggacccatcccaccggaatcaaaacaaaaaataaagtaaaagactcgaatccaaaagagagagaagctaagtgtggtgttctattcccccaccgcctcctccgcctccgatctctattatccaaattctgaaacttggttgcctctctattatccaaattaatatccctttctttctactttattattattatattgtgttatttcctgattacaacactctactccaaacaattattataataaatgtgtatgtaaatattctatatattaaataataaattgaaacaagaagaagaagaagacgacgaataaaagaaaggaaagggaaggaaaggagaggagaggagaggagctttgattgcctcacccattcacactcagaatcagaactcactctcttcacacccacaaaatcaattcaacaacaccaacaggtttcctctcatctctctttctatttctttaattttgctttcacttttatcaaattttaattacatcaaatcaaatcctattctcatcaaatc

SEQ ID NO: 295269 - DNA, 7722 bp, Cannabis indica
gtaattatactaaaagatagtgaggatgccctcgtagggtacaagaggtattgtctctttgggcttatggttcatattggataaaactgtttttatcaaatccgctttcgctttctaactctgatatggactatgaaaacaaacaagtctttgctttcagagtttcagagttagaaaatatttcagtttattttataaagagttcaacaaacttagtagcttattcatttcaagaatttttaattgcagtataaggaatgtcccaactaaattgctatgatgtttggtaggcaaatttgaaggttaataaaatttataactacccattaaaacaattgcagtagcttattcgttttatttttctccaagttatccgttttccatgacacgtgtctatatagtaagctacaaacttaaacaatttaatagatataaatatatcatgtcaccaaccaaatcactgcctgaaattccaagccatttttttgtcaggattccaagccaatttttattaagcaaactaatgactaaagtgatagcatgtaggtggtaacgatatactcagcttagcttatgacaatgcggtcgaactgaagcttgtggcgactatggagcttctgaccacatgtttgttatcgctatccttccaactgaggtacccaaaaaccacggtctctttcaaaattattggaccttctataatcaatttgaagctttgcttctcgttcttctcttggaagactagcttatctgggttaacacgaacattcaaacccttcatgggagtcacactggccacgtaggttgactttccctcccctacattagtaacagtccttcggaactcccgtactgttttcatagtggattctgaatcatttggattgaaaaacgctatgaaggatggatagttaagatcaatcgacggagtcgaacaattcaatgaggttgacatggtaatgattttgatttgcttctctgtatagtttagtgcacaaagaagattaacataatcttgagaacctacttcgtaaattagccctgggtcaagtgccttgttagggttaatatggcctgctcccatggctagcggagtggccggttcattacccaagcctatgtctttgatggggccaagagtattatcatagttttatgaagtggtcattatagctgaatgtatggcggaggggctccagtcccgtctcgcacctttaataagcgctgccaccccggctgcatggggacacgacatcgatgtccccgacaacagattgaaattactaaaaagtgaatggttgttaatggttgctactgaattgtttgatggccacgcagccaagattagcgatccaggagccattatgtcgggcttcaagatcttcggacagctgggcgaaggaccccgagaagtgtagctagttgcactaggagccggtttaattccaagatgtgttaggtgaaatcccatggtggcttttggttccgaattggtgttgacgtaatctttaatgatttcgccgtctttcaagttgaaaaatatagcagggaatgaggtttggatgaagagctctaagtcggtgttgttggtaataaaaacagctccagctacattagcattctccacattactaaattgatcagataatgaatcattcctgtcttcacaaaccacatatttatgcccgactttcttcagtttatttggattatcacatttatccatatagataatcgatattagggatttggatgaattcccggggaatacggaagaccccggaatggaaactccattcccaaggtttagtgttccggtgaattgcctgtcaatcgtaccggccgcaacggttagaacccaaggaatcccattgtgcagagtactaaagtcaggtccttcgtttcccgctgacgtggacacaaaaacaccattgtccctggcagcgaaggtggctattgccacaggatcctgataaagaggaaccgaatctagcccaaacgataacgacaacacatcaacaccatccattattgcttgatcaatggttgcgataatatctgaagtgtaagcaccttcatcccacaaggccttgtacatagcaaccctggccagcggcgccacacctctcgcggtcccctcagcatatccaaagtacgaggcaccactcacgtagttccctgcggctgttgatgaagtgtgggtcccgtgaccgtctgtgtcccgcgtggagtttacggcaatagtaatgtttgggagtttggcggataggcctttgttaaagaacctagcgccaattagttttttgttgcacaacgatgagttgaactcgatcccgctctcacattctcctttccacctggttggaatatcggacattccctcgtcaccaaagcttttgctctcgggccaaacaccagtgtccaccaacccgattattacgtctttgccgtagtgggattccggccatgctcctgtatctggattgaggccaaggaattgggacgtgtgagtcgtgtcaggcttaacgggtaagtctttgatcgacgaaatatagcctggagctccctctaaagctttgagttcctccatcgaaagacttgcactaaaaccttttatgacatgagtgtagctatagatgagcttagaagaagaggtaatgtgagcattttctgacagagttgacgtcagcgtagctgagtaccaggcatggttattggaatagactttgggcattgctgatgagtccatattgattatgtaattatcagtttgagccgagataatagcgaaagttaaggaacacaataagaaaggaaaataccaaaaactattacgagaaaccatgttggatatgagaagttggaagggggatgagtattattctttttagtagtagaaaatacttaagtggatgatatgtattgtgatgagattgaagattaattatttcaagtatgggaacctataaaatgagtgatcaaacatactattcacctttatttttctcccaacatggaccacaaggtatcttattgggaatgggacccaccacctccactagttccgttgcttcgaatttataatgccatgaaagttgcaatgaatataaaatgtaaaaggctgtccactagtcacctgactatggcttgacaaaatacattagagagcaaaatataagggtgttatattgttggactgaaatagatgttcttttaaaaatttgtatggatgttatttttttttatataaaattaaagtaaataattatataatttataattaaaataagcaatatatttataatttagtgttttaagggtttttagaagtaagaatgtgaaaaaataatatagaaataaaatattataattttaaataatataaaaaaatttagaagctttaaaagaatctttccattagagatataacggatcaatcatataacatatttaaactactggccatatacccatgtgattgctaaaataagtttttcttcctccttctgaagtcaatcaaaaccgtcaatcgggtaatgttgaaagggatatcggcaatatggaatatatacaaatttatcaattgtatggaccgcaacgcaacacgctgtcatgatggactgcactactcaactccacagcacacaccaaggaaaagtggaagcagtctctataatcgcaacggacacgtgtctccatcattttgttaccaaatgattgatcgttaattaaacttataatgattctttttggattcaaatttactttcctaaaaaaataaataatctaatctattgtaatgcaacacttgtaatattatatatatatatttttttttgagaatatcactcttattataaattaaaatcatttacaacaacagaaaaaatagaataggaaatttctcctatccaaccaatgtcatcatggaaccctaaatcaaatttagctaaaccatgtgctacttgattaacagtgcgtttcacatgggtgactataactccagagaaaaaggataaaagacaacgaacattcataataagatccgaaaaataagataaatctgtagaggaaacatttaaggctgaggagactctcaaagcatcactttcaatatgagttagtgatagttgtaattgcaatgcccaattaagagcatggaaaagtacttttgcctccatctcatcagatctgaaacttcctcgatagcttttgaaaaagcagcaacaaccattccattatgatctctaatgattgctacgacccccatttttttctgctccaaaattggtagttgcatcaatgttcaatttgaacccattttcatccgtggtggctgccatttttgaacctgcttggaagggactgatcttggcatagcagcaacttgattttcatttacagtagcgtgtaagataggtcttttggcacgtatgaaatcttcatggtaacttgtcgcaggttgccgtggtacaccgccatgaaaggccctattcctatcagtccataacccccacaacaagcaaataatgacctcaaaatcttcttggttatggattgtagatagatgatgtaagtaatcaccattaaacatgcattgagcatgtttaaaatcaatctgaaacttagaaagcttccatattgctttagcatgtttacatcggaagagagcattgcctattgattcccaactcgaagcacaaagtgagcattcacctgaatctatttcttgaaaagtgcagcagcagttggtagagtacattttgaaaaactttccaagcaaaaatatggatcttaggaggtaaatttaggttccaaaaaaatttccaccaatctctatgttgattggaagttgaggaattttgttgttcttccaaatgaaatccttatttgacagtgtaagagccatttgtagtgtagtgccaaattaacctgtcctgatcaacaagtatcttagaggaattgacaatatacgttacaagtcaattggctgaaactacatatttagcagagagacattctaaacttgatcctcagtaatgaagctcgatataagcattgaaggagggccagaaaaactaacaggttaaaactcattgtgactcggtatccaaggatcatatccacttgcataatgaagaccattaccaattttatatcgcagccctttaatcaacaattctctaccccaacaaatgctttgccatgttaaagatggtgagtggccaatgttagcatctaggaaagatgagtttgaaaaataccaacgtttgagtaaacgacttagtaatgaatcaagcatatcgaagatcctccatgcttgctttgccaaaagtgcctggttgaagtgaataaacgatcggaatcccataccacgttcatgtcttgatttgcatagagatttccatcgcttccaatgtatttttgtgccattctgattacttccccaccaaaagtttgccatcatactctccaactggttacaaaatttctttgtaagcctaaaacaactcatattgtaagttgggatggattgtacatccgctttcaaaagaacttccttccccctaatagaaaaaattttctcattccaagcatggagtagtttccagacattttctttgatatgactaaaacctcttgcttgtctcatccagagtaagagggtaaccccaaataccgctcatgacattcagttattggcatttgtaacgtttgagcaaaaaaattctgggctgtgaccgaggtattaggagagaaggacatcacagatttgtcattgttaagaacttgccctgaagctttgtgataaatatcaagagaccttttatttgataatgcagaaagttgggtagtttgaaaaaataataagctttcattagcaaagagcatatgtgataccgaaggagaattgcgtgaaaatcgtaacccttcaaattacctgcttgtttttcagattgtaataatctcactagtccctctgaacaaatgaggaataagtacggggataggggaccaccatgacgcaagccacggtatggttgaacacgactaaccacctcaccattaagagaaaaaggaaaagagctagtggttatacacctcatgataagagatgtccatttggaatcaaatcccatcttaagcatgattgcttcaagatactgccattcaactctatcaaatgcgttactcatgtccaactttagagcagagtacccaattctaccttgtgttttgtgtcgaagatgatgtatgagctcaaaagaaactaagatgttgacagtgattaatctatctgaaaggaaggccgattgggtttttaatattacaaaacatagaacttttttgaatctgatgacaattgtcttggaaataagtttgtaaataacattatacaacttataagacgataatcactcattggagctgggttggacactttgggaatcaatgtgattatagacttgttgagctttaacatgtcaagaccttcattaagaacaccaagaaccaaattagtaacagatgacccaacaatgttccaataattttgatagaacatggcaggcatcctatcacaaccgaggctcttgtcaggactcatagatttaagtgcttcatacacttcattgcttgctaatggctctgttagggacagattcatgtcatgagtaattgtggctcggatggcagaaagtgtttcctgtagggaatgagaatcaacaacatctgaagtaaataaattgccatattaagagcatataacatgtggcatatttgctttaaaggtgacacgaaaaccttgatcattcattaagaatttgatagcatttttggtcttccttgatgtagcatgagcatgaaaaaattttgtgtttttgatcaccacattgtagccaatcaacccttgatctttgatgctaatatttttcttcttgttcaagcaactcgtccaaaatagcctcaaattttttttaattctactgcattgtttaaaagagttgcactctgctgcatttgtgagatgtctcttttaaggtgaccaaatttttgcacatggcattgttgtaatgcatcagtacaagagtgtaaattgtgcaagaatagatcaattcttccattaatattggtagaccaatgctgtcgaattatggcagcagcatctggttcattcaacaagatttttttagatctaaatcaggttttcgtttgttcaaagattagtaatgcactcagacagctatagcacgatgatccgacgattaatagtccaaatgcaatgttgtcaaaggttggaaagtgttgttccaaagatcattagtgaaacaccaatctaaacgctctttaattgcatccactttatgtctatctttaacccaagtgaacggatcatcttcaaaacgcagctcgtttaaggaacaaaagtctaatgcatcacaaaactcgtccatttgtttttcattctgcaagcctcccccatgcttattttgattagaataaagtttgttaaaatcaccaataaccttccatgggagtaaaggagcaacgtctttaagtcttttcagaagagtccatgtagtacttctgttatgtaacgcaggagccccataaaaagcagaaaagcgccacttaggaccatttgggagagccatgtaaccatcaaacacatttgtattgaaatattgcaaagttacatctacatcatctttccaaagtaac

SEQ ID NO: 295270 - DNA, 4816 bp, Cannabis indica
atttttttacaataaacattcaattgataacaattaaaatataaatatttaaaagtgaaagatggaaaaatatccatctaaattagtctatcatatccatcatgtgtgactatatataatagcgtacaaagaataggaatcaaagatgcttaaaaaaattagacagtaaactagcaatatcctccaacaaagatcctaactcattacgaaaagataatctttttgagaaagtagaaatcaaaacaaaatagtactcaaaagtactaataggcaacccaagtacaagagacacactccaatacaattattaaagctacaccttttgcttggaatactccagacttttcaatcaaatgctaccataaaagctagcttgagcaacagtaatcttcttataaagtaaataaaaattaatttagcatactatatgtttactgagattttttaaaatctgattataaaagaaataaacttaaaaaaggaatgaattaaagaagaaaaaatcaagattttttcgtggtttaagtgttaatgaactctagtcaacgagtcaataatatttagttagaaaagtttcaatatatttttatctaagtgtttttgccttagatgaagaaccctaattcttagttcttgatcggagaaatcaattttcaacatattgcatgaagagattatgttccatttataggctacagccaggtatggacatacctggagccagtagggttctaaggtgtcaaataggcctactgatggggtaaaatacaataaatattgactttgagctaattgagtgaggcccaattcatgagataatggccatccatatgagaagggaccatttgaggatgctaggtttcatgaacaatcatttccgtaccgagaatgtatgagaatatgacgttggacaaaaatgtgatcttcttttggtaatgcatgcactccgcaaatctcatttaatggacaaacctatgtcacagtggggctgtgtgtatggtgagcatcacggaaggtgatatccaggaattatctgaatgtctcttcaaccattcgcgtctgaattacaccatgggggtatccagattagtcctaatgggctctttttctttagaccagataacatctcctagatcagagtggtatggccttgtgatgtttataactggattttcatccggatctagaaccatagcttaattccatttatgggctgaataattaattgggcccaagaatgggcctacctttactgatagttggaagtgcttatgtcactgctccagaaatatgggtaatatttacacccccaaaccttcgaggatcgagagtcgcagaggcttgcagcgtactcccagatgcacttttagaattccaaagaaataggtagcggaagctcataatcctttcgtttcccttgagtagagtacacgtgttacgagtctactaatctatgcacactacacgtctggttcatgttagtgaaatttttgaggggaatatcttcattgaattgcctcaatccctcatacaaaactaaatgttgcctttccatattcccagaatgttggatcttctttgtgtttcctaagacatgatctggaccgtttaatttaaaagcacacagattaccactttaagtataaatagggggaggatcaacaaaaaattatttgtaccattttgaatttatgagcttaaattttttatagggagttaatcacctaagagaggaaaaactccctaatctcctttgatgaatttttgatatcataaacgagatccttcacctcctttgagtacgttcaagactgaatctagatgcaccacccctgaacccaacattgatccttcaaagtcatcttggtcacaggatttctgagcgggggtcgatgaactgttgtagatagcccgagacttgggagaggctcgaacatctagatcaagttcccccaatagatgtttccataggtaagaatttttgactttaaacttatacttttgatttctgtcagagtcatttttgttcccagcaaaaattgtaggttgttaagtatgtaatttacgatctgtgagaattttttttccatactttgctgtgtaaggaggttcttatgacattcattaaaagatttaggttagttaaagcagatttatcatagtagttttagtttacattgatgatctattggctctgtgggctttgcactttcttttgtctgagtccctttcggtactagatggtttattatgtaggctttattctatattattgtgtttgtgatcctgctattctagagacttgctccctagaaaacctgtttctaaatgctagttctgacggggacatctttaagcagttgtgggggaggactctcccttggccttacttaagtctattgggttaggggtattaactacttagttttttctttttcctagtttctcctatggctgaagcagacaaatttgatgaagagatgactatggatcatgaaggaaaattggctcaagaagttgtaggcatgaagccagaaatagtagccaatccatctcaatggatgattgatcaatatacaaacaagtttcgtaattatctgatattgcggtcctatgaagagaagaggggactcaagcatatccatggtttgttctggaataggctagaattgaaggacgagtctccttgttattgttgtagatgcttcgaagcttggagctgggctaacgtcaaaggtgtagcacacctttccctctgaagctactttgcttacttctgtgcagaagtgggttttactcttttctagctcatcccacatgtatacaagttgttgttgggagtgtacatcttttgcaaggaccaggatgtagaaatcctgtctcaagaggaaattccttatttctataagttggatttaaatttcatgcagaagaacaagtctaaggtgggcttctattcactgaagaagcatcccaatgtggcctgcccaaccagtacatgcaggcactcccacgacttgggagcactggttaacatcttgatttccattaaagaggcacccaactctatcattagacttctatattgcgggtaagtactagaaatttttgatttttctttccttgactattctatcaaaattggaaaaatctgaatagggcgtctctttttggccttgcagatgatcctcctcgtcccatgatgactccttttctaaataagaaggtgaaattgtacaacattacaaactcagaggtatcgtaagtggagggctttgtcaccactgaaaatctcaggaaagtgggcctaattgctccttatgagagcattgagcctcataactaccccaagatacgttctgaccgcatagtcttcaaagaagccatcacagagttaatggctagataggtaaagaaggtcattaagaaagataagtgatggctggaggagtgggcacgaattcattcagaatctatgaatgaggatggggaactggaggtcaactttgctgccatatttccagatgggggtactctaagttccagtacatctagaagaggtaattctcctttttgtctatttcatgctccttgtctggaagatttagtcaatgctgatcggggaggttttgacccttattttggagttagaccattttaagtatcctgtcagccatttccttattagggaagatgaaattgtagagtccaatacacttcatccgaccatcgtagtgctttagagtagaatcttctactttaatgaaatacccgggcttcttccaatatggtagttttttagaccgggaggacataacactatttgtgcaagggatcctatgtacaacacattaatggttgaacccaaactagagccttgcaattttttttgttgatttccatgcattctttattatttatatatattttaatcttgtaccattttcttttgcagggggccactcactttaaaaatgagtatcctcaatgacttcttcaactaggtggatgccagagctaaggaagtgggggaagtagctaaacctacaaagaagaccagagcttccagctcatatcatgagctagggtggctacaccttctacccatgcggtagacgacacaatagaagctaatacagtggctgatctattacttcaaccatcatggtggcaccttagaataagattctgcttaccccaaaggcattgaacccaacccaaactttgatcccaatgggcgatgatgataatgaggatgtagattggcttgtcttcccaacgaagagggtggtaaaaaaaccttcacatgattatgaaaaaggccaagatcgaggttgtttagaaattatagctcagtagttggccttttaacaaagagccgatagggagaaggcagagaatgaaaaagttgagttggataggaggaaaaccttaaggaggaaagacctaaaagatcccatgattttaggttgccagactctaagcaaacgcatcaatcatcaacaaaaggggtagttcttcatgtcactgttctgctagcgaccctttctcttcccatcaagcctacgactcttaatgaggagtatctggctaaacaccaagaggcctctcaaatcttcatcgagaggtatgaggatacatccactgtaacgtcccgcttcaagcctctattggtccttatacccacggaatgaatggctcttatacacgagtacatcactctggctgcttcatgaactgatgactgaccctacatatcaacacgagtgtttccagcgtgctttgttctcactcgcactcttcctgggaaaacttc

SEQ ID NO: 295271 - DNA, 5897 bp, Cannabis indica
atattctttttttaaaaaaaatccacccttaaataaaaaagaaaaaaaaaagaaaattttcagtggtgtaaaaacctcaacaaaaaaaattttggtacgttaatggttatatcaaatagcccatagtagctcccgaccagaaaacataaacgtacattttgtgaactgtagatactccgatgatacccatatttatatacatgatacctgaaccgaaagtcaacatgttctacttccgagaaggttcctcatccatagctacataaaaatcaaacaaggattgtcttctgtttttacaatataataatatatacacatgtttccatctatctatatatgtatgtaacgaatcagagaaggtttaacacaaccaccgccaacactcaattctctttctctgtttttgcttcaaacaccatgctctgttaagctccttcatctctgagtttccttcctttcattttttatctctgttatttatcatgatatttattctttagaattttctgttgttcttatctgaaagattctttgattcgggttctttttttttaggtgttgagggtagtttagaactttcccaggtgtttgttttttgttttattttgttttgtaataatcaatatttttggggtttcgttggcaataattttgttagaggaagatatagtttcatctggtttgggttgttgtgatctgacttagttttttcaagattgaatgattatggatccaagtttcacagaatattcagatttcacaaatgggtccaaaatcgaaaagcagaccagtatatccaattcaaatgagtattcagttctctcagatgaatacacactaaaccaacactctccatattttgacttcattaatgattacccaaaccttttttttccacctgatcctgaccctggtaatttcatgccctccattaacttgtcttctttggaagaaccatctttaccttcttccacactgagcccagatggaaactcatctactcctccaagtctgagcccagggggtgactcctccaacgatgaaaaagaattctcaatttatgttctcaagttcatcaaccagatccttatggaagaaaacatggacgagaaacccagttcgtttaatgatcccatgagtcttcaagtcactgagaaatcattctatgatgcccttggtgagagttatccttattcaaccaaccagtctcctacagatgataaagctgagaccccagatagcaatttttcagtaagctctaacgactatgggggcagtaatactagtactattactatcgacagtaacagtaacagtcatgatgctaatagccctggtctaggagactataaagcctctccatttcagccctttgttcccggtgacaacaatttccagtttgatttggtttcggctcagaatatatttaggaacagtgattcaatctctcagtttcagagaggttttgaggaagcaagtaagttcctccctaaaggtaatcagctcatcattgatctggagagcaatggattctcaccccagttgaagacagatgcagtagttgtgaaaactgagagggaaagctcacctaacgggttgaggggaaggaagaatcatgagagggaagatgatgattcagaagaaaacagaagtaataagcagtctgcacagtatatagatgagagtgagttatcagagatgtttgataaagtgttgcttcaagttgatcataggtgcgaccacagcggtgagactgaacctgcacagagtgaagcaagcaaggccttgcagccggctgagtctaatgccaatggcaaaaagggtcgcggcaagagacagaacaaaaagaaggaaactgtggatttgagaacccttttgattctgtgcgctcaagctgtgtccagtgatgatagaaggactgcatatgagattttaaagcagattaggcagcattcttctcctaatggggatggatcccagagattggcccatttctttgccaatggccttgatgctcgtttggctggaattggaactggagccttattctatagtaacttacttgccaatgtgaaagcttctgaccttttgaaagcataccaccttaatctttctacttgtcctttcaagaagatggccatgttctttgcgaacaagatgatcatgcaggtggctgagaaagcaacaacgctacacatcgttgatttcggtatcctctatggttttcagtggccaatcttcatccagtatctctcaaaaagagatggtggacctcctaatcttcgtattacaggtatagagttccctcagaatggtttccggccaaaacagagaattgaagagacagggcggcgtttaacaaagtactgcgaacggtttggggtgcctttcaggtacaatgccatagcaacaaagaattgggattgcataagcgttgaggacatagagattgaaagcaacgaagtcgttgctgtaaattgtttgatgaggttcaacaacgtgctagaggaaactgttgaaaactgcccaagagatgctgttctgagacttatcaggaagataaatccaaccatttttgttaataacattgtcaatggatcctacaacgctccattttttgttactcgttttcgtgaactcatgttccacttctctgccttgcttgacatgctggacaccaacgtatccaaggaaaacgaagagaggttgatgtatgaaagagaattctatgggcgggagatagtgaatgtgatagcatgtgaaggagaagacagagtagagaggcctgagacgtacaagcagtggcacgttcggagcttgagagctggttttcggtcactccctctcgaccaagagataatgggcaaatttaaagacaagttgagaacatggtaccacaaggattttgtgattgatgaagacaccaactggatgcttcaaggatggaaaggaaggattgtttatgcttcctcatgttgggtccctgcatagggacctaactcaagtttattattagattagctatgagtggccacatcatcaatcaattttgattttgatctactcatttcttctgttttgatactgcaaatgtacctgttgtattgtaatataaagcttgatcctcttttcaaagctccgcctcttaatgagttcacgagtattgaattcccttttaatgtctggaaacacacatgtttctaaccaaacctgaaggccgctgctcaatccacttgagccactctgaaaaaactcaaagcctaatctgagacccccaaccaactctctgcagcccggataacattttgcaaaaacaaacactcaaacacatgttttcaagaggtgcttgttattatcaacaaaaataatagtctgctgaatttacaccaacttaatctatgtctagggagactcaatttacactaaactgcttttgtgtacaaaactttctcttctcttgctgaatttgagagtatgaaacgtaccttataccgttcctccttgtacattcttcatacctatatttttatcagcagacccgtagtataccgtaatatattttctttttgggaagaaagtcaaacatacttattatattagggttgcagaactaggttcatttttattttaatacattcctaccactttttttacagtcatttaaaatatttcactaaaactttatctgatttttaccatttttttttaaaacttgaagcttcattaaaagaagaagaacaaagctacaagctagtacaaggaagctaaagaaccatttcaaatcaactctttatctaatcctaagcctaattttgctaaactatgggcagagatattcaaatccctgttaacataagcaatctgaagaccaggactaacatgactaaaagacaaagagttttaacacttacaagcaaataatgaaatatattgttcaattacaattattaagcttatcaactatgcttttgcaattcgtcttgaccacttgaacaggcagcctaacaaaatgaatccagttaaccgttaggaggacagcctttgcttttgcaattgtaggagtaacaacgccaatgaaaggtttaacaaagcctgcaacaatctggttagaatcattaagcacaactgcacttaaactataaatcctcctttcataatctaaagccgcatccgtgaagacttgataccatcctgatggacaacccaacgaaattgatgagttctgggcaagttggtcatgagaaggaagctgcttctgttgtgcatctaagtactgaagcaaaaagctattacaccatgcaaacatttcattaggagctagagcaaatcgattataaaaagcattgttcctttgattccatatagtccacaggaaacataacaaaacatctgcagaatccttatccaaactagcaaaaatattagaaataaaatacataagatcaaaatgtttatttataagataaaagtgagcaaagtctgaattcttccaagctttcctagctctagagcactctagcaatgcatgcataatggtttcatggtatatattatataagggacacaaatgagaagggataatatatttttgaaaaagtaaggcagccacatggatagagtttgtaataattctccacacaaaatatttaacttttggagaaacattagcatgccaaactttagtccaaaaggtttttgaagcttgaaaggaagaagtagaggggatatctctacttgcaagggcgaagtgatatgctgattattagtgaatagaccagaattttccttttcccaaatcttctcatctttaccattgattcctgaaaacggaacatccaaaatatcattgaaagtaaaggcatcaaaatcggtgtaaagtttatcaagattccatgaaccagaatgatcaataaagtatgatagtttggtctggtttggctccaaattgcgaataggttgcttgaacttagtggaaggaacccaatgatcgtccagggttctaacatcctctccatctcccacttttcaaattaaaccaaaagctaatagatcccttccccagagaatactacgccatgaaaaaagaaggattatgattagccttcgcatctaaaatagatgagtttggaaagtacctagccttaagagtgagacccaacagagaatcaggctgagtaaaaatacgtcaaacttgtttagcaagcatagcttggttaaaatgaataagagatcgaaagcccaaacccccagcaaatttagaacgataaagagattgccaatatttccaatgaattttcttagaatctcttgaggaaccccaccaaaatttggccatcacaccctcaatttccttacagagctttacaggtagacgaaagcaagccattgcataagcaagaatagcctgaatgactgctttaagcaaaatttccttaccggctttagagaagcatttggaatgccaagaatgaagcacataggaactctatctttaagaaaagcaaaagagtgatgctttgacctggtcagacattgcaatagacctaagtgttttactaatgaaaggcctatcttgaatattaagattagtgtaaaagatgcccttgatatgggaggaaacattaggtgaaaatagaatagaggatttgtgaaaattaacagcttgacctgaagctttagaatagacagtgagatcatcactaagggcagcataacagaatctatcagcagtgcaaaatataaggctatcattagtaaaaaaaaaggtgagttgaagagagagctctacgggaaataaatatacccttcagaacattggtatcttgtttagctttaagaagagaggatagaccttcagcacaaaggataaacaagtaaggggataaatgatccccttg

SEQ ID NO: 295272 - DNA, 6610 bp, Cannabis indica
aaaaaaaaaaaagataaagaggtaaatatataaatatttatgtttagagactcgtggttaaaacgaaaataaacacagaaaatttcaatgcatactttcattgttgcaccgccttttgtaagcagtaaagagaggtcaaaacacttgaatcaagcaaaagctttcatagttaaagtgaccataaaagaagtcatctcatccattacaagcctcaagttggcttaaggtgttgacaagatcaattacaatgagaatcattcccggtgagactcttaaactgctggtcctgatatacaacattcacaaaaagctataaaaataaactaaacaagcttattagctcataaaagtatggggcttcctgtattgcaaagacatctcctttacttagcacctgtatgagacaaatcaataaatagttgattttttcttatgagaagattattaatgccgaattagttacaaaccttctaggataaatggtcggatttgatcaatttcaggtgattcaagctgctggtttgattcaatttgatcaggtggtggagattcttttggttggtattgttcgacttggtctgtgttaaaaggctcaagttgttgctctggttggattttatcagaaggtggaagctcaatctgctgatatttgggcttatttttctccatgagacggtatgtgatacaatacaagaataaaagtatcctactttgtgccaccactgtatccctaatgtgactttgtgcaaatgaaagacgatccagtgcctgaaaaattattaatctcaacagttatatttatcaaaaatgtatctcaatacctatatatggtacaatggagacacattgggcctatcctatggattgcctaaaagagcagtctctacaatctctaacaggcacataggcagcaatattatcatatgggtacatgctgcacgctacaattaagtattcaactttgttattttccctcccttgtatttctcatgtgtattggtgttgcagctttgatcgttatatagaaactaaagagaggagaaaaaaacttatgtgaatatagcacccccactgcacaagataaatgcccatattctacaaatgtttctttttgcggaactgtcttttgactgaacgaataaaaatgatattgctgtaagtttaaatatgaaaagtacccttttttctttcaaaaaaaaaataatgggagaggacagactatattgatgcaagttcaatcacttaggactcaatttcatcattcaagcgtacctgttctccagtttgaatatcataggaatgttgatgatcaaattcaagacctctaaattcattgatgcaaaaaccttcaaaggccctggaagtttgcaaagaactatgctgtcattgaagggcaggaaaaggaaaaaaaaatacaaactacagctatcaccaaagcactctatatattgtttttctgtaatggggtcatcacttttttaccatcttataagtgaaatacgaggaatccatcgaaagatgattggcgtattttctgcattgacatagtagcctccaaaaacaatgaaaacagtcataagagagggacccactgccattgctgcttcagttgttggaaccatagccccaacagtaaggcccatggctgatgcagcaaaagattctacagtcacaatgccacagaacttcccgaacctgtatgatcaagaagctacaagttagtaacatccgcacttttgattaccaagtagaagttcactataagttatggcatactttctctaggaaaattttactgagggaaccaaagcctcatttcaacctaattaaactaacatatttattcttgcagcaataaggtatgtatgcatttggtttcatcaatatttctgcaatataggactgaaaatggtctttgttgatcttgcaaataaaagttgttaaattgcattctttataatctaaactctacttaatcaaaatttctaaagaacgcctttttttttttctcttttgagtgctaaatcaatgtcccgtgactattctaatcgtagcaaaatgcaagtatacacccattaatatttaaagtttaaaaaaattagactgctgtatcagtatcagaaaatgcagtagtaacaccaggatacctagaaaaagtagggtgaagacgagccatagggtataacacagctccaaacatcaatggaaaagctgctccaacaggtatttcagccaacaacttagaaaccaggtaaggtcccaaagcataacacccctttgcacgctctctgtccactattgcacgctccttggggaaaactcccacagtctttgtgagagcagccattgcggtgtttattgcagcaacctgaaaattaccaactaaacttacaattcatctatgagacaaatccatttaaagcaaatatacaggcgctttcacaacttaaaacaataaataaacaaactttgaccaggaataaattgcagagcctatgactatttcgacacatgtatataagaattattaaaatgcacagcctagaggaaagtatagttaaagagtcatattcattgtttgacacatgtatataagaattataaaaattaacagcctataggaaagtataggacaagacagtcatattcactgtgcggaaatcaattaatttgctcacctgaagcaatcccattctgtcttgaattgatgtctgagatctgcccattctccaaaaaactgagccaaatatgattgctgatgcaattgacattcttgcccgaactttatttgttggtccatcacgggaagcctaatgagatagataattatataagatgagtgaatcaattcaatttattaaggaattgttcggtaaggagaattccatctcatccttgtttggcaagagggataatgggagagtcgagaaaattggaaggctaggaaccctcttgggtcacgagatagtcctctccttggaaggatgagaagggagaatgaggagattaaggataaatagtatatttaccttccaaagagtttaaccaactccccatccctctcaatttattcatcattccaactccccctctctcctcccttaatttattcatcattccaattaagagaaagaggtcacttatattagattgacccctcccccgaaaaatattgaaaaatctcacttttggcggagggaaaccgtggtaacagggttttagcacaaaaaaaaactaaaacaaacagtattcaaacaagacacaagcatataaagtactattagtcaaagctacacaaagttctccaatctccactcaagtctaagaacgaaaagtgctcaaaactcaaatacgttcaaaagattaatccataatctttgcacaaggctgcaccccaaaaacagatgcaccacttgttccccacttttcttacaacaaacacaccaacccggggaaatacaaaggaatggtcgccttttttgcatcataaaatgcatattaatttttcctagagccaccaaccacccaaagactttaactttaaaagacatctacttttccataaggtcttcatccaaaacaactcgccaaaattctgatctgacgtaattcattcatcattccaactccccctctctcctcccttaatttattcatcattccaatttccccactctcctaccaaccatagttacaatagagcaaaaaaaaaaactacacatgcaagtcagctcccataaattatgcaacactagaagaatactaaaacaaaaaataaatatagcaagttaaaatattaaaaagtagtctaagtattggtctccaatttcctccgtgccatactaaggataaatactgaaaatatgagcaatagtaagaaagattgacctgcatccacgcacgtttaaggagcaggctgaattgtctccaccagcttcccttctttctaactattcttctcctttcaaactttacactatctttggagacgtctcttattgcaattggagttgcatatagaattgttgaagattgttgtgaaaatgactcaacaagaccatctattctcttctgagatgagtcaacacttgcagatgaactatagtcaattgatataagatcagccaaaaactcagcgggattcacatgatctggacaactgtatctgtataaacataaatcattcagtcagtatattcagaaatcagtagccatgaaatcataatggtacagtacaagaagtgcaacttcaaaaactgtttcaaagcccaaagtttctgcttaatgataaatgcaagtaaaaaaaaactgataattaaggtgataacattattttaatttttaaagataatatctaatgcttgtataaagctgaccaattatatgtagaaaaagagttcagaagtcattttagacaacatgcacatggattaatggttctagattcaaaacatccaaatgagatttggtgacatgaaacagaatataagaccatcatatccctaacataaagatttaataaatatgcacataataagcattgaaaagaaatagaacaaaaagtattaagataaacaaggattagtggagaaccctaatttggagaaatactccagtggcgcatcacgtgcaggaccagcataaacaagtgccccctctgttagcaagacaatatcatcaaatttactatacaccgaacttctgggctgatgaatggagcaaattacagtatgcccatcttcagcaagctgtcggagattttctactactttctctgcttggaaggcatcaagccctgaaagaagcgcagagccgcagataatcattttcatgaatctcatttgaagaatcagctagatttctgcttttgacaagtttaaatcctcaagaaaaaaggaaagttttctgggtgtctataagggaccagaaacattttaagtaataaaaaaatgatggccacttcccttactgtgcaatgtctatatagtacttatctttaatgattatattttcagactagaagtgacttacaaaacttataggatgcttttcattcaaacaacatggatttcagaacgttaaaatatgacacagtaacaaacacaattttaagaaagtatacataccagttgtgggctcatcagcaaatataacagacgggcttgcaattagttcgcatgccagagacaaacgtttcttttctcccccactaattccacggattttggcatcaccaacaattgaatcagcacaactgacctttaaaagattaacaaaatttcaataaaataagcttaaagcctcagacatgacaatcaaaactaatgcaaaaacagttcttttccaataacccaacacctaactctatccagttaagaatcttaccaagcctattttgaacaaaagattgttcacgtactcatctctagcttccacagtggttatctccggaagctgaagctcagcagccagagacaaagtttcccgtactgtcaactgcgagaaaaacaagtcctcctgtctcacaaaagcaaacctgagacaaatagacaatgaacaacttaacttaaaaccataaacgcaatgcagtcgaatgtaaaactccataaacagaacagcctaaagcttacttgtaagttttcttcatactagggtttccattgacctctaataaacctgacaaatgcaaccgcggcgacgccgttagctgacccgccagtatgtttaggagcgtcgtttttcctgagcctgacggacccataatcgctaacagtcttcccggtttggcttctccttcaacgtttttcaatagaaatcgcacctatttagaattaatacataaacaaaactcaaaatctagttcgagttcccacattttatcggcaaaaaaaacagaagaataataagaagcaattactgatttggaagacttgtcagagagcgagcaggtgatgctacgccaccggattgtgacgggaacaacttttccggtgtgacctccatcaaaatcgctttggtcgtcaatgtcgtcgtcatcagcgctgttctccggtaagagtgctgggccagggccggagaacatgcggaagaggaaagcagcggcaatggcgaccaaagcctttcccagtccactttcccccaagccagtgactatctggcccactcctttcccgccagaacccgccatggattcttcttgctgcctgcctcaggtggtcgtatcgtaatgccaatgcccagtatgagtatgctaattgaacattacagggctaacgacgtcgtttcaagcgagaatcgttttccaaacggtaatatattcctttccttgagcgacgcgtggctatcagaagataagataacaatctatgacaaaaaacaaaaaacaaaagaatttttttttaattattttgtttttgagaacaataaaaaagatatttagagagcctaatttattttctaattttcattattttgttcatttgtttaagagtaatttgtggcataaatacttaagttttatgtcgcgtagcagataaatacctaagtcctatttttggcggtaaaaataccttctgttagggtcctgaaacttccgtaggtacctggacgt

SEQ ID NO: 295273 - DNA, 11701 bp, Cannabis indica
agtaccaatcaatccatttaagctctcttcaaatgtgtagtcccatacctacacaacctcagaatcatcacatttgaccttccccaggcggtgtgggattgcacagcttacccggtgtttccccatacggatcacgggactactgactgtcacaagagcatcctccaaaagcacaattgaagggagatcgtcatcataagagtccaccctcaactcttattcagcaatctttttgcctttcccagaaacagcctgcacaaagggacagattacctcctcggaagcttccctaattacaatgagaacctcagctggagcttgcttcctatttgccctagtcttattcttttttgtcttaaatgttggttacataagaactggtgcctcggctaccgacccttcttctacagccgctccctagatgagtatagcccatatcaaaggaaattctcctggtagccagcaaagagatgttttatgctttactcgatatttgcaaaatggtttgggctcttgtcctcaacccaagtgtgaaaggaggttggtcgtaagttttgactcactgaaaagataggtgagtggccttcatcccctgcactatgtaatagtcttgaatgtacacaccaatcttttagacatccttgtctatcgtgccagtcagcgaggagtaatcaacttgggaaaaatagcaaaaacctgagcggtcttttactgggctagatttcatgtcaaagaaccaatatttatcatgaggagaaggcgcccccatccccgttgcgtatatataacaaaaaatacatccaaatacttgatccccttcggtgtaaactgcttcaagcagatcttgtagtaatttgctagctttcgaaagtacagataaaggggtaaaagagtccactatttggaatgtgagccaaaccacgcacaaagaacatccctaggttcattagcaagttggtcatcgaaagggagaaaggcagtgacatctccgatgagccctttcttgtctaagtttgtaagcttcttgagtgtgaggttggacgaaggagaaagccacattggcttaggccattcttggtgtacggatgcatgagcctccttatattcctcagtaacataatggatcttcttgaccattaattctccccacacagtagttgactgcccaacctcattgtatctaccgaacccttcaaatagtgcaggaacgacgacctcttcctccctatcagcttgagttggacgggccttgccttggtcttctacttcttgtaccccaacatcaccgatatgcacttcaatagctttttcttcaaaagaaccctcataatgagtgtgaactaatgtcgttagttgagcaagatgtaggtcttcacgcgaaactttcctctaagtttgcttggtccgtgccactttcctagtcttgggcaaggctttagatgaaggatattgtgcgacgttaaccgtgatctttgcttccaaagtaattttccttgaaggctttggataacctactagcaaagtatgcggaacccctgcacggaccttgtatgtccaagaagcagactgatatcgccttaacccttaattcaattcccaaaggaatcgtctataattttcaccaccaatacggtcagggtaatgatggtgttgtgtggtaggttttagaggttttggctcctcgatcgttacttcccactcgtcaaagctagacattgaagtctcactcgatgatgaagaggcagcgtggagtctagacttgtcctcataaagtaattgaagtaagtcatcatttactcggtgcttacctccttagaagtttctcgggttcatcaataaaagagggaaagggaggtaagaaccgaacagggtcatgaaaagaaacaacgtagatgctttgaccaatcagatttatagattggggaaggaaatttcatcctaatgacaaaaatcctagtttgaagatgctcaagaacatgggacaaactcttaattctctaggaataatgagcagggtgtgtttgagtgtttttttaatgaaaaatggtgcaatattgtaagaaaatcaaatattatggtccgtgtgcatgcattcgacataaaattataagtcctattctaaaaaaaatgaagaacagttcataaacccaaaatgttcatagagataattctaaaataaaatgcaagaaattaaagaaaatgcacaaaaagtttagggacttactcattgttgaagatcgttgagtgattcgagtagaagtggaaatgatcttgaaatttcttgaagcttcggagaaaacttataatttgagaggattagattttttactctaaagtctgagtttcaaagaagttaaaacagataaatgagatccaaaaccccttcttataggtttctattttgataattcatttcaaattttggattttccctcccaaaaggtgaaattagtacacattggggtctccaactgccagcacgcgacccaatgcacatttttcaaggtgcattaaatacttaaaaacataaaggtacaactttatttacttacattgtagtccaagcatgtgtcatcccatttacctagtacgtggatcgagcaagtccacgtacaaatagaaagttctcatgcagacttggggagcaaataatgttatcacaaattttgcacagggtggcgtgacattcatctaggtgaacgaggagcattttatgacttgatcgggtgataccatctttgacatgccatcaaatgtgggttatttcttaaaaataacttatttgaagaataagttggaacatccgaacaaggtaaatgacatcgtttgaccagcatcaatcttgcaacaagcccgcatacagcggatcaagaaattcaattaattacttcttttctcacaagtaatacaagtaaaaggtgataggctttttccaatatcacaagatcaaatctttgtgctcttagttcttagtttcatttaataattataatttattattatcggtgtcattggctaaaagtaaggtcaacacacatacatatataagtggtagtgctttagattattatgtagctagcatcgaactatatataatacttcatagaatgatcaaatagcatcacactcaaatcttttgaacctcaaattaagtgcaccatatttaaaaaaaaatatcagttagtgtcacttatcagtgtcaattatatatgttaaattaaaactaagagatgcaatactgttaaatgaatcgagctatataacatcgataattgatatttattttgaagaagggcgttggttgttaggctatttttagcttaagttttagattttttttatagttactttttctttgttattatttttgagacgattttacgcttatttttcttgattttaggttcccggggttttaaagtgtaaattctgaaaataaaaaaaaaaaaggacgggatgagttgaaagcaaaaaaaattataagtgaaatttcttaagctcggcacggcgagcaatactttggtcgtcaccaattatcatcgcgatgagatgaagagaggtcacgacgagcagtgttggcaaaactatggttttttcaactatacactatggtcgtgattagacctttcatggtcgcaacgagatgttatgtacgagaattatgaacaattttataatttggtcattttgaagtgtaaaattaatttttataaaagggttttgaatttttatgctcattattcagaaatagaactttagaaacgaagaaaaagacagagaaagcgagtgttcaccctctagtactttcttttccctttttaatttcttacactaaattttatttctagtttgaacatggatttgagtttagaagttattaactaatttttcaatttagggatatgatatgtgttgattaatctttattccaattagctagtgtgatttgttaatctttctttctagatctttgtgatttatttatatttgtattaatacattttttagattggccacctttaacatgattcatataaaatttgagaagtgaatattaagaatgatctaattaaacaaacataatttttaatgtgaaacgagagtattcacatagcttgcctgaccattagattattgcttaatgcaagctatatgttaatttcaaagatgtattagataatgtatagtttaggaccttaatgatctaagaagagttagggttattttataaactgttatcacttaaagaaagaagattagtaagttgctttaacaattaggtaattgaaacaacatgattcatatttctaatctctcatacatatttgaacaactttattcgatttcttttaattttctgtcaattactattatttctttccaagattatttcgattaaccaaatagaaatataaatctagtttaatattcaattttaattctctgtggttcgacctcacttgtgtgagtctgcttgatacgtgaatttacgtaagttttacaattttgcataacatcggtagagaatttggaattcgaattcatgctttagaatttagaagaaaattgtttacacactttttaagttcttctacttgtttcataaaattgattaaagctaagaatcacaacacttaacaaattttcctctaaattctataggtaaatcaaagtaatttatcataattaagaatcatttatgcttttagattgatcaataagcatgattaaattacttacaagattgtgggcttattttttatcaatgactctatataatttattttttaaacatagttctacaccctctaatgtaatggatattgagaacaaaaatataagattattactaagtgccttcaatttatttatttattgttgaacctaatatctcaaatagtttgatttgtgtatgttgataaacatctttttttttggtccatttgtttgcctttttcactttggaaaataattttccatttgtgaaaaagttgataaatatctatgtattgaataagtgaaaaattatattagtcttgataattttaaatttgatgtgtactataattttttttttttggatgaaagtactataaattttttccattaatatttgaatatccttgaattgaaggcaactttcatctcatgtattttggtgtttattatatatatgccaatctatttgtctcccacactaattattaagacctaactattttcacacccctcacctacattatgtgacaattaccaaaaaaaaaatgtatattttagttactaaaaatttaaaaatatattaatattaaaaatttaatgtctaaaaacattattcttaaaataaattaaagtgattatttatagtcacaacttgaaatgaaactatatatttgtatctaaatattattttttaacaattactaatacatttgttgtaattaaaaaagtatatttattaaaaaaaaaatcaatattatgatcgaacaattatcactaaaataatcgttttattagtaaatattagttaattgattattactattattatttgaaaatatatatttattaattaattgatttattattattatttattacatcatcagggccgactcccacattattggctttgagattattattctgatctcattaaccaaagtaattgagtttaatttcaaaagctatacttgatgatgatttgatatggaattaaaatacaaatatatattagttagtctcttatatatttatatagatagatattattagctaggctaattaattaatataaataggtatattttcttatgaataattgatggtgattttgaccctctagttttagaatgacgtgtcaatggggtatcttttcttgacttgtataatttttctcattgattatatatataagaattgacatgttaatttgtttctttatatacataggttgaaaataataagaatcaaacaagtgaaaaactatacaacaataattatcgaaatgagaatttctcgaattgatcagacaccaatttctatatgacattaacaaggaaacaattatattatatatcttgaaaaaattctgaaaaaataaattaataaaattatctcacctcaaaataataaactaagtacacaaaaaatgatatgtattacacataattatttttactataatttttgatccaacgctgaatctcgtattttaaaaaattaagtttagatttttcaacaaaaaaattaaatttagattttttgtatttgtaaaaatttaaattaaaaaatattttattcatattcaaaattatttaataaaaatcaactttaattaaggacctcaatttatcttttttataaaatacaaaatacattaggcaaaaattaatttttcatgaaatacaactaaataataatttaatagttttacactttttttctacaaagagtatgtcattcctctccctaaagtcaaaaaaaagtataaaatttaaattaccaattcaataaagaatggagtcgggcatatcaaagaagattgtactaatttgaaaagaatggtgtctgtgcatgatggtcgttcaatacctctgtttggtccatggcttaagaatggttctcgtcttgataatggttttgccttgctggaagttaaggatctttaggatatctaaaggctggaaaaggaagataatactgtaaagggtgtggaaaaacgaatgtggcggaggacgacgggccaaccagtaagtcgggtgggtatgatgggtgcccttagcagtagtgaggtggtagttgagtccagctggccaaactagagtggaacaagtgagaatggaaggtgtagtctcacaacgggagataatgcttttgaagttgcttacgatgactatgtggacacgtcacattttcctactaagcatgtgctccatgtggtaatttatttaaagaaaaattggggccggtcaaatttggggcatctcgtgaggaagtgggctttggaggatctaactcaggcccaatacaaaagttaaagaagcctaaacttgttgggtcgagagaggagtccctaagccttcaattttggaagaaaatctactacagacggcccaaaatttggagctaaaaggaaaaagatatctagtaattctaataagcttaattcctttgtggcggagagcgatggtctgagttgtttggttggcattggtaaaacgggaatcaagaacgtctttgcagaagaaagtagagtgaatatttctgaggcttcgaatagctacgatgagtcgctggatcccagtaaaaatcttgattacttatcaactctctgaggtcagttgagagtttgtatggttctagaaaggcggttgggaatgttaacagaggaggggacttactgcccggggttaatgctgacaatttcatcttcggaatgtttccccttacggatcacgggactactggctgtcacaatgcccaagtcacttcggcagaggagggtgtgattactgtggtgttctctattttccttaatggtacggcttggacgggcctctttgtttacggtcctccattttagaatttaaaggaaattgttttgggaagctaggactttggagatcttgactttggcccacccttgggttcttgttggagtcttggagagatcttaatactatcctttgtcaggataaaaagtttgggggtagatcagttgatcatggagatggtcaaaatcttagtgagctattgaatatcactcatggagtggatttgggttgtactggcaattatttaacttggtcaaatggtcgatgtctccctgagctgattaaggaaaggttggattgggccatttgtgatccggattagcttctcaattaccccaaggttggggttcgttccctgggtattaaagattctaaccataccctgattatccttgatcttttgttggattgggagaggttcagaaccccattccggtacttagatgcttggacaagggacgagagttgtaaggttgttatcaaggaagctttggctattgtagttcacgatatcaagagcttccagctggtgactagattgaagaatattcgttgatgtcttattaagtggaataaaacacacttcaggatgtgtaaggaaaaactgcaggtgcttaaccatcttcttgtcgaagttcaaagatgcaccccttcgaacgaaaaatctcaagctcgaggcagatttcattttaaaaattgaggaagtggagaattgttaggctgagatttggaaatagaaatcctaagaattgtgataaaaggatggagatagaaatactagattctttcacgctgcgactgtgatcaaaagaaagcaaaatttcatcaactcagtcctggtggatggtgtggagtggattgaacgcagacattcggttggtgagtattttcgctctaactttatctctttgctatcatcctcctcccctcctagacccccttgagaacttgattcatcccataatctcgaatgagatcaatttggagcttgtccacatccccacaacttcaaaaattaaggaagttgtgtggtctattccccttcttaaggccccgagtctaaatggtatgccgggaaattttattaaagatcactgggagactgtaggtaatgatgttgttgctatggttgtcaagttctttgaaaccggtgagatggttaaggagctaaatcaaacgtttatggagctcatcccgaagaggatgggagctaattgttttgttgattacaggcctataaacctatgcaatttcacctacaagattatctcaaaactactggcgaatagactaaagcccctactgactgagttaattttgccaacataattggccttcgtccttggtagatggatagcgaaaaattccatcacagcccatgaaattaatggattcctttaacgtaagcaaaaaggtacgagagtgtttggtgagtttaaagttggatatgtcgaaggccttatgaccatattgaatgggacattttggagcaaattctgcgttcttatggatttgggacacactttatacaactggttttgactttgtgttagaacggtctctattttaatcctacttaatggtggcgccctcagacagttctctcctaagagagggattcgacaaggtgatcctatctcatcgtatcttttcattctgtgtagtaaggctctttcaaggctccttatgtagaaagaagaacagggccagattacgagttttaaggtacaccaacttagccccactatttctcaattggtgtatggtgatgagacttttatattctataaggccgacaaagaggaaatcgttgttgtccaagagtgtaatgatacttactttttgtggtctagacagagactgaatgtcaaaattttggcttatgtgttctccaaaaatgctagccaatagaggaagtttaagattgcaaatattcttggcttccgtagcatgaatagtgagattaaatcttgagaaatctgatcctttggtcgaagagcaaggtgagggattttaagttcattaaggatcgactttgtgctagaatagaagggtggaaatgtaagcttctctctcatgaaggtcggtctacccttattcgggtagtggcgactagtatcccagtgtatttgatgtctatctttcttcttcaaaagaccttgtgtcaagagttgaatcaagccatcagaaaatttcggtagacgggcagccctgataaggatagatacatttcccttactaattagacttcgctttgcttaccgcttgacggggtgggcttaacttcaaaaaacttgaagatgttaatttggccctcatggccaagcttggttggatgttggcaaagggtgaggattcctcttatggattagagtctttaaggtcaagtattgagggaatgatgccagcttgctttggtctctggatactcccaaatctctatctttcggtgctagaagtatctttgctactcgtgatttcattcgtaaagagtcttgcttccttgttcctaatgggagaagcatagatctttagcatgccctattgatcctttatttggattgggattaatttagaaaccaggcctaccatgatcggattggaccattttctgtggtgggttcttgatcgaattaggtccatggccgctgatcttgccttggcgtggcctgctcagtcagatgttggtcattctcttaatgcccctaatgattttctgctacacggcgaccatgtggtgtttattaaagcagccagcaaaggcttgtgctctgctactggaattgtgatcaccgattcagatggcgtggttgtggaagctttttcagtgcgtctcgaggctaagtcccctctagaagttgagacctgggctctcttccacgcggtgcaacgctataaaattcatggttggtttaatgtcaattttgattcagaatgtcaaactttggtgctttgaatcaaatctcgtaaggctcccgattagtagatagcttatgtgttcggacatatgttgatagggttggatcatcccccaaagtcggtgatcacttggatccctcggtctagaaatgagacggctcaccgtctctctaaacttgtttttaatttttccctgtttggttttttcaatgttgaggagttgccacctcttatttccaagtagaatttgtttctgctttggttggtttgggtcttttaatgaagtttgatgttaaaaaaaaagtataaactcactcataaaaaaatggataaagaataagcaatcattccatatcctcatttaaataatcagtttcataaaaaaatatttccttatttgagaatattagatctgctattagaactcatactattaattaataataatttaaattttttcagtcaattgtattatatttgcgtgtattattaatgtgagaatatttttaatagtataaaaaaaatactaagttaaggtatcaagcacaataagaagtggcatattgttattggtgcaatttaatatcagattccacacattttaatttaataaataatatgaaaaatcactaacaaatcacaatacgccacattagtgtggtgttggaggtgcccaataacaatactttaacaaaaaaaaaaattacaataataccagcaaaactaaaacaattacaaaaataataatattacctatttatttattttgaaagatttcaatcacacataatatttatgatccaattaccgaaattctatgggtttaaagcttagttaagtaacttattatttatctttttgaagcttggctatggaaggaaaaataatcgtacaattttgttatacttttaaaatatcacttattttaaacataagttttgaacatttaaccaaagtagttaccaaataaataagtaaacttgtttaaaatatatatgatcataaaataggatcattttgataagttacttttatgttggatttagatatttgaggaaattacattatatacccactttactttatttgttttgatttttacctctatttttattttctttaagatatactaacttttatagatgatgtccctattataccccttaatttaatgtaaattatatgctagacttaagtggaaggtgggggtatatttggcaactcactca

SEQ ID NO: 295274 - DNA, 3581 bp, Cannabis indica
cgtccacgaatgactacccgtgtcatctcgtgttgagactcgtggcctaggcgcaccacgacgtctcttggaggatctaggccacgtctcgtgcaagcggcataccggcaagccaagggaaacgtaccattgaacctctggcggcattcttcgacgcactaccgggtcggcccgataatgtccatgagtactccaactcatggagacatatgagtcccctcgtggtcctcatatgcccgccctactagtccccactggctagtagtagctcacttagcaccaaggtgcaaggggtggtggagagctgacaccagggtacccccttaaagagcattctgagcttttagccttctaccaggaacatagatgatttttgctctgtagacatatgggaagcaccatataccaaatcacctagtttcgccaaaccgattgcaccattctatttgtagacccaaataaatggtgaataccaagtcccgtcccgatccggacaatattgaagatatttacgaaaatgccactgcatacaaactaagcatcagcatgccacctgcatgcaccacaacatgcgccaccacttggccaacttgtgggcatcacttagcttgtaacgtgccatcatagactgcacgtaacactacgcaagctatagctagattcgcgacgacatcgagtctcgggaaggatgttctaaaacaaagtacatagaatcgacttttaattggtatgaccctccaatttgcatccaaatttttctctaaaattttgtcttggtgatgggatacaagagtaaacaaacagaaacaataattacattccctttagattttttctttgataaatctaatttaaaggcacttgtttattttttgtcgttacagcatataaatttgattaagaaaaatccccccgcggtttagtttctaaaaaagcacatttgccaatttaacaggacaatgataaaagtaataataatactattaaggaagttaaacgtttcaactctccatggttatatgtctggtaatacatactcatttaatcatcgatcactttcgaaaaaactacaaaataattcaattgcaccaaaaagcaaagtactacacaatctataaaactcacataaacatttcatgatgagtggttagaaatcgatctaaacaaacaaacaaaactagatagcaagtaaagaattttgaaacaaatttacaaacaggagaggagcctactcgaaaagtacaatatttttcttattttcttattattgcactttgatccaaacaccttcactaggaaccccagaatgaacaacaaacaacatgtaatatccaggtggggcaaccgtgcttgttgatgggccttgggccgagaccttgtaagcgaaaatagacaagtgctctaaccggcccacctccaaaaccaacatccgctgattcataccaaacgagtgcgttgtaaacgacggcgttacgagcccaacagagatccccggattcggacggtaaaggggcaatacgaacgtcactgagaacatctggccgtacgacagggtctgcatactcaattcgacggtcaggatcgaaggcctcatgttcgagtactgtggttccaaatagtagggatggtaagcttccaagctcaattccgtgtggtacggtctagctgtgaagttgtacgtccggtgtgggttacttccgcccactaagatttggccattgggcagtaaaagagcagaagagtggtacatcctgggtatggtggtcgggttcaaaacaacgaatcttctacccggtgggttacgggtacggtaaagcacagggttgagaaccgggtttacggcgtcgttccatcccgccgtaccattgccggcgccattgatgatgatgacgtcacccgtaggaaggagtatcatgtccggcataacacgtggcatgggcatgtcctccatgacccactctggattcgggtcggtcactttcagcctaccgcaacttctcgctgcctgcaagaagatccgctctttgttggacttcacatacgcccccggcggcgatccaccgcatatcattacctccgcttccggaaaatctgcacttaaacccacccgcgtccgggttagaatcagaggtaggagaaccgatgatccggtactcgggtagcttcgtttgcagcctccgggtataatgggaaactctttgaccaccaagttccggcgatagtcgaatgagatagagcggttgttggcgaagatgaagaggttcccgtcgggcaaaagatgcaagaacggataaagattattctcctcataaggatccatcgtttcccacaagaacctcaggaaatacgacatgtcgtttcgagagttcttgggaaagaactcgtaactaaacgattggcgaccgccgacgacaatggctcgaccatcgggcaagacttggttcgtagcgtaccatcttcggtccgtgaggttaaggctaaccagctcagcccagtcgcaaacaacattatcttgacaaggcgtgaagatacggatttttcttattccgtcgccgtagccgcctgtctgaattagggtgccgtcggggttgacgaagccggaggagcaccaggtgttggtgtggagcgtgaggggacggacggtgtttgaaatgatgtcatacgagacggaatgagcggtgcagtcgattttgtcgtttaaggtgcggcggacgcatctgcggttggggagggaaagattggaagggccgacttctaagccgtcgaagatgatgaccttgtcgttttttagaagctgcatgtgcatggcagagattccgatgctggaatgaagaagaacccagtgacctccggagagcttcgaccacgaaaccttaaagagacaaagaagtagggctagatggaagaagaacgaagggttcttgaacgccatggaggacgtacctagcttaattatcttgggagctttcgttaatgtaacgatattgaacgcatgcaagtcctcttatttttctctttttattacactctacctctatcggagttattaacagtgttgaaaatgaactcatcaagtacttatacgacatgaattaacatgttagaatattgtcgtttgttgatgacaatacgttgtcgtttatttaatataataatacgtgtcaaaattataaagatatcatttaacatatgaataaaaatgtaaataggaatagaaatagaaattaaaaagaattatttaaaatgtatacaaaaacttgattaaaaattattaaattttttcttattttttcaaaattatagagaagtcattagggccagtttggcacagcttttggaaaagctaaaagctgttttttaaaaaagcaatgacaaaaaggtgtttggtaaagagttaaaaaacagcttattgaataatttatggaaaagctacacctaaaagctaaagctcgtacaatctaacttttagaaaaagctgttttgattaaaagactctataataaattatttttactaaaaatttatttaattatttattatatattataaaaaataaaattattttttaaatgaaaaaatat

SEQ ID NO: 295275 - DNA, 1311 bp, Cannabis indica
ttaagtttttaattttttttccagattttaaatttttccattaaatgtccatatttttcaaaatacatttaaaaaattccatatttataaaaaaagcccttttctatgttggattcaatttcaacccatgatttcttggtacaaagcaaggttgttaacatcaagacaacttgtattagttcactaaataatagtattaatataatttaatacaatatggattacaatataattcaatattacatataccttacacgatttcgaaaaagataaatattcattatgtactttatattttatatttctaataagcttattactactgtattttatttaaatttagactatttaaattcgataatttttttttttataaactagacaaaactgcaagtggaatttaagtttatttaattatttaattacttaattacgtataagttaaaacatatttgtcagataacatttgattactaattttggacggatactaaatatgtgtaatttataattaaagatttcaaataagcattattcataaagtaccatattagtattttagtaaaatataaaataccacataagagcatctctaataaagcgtcaaattagtcatataatacaatagtttgacacattaaaaaaattagctctttgatggtgtattgtgccaaattttagggctgaataacaagagaattggccaaattttgaatttatgggatttggtgaaaaatgtgcacccgtacccacttggaataccacgagtttgatcacaggtcaccggttacacgggcaggtcacaggttttgcttttttttttgtttgtttttatgagatatagtatctatagggttataaaccctaaaaaaattgaaagagggaaagaaaatgaggtgatagaaacctagaggcaacaatgaggtggtagctaagtccctagggatgtgccgagagaggaggtgacaaagagagagggggctgagtcgttggggttgcgtcgaaagaggaggagagaaagagagagagcgacttagtcattggggctacgccgagaggagggtgagagagagatggggggaggagggagagagagggagggagggagggatgtgtcgttcgttcgtaattgatagaaggaggcgagagagtgtgagatgtgagggggctcggggctgtgtcgttcgaaataaaagtgaagtaagagatgagtgaccaataataaatctaggtttctctttttacatttaaagttgttgcccctgattttgtccaaaatcgtggattaaccggattgagacacgtagactg

SEQ ID NO: 295276 - DNA, 4402 bp, Cannabis indica
gattgcacagcttacccggtgtttccccttacggatcacgggactactgactgtcacaatgataacataaaaatacataaaaaaaccgtattttatataaataaaatctaaaaaactaacagtataattcaacatgaaaaggtggccattaccaaggctgtttggtgtcgtcttagattgcccagatatagatttatcttgtggtaagtaattcattcttatcttcttactacagacaatcttatcaaatgtgtaggttttttgtaatccaaacaaataaacaagttgcttttatcaagttccaagtttgttggaaaagttagttatttcggttatgttttcactcctcaaagtttgggtagttaagttagttattccttattttttgttctcttgtaagcctatatataaaggcatgtgagctcatttagattgatagagagaaaatcagagagtgaatggtctgattggagtgtgaagaaacagaaggaaggttgaggtgaagcactgtccaagtcgagtttcttggagtgcttgagtgagagaatcggggttttctcttgtacaactttgaggctgtgtaacatacatgttatgattgtaactttgaagctaaatgaatgaaatgaataccaaagggggtagcaggaagtaggcattactttggccaaacctggataaaaatctgctcttaattctctgcattaaattttcatgttcttatgttgtttgttgatcttaacttgtgttgttcatgttgaattgacgtgttgttgatttacaacaaaatgcaatttaaaatttgactccgaggtttgtacggtgtgtggcaagcatgatgaaaatcaccaacatcttttctttgattgtcctttatcaaaaaagtatagttcaacatatttttagttggctgggttttctgattcttttgtaaatcataggaagttatttcatagtgactttaaaattttgagtacaatcacaaataagtgttaatttggcacagtctttgtttgctttgttgattatttagcttggttgattaataaaatactttttttattgataaaaaaaaaattagaaaactgtaaaaatattgaaaattcgtataactgtaattttataatttatatatattttttgaaattatctcttgtaaatttatttaaattttattttatttctcaaataaatattattttcacaaatttgccctaaatcctattaaaaaagagggatttgtatataatgacgaaatagaattagtggctaaataaatatcctaaaaattcaaagtgaaaagatttttacaatccacatattatgactttgcagcattatcctattttctttagagcatgccgatataatattatttatttatttagttggaaataaaaaaaaaacatgtagaaaatatagatattaatacaaaaacagagatttttattttattttaatttaataaaaaagtgaagcaattgactttcaacatcaaaaaaaggctttcatgcttatatatggtgctgtcgggcatgattatgtattttgtatagaactttctctctctctttgatcataatataaatataaatgtaaacataaatatgttagagaagattttgtggtaatattaatgtggaccaaaaaaaaaaaaaacaaacaaaaataaattactatatcaaccaattatgaagttttaaatatgaatttttgagtgttacttttgctaatttgtcttaaattttagagttattggacccaaacgcaccctattgtaagtaaagtaagagcgacctatcgagtaaggtcttaggcaaatgagtcgtacacaaaaaccaaattgctatgaatgcatgatcacatacatatgtgacccattttcacagaacacaatatgtataaattgtacaactaatgaaatctttgagtgttaagccttgctaatttgccctaaatctcgaaattgttggacccaaatatactctatcgtaagtgaagtgagagcggcctatcgagcaaagttttaagcaaaagagccatacacaaaaatcaaattgatcatatatttatatatatgtgactcgtttaaaagaagttttaaagatcagtcttgctaatttgctctaaattttaagatcattagacctaaacacaccttataataaggtcttaagtaaaatgaggccatatacaaaaattaaattgtatatatatatgatatatacgtgtgacctgttttcacaaaacaaaacataatatgtataaattgtacaatcaatggagtatgatgagatatataagaaagtcaaatggggtatataatttttcttttcttttttcttaactttagcccttttaaggtgatgggattaacattcttccactttgtcccccaatcttaaccttaatattatttattcatttaatttttcttttcttttacttttgaataaatatatattaattttattatttggccttattttgttgctaatgggttgaagggtttccatctctgcttttgccttgagccattgcttttctcataggaaaggaataatatttgccagtgcttcccctatataaactccccttcaccccacccctcttttttgggggcccatttaaggtccaatcatgtgggcccatccttgtctgtgggcctagacccatcaaaaacacaaactctctctctctttctcacttaaaaacaatatatatatatattatggggtgttgcgtaaatcactagaatgctgacgtggcattgctttgagaagagttggtgttgttgaagtggagacttgaccccacctaagtcagccactttgtcactcttttttgtagtcttgtcttgtgacttgtgactctctctctctctctctctttaatttcttcaccctttgcttgtttggcacacttgaaaaaaatgttgtacaagtagcaagtgttgtagttatagtaacacgatcagtattgttattaagtatcagtggtaactaatatcttttactggagatattttatgattgattagcgatattttttaaaaattattcttttaaattatatgagacctgatatttaattataccaataacagtatgacactgatgatggtggtaagagttagtaagtatgtagcttgttgtttacaacatcatttcactttcttgacatcccatgctatgcttctgttgttttcaccataaagctttttttaagccataaatgaataaacatacaccacactcctactactatgctactactttcttccttatttgcccaaggttgttgttgtgttgctcaagcaaaagcaaaagaaaacactagtgttatgcatgtttgttggagaaggtttatgtgtggtgataagttatataatacatggactagattttgtgtgtgtctccaaaattatttgtgtgtgtgttttgttcattcttacaataattgttagattaatggttgagttgctttaaccattattttatattagaaattcgtttgaagtaattgtataattattagagtaataattatattatattttaaaatataagacgttttttagatataaaatagtaattatttataaatttcttagtaataattacgaaaataatgatttttagtacttaatatttaaaataaaaagttttgagtaattacacaatataattacactcaatttttatgctaacatgataattagaaagtgtaattgagacatattaattaccttaaattgcgtagttacagtgttattacgttgtcagataaatacgtaacactatataattacattcaattacacctaattttaattttctcgtggcttttcaaacgtttcataaaatgggaatactattttgtatcttgtgttttgcaaaagttatcgattgaatacctgtttggtcggttaaatgaaaaatgtgaccttctatttttcaaaatattacaaaataataccctaagtttaatttttgttattatttaaatataattagcctgaatccagtttctagtacgaaacagatgtaaaaaaaatatataactagtctaatcataacacatacaagtccgattattatcaaattttattttgataaaaactaaactcaggataatattttgtactattttaaaaaatacaaaattcaaattattatctaacaaaatagaatatcaaattaataactttataaaacacaaacttcaaaataatatttaccataatattaatacatagactgaattttgtatacaaaccattcatccttacacaaattttagattaatagttgagttgcttgaactgatttttaattattaaaacaaaatactgcaatacataaccatacaaaattcaatcaccatataattaattaataga

SEQ ID NO: 295277 - DNA, 1892 bp, Cannabis indica
ccatctgcgatatcaaattttttgggtgtattcgacggtgctctacagtgcagtggggttccgatacagtgcaacgactgggctgttttatcctggggacgaccggcaatttccgactgcttgcacactcctgggcagtgccgcgaacgtcttaaagagagcgacttagtccgcgactcaacccagaattcttcattcggtaatatcgttcctcttttattttgctagcagtttactcaacaatatctttggtaataaatgattttagcatagattctaaaatggggttttcgggtacaatatttttaggtattaaaagctataacaagagccaaaaacagaggattttctgatgtgttatacttggactcggttaacaagaagtatttggaagaggtttcttcttgcaacatttttattgtcaaggtatatatatatatatatttgtttaatatcactactgtaaaggattggatacagattatataccaacaataataataataataatgataataaattttgtagggtaatgttatttcaactcctccaacagctgggactattcttcctggtatcacaagaaaaagtatcattgaaattgctcgtgaccatggttacaaggttatatttatatatattcatatatattaatttttgttctcaatattattacgaataacatgagagtacttctggtagaatacgatcgtaaccattcatgaaattacaatatatattacggtaaggtatttggttatttctttaatggttacaatctaaataaaaatgtattttttcaaatttatagaaattttcttaatatttataattaattttatcttaccacaatggccttttttataaatataaatatccaaacaaataagttaaaatatttacagtttacttataaaaattaatttttcaggttgaggagcgtggtgttatggtggatgagctaagtgaagctgatgaagtgttctgtacaggaactgctgttggtgttgctcctgttggtagcattacatataagaatcaaaggtcatatattttacttctaatttctcaaaatttaatagttaatttattaatgatataataataaatcttaaatttattttagagttgtgacactaatatttaaaattaaaatattttatatataggatggagtttagagttggtgatgaatcaacatgttcaagactctactcaacccttgtgggaattcaaacaggggttattgaagataagaaagggtggatagtggaagtagtttgagttggttcaactcaataaataaaatattattaggtattaattttataataattaattaattgtattatatattttaaagtgtgagataactatatatatatatatctacatatatgggaaaatgatacagaagttttgaatacttttgtgttgtttatgaagttatatatatacctaattacattattatacttataatccttgtaaatattgactaaaatgtaatacatatgtatcttgtaaataaataaatgagtattttttgtggtaattattggccttttgtgtcttagagatgagtcaaattaataaaactaaagagaataaaaccatttaattataaatataattttcaattaaagtatatgataagaaaataaggtttaggaatcataattcatatattaataatggtttatggtaaacttcttaaatcatgaattatattttatggtatgaagtttaattttgaatatcaaagattaaaagggaagatataagagtaaatgctatttttgaccttatgttttgtaaaagttataattggatcttctgttttgttaaatgacaaaatagatcttgtattttttaaaattgtataaatatga

SEQ ID NO: 295278 - DNA, 2422 bp, Cannabis indica
tttttttttttttgaaaatggaattctcaaaattattacatttaatattcttattgataccaaatatttattaagtattgtggtgaattaatcaccctccacgaacataacaaacacagagaattaaagaataataagaaagaaaacaccaaaaataacaatgttctgaaatgaatagtaaaatagagtaaacaaacacagagattacaaagtttgatcacaagtagtgagcttggatctactctttgggtgcaactaacttgaggttttgccttcattgattgatgatgatgctcagagtacgtacattagagggatagtgttattcatcagtaatggagttttgctcctacaaaatgactccctcaaggggcctgagttatacaagtgtcaaatcctttacaacaattttctctcaactcaaccacactctaatgagtaacaaaatggtctttatatattgacaagtacaatgagaacttgagccaactaacacaatagagattaattaatgattcccaaactaacttaactcgctaacttgtacaagtatataaactccacaaattctacctcgtttatatacttgaacaagtatgaattctgagcaagaaacaaataggtaaaatcgttccatcagcaaggttttcctcaatgagtggaggatcagcagtcttctatattcaacaactttaggcataacctaaacttctcacccgtaacgcacttagtaaacatatcagctagattttcatatatgttaatcttcttcactttaactttcttgctagcaataatgtccctgataaagtgtaacttgatatcaatatgtttggacatttcatggtacatgtcgttcttcataagatggattacactttggttatcacagtgcatggttaaattttatgagtgaatccctatttcatctgtcaatcccttgagtcaagtggcttcttttaatgcttttgttgcagccatgtgctctggttctttggatgacaaagctacaaccttttgtaggtttgatttctaactcaacccccaaaaacagtaaacacaaaacttgaaagtgttcttctagtgtccaagtttccaacaaagttagagtgaacaaaaccagttacaatatcaatattgttgcagtatttgccaaatactaagccaattattagtgagccttggatgtatcaaagtatttatttcagccccatccagtgttcttctctaggaccactaatgaatttgctgacaacaatcatgctatgtgccagatggtctggtacacaccatattatacatgaggctccccactccatttgcatagaatatttttccataagtttcctttcaacatttatctttgtgactggttttgagatagtttgaaatgctgagcaagtggagtagttaatagtttggcatctttcatgccaagtttatcaagtaccttctcaaggtaattaccttgagatagacagatggtacgaggtctatttatcttgatctcaatgcccaagatccttttagctggacctaagttcttcatctcaaattcaattttgagtagagacttgagcttttcgatttgatttcgttctttcccaactgttagtatgtcattaacatacaatagtttatagataccatcatggaagtagacacagggatcataattgctcttggtgagccaattttcatcataaattcatcaaatcttaggttttattgtctaggagcctgttttgatccataaagtgacttgtttaggaggcatgcctagttcaatttttcactttgctagccttcagctatctctataaagattttttcttttaggttcccatgtaggaagccagttgtaacatccatttgatccacctcatgatcaaattttgcagccatggacataatgactctgatagtagtttgtttaaccactagagaaaatatgtcactgtaatcaatatcttcttattgagtaaatcccttggaaacaagtcttgctttataccttggacccattccttctatctatttgaataaccatttgcatttgattactttttggttttttggcttatcaacaactgtccaggtcttattctttttcagtgacatattttcctcttcaatagcctgcaaccaaactgtgctatccttcacagtaatggcttctgtgtaactagatggttcaacgctgtcaatgtcttttactacagtaagagcataggtagtgaacttagcataaccatattttgttaggttttgtaccctaaataaaactcatttcaatataatcagtaatgtataaattctattaagtctagaacatatgtatttgttcatgattatagtgttgtcaacacagtagaatatattcatgattatatgttcaaaaatttaatttcctgatttgtca

SEQ ID NO: 295279 - DNA, 4159 bp, Cannabis indica
ttttcctcaagtcaattaaattttgagatcatgtcttcaaaggaacgtaagtctaagttaccccaaaacccaactgttctattcgaagctcaactgattgagtctagggctaggtcacttgcttcctacatggatacttttttaaagtcccgcggtattaagagcgagaaggggtgtcagagtcattcggttgaaccaagcgagttcaggtgcttttcaccaactcgtttaatggaggaacaagaggattgttgtagctcaagtggttcttcatcgataggcacttagagtgtcgaacatattagagctagggccatccttcccttaaatcagtatttcaaggattgttataattatcttggagttgcgccttcttagctcatcccaaacacatataggattggcctgtttgaagatgctataccacatcctgggatgggaatgcctgacatcgttagagatttatgtttttatagtttaaaagcatgcccctcgagaaagaactgctcggcaggcttttattacttaggcacccactctaacaacaacaagattattgtttggcttcctaacaaaaaggagcttaagaatgatttttttggacgactggccttcatccaataaacacaactaccttcaagattatacgtaagtgtttatcatctcaaatttttggtctcggtcttgaatatatgttcgagtttgcattgacttttcctcctttgatattctttcagctctttcaaaaagaccgatcctactcctaccatccaaaggtgccttgaaattcttgtgaaatcgccatatggtttgtgtgcggcagattttcttcttcatgaaaaaaatttaaaaatttgtggccttctcgggactaaccagtacatcatggatcccaagtatctaacttgacaacgaattctagtgcccaaggacaaagaagatcacggttttgttgctcgcacccattatttgaacacccttgctattcgagaagtcagcgagaccacatataaggctccccgaggtaaaacttcttattttatggatggtctcctatcatccttaggactaagccaacgtatctagtttagtgttgcatagaatttctcctaaaacacgtagcagatcaggagcaagccaggtggcaatgggacccacgttacaaggcacacccccttaatcactcctgaagtctattagttcaaaggagtaatgatagattagtcattcctgggagggtccagctggacaacgagtatcgcttgtcttttcctcttcatgagtgaagtcttctcagagaagggtacgagaggactgatgaagtataacacgttgttcgaggattaaaatgatgtatacgcatttaatgcgatatggagaagaacatttgacaccttacgatgacagacgtgtttaagtatttacacccatcactccttgatttcagagatcccatacatcaatcgatgactgcataaatgagtcgtcaagtcataaataaaggataagataaatgagtcgtcaagtcataaataaagaataagaaaaatcccacccaataccgatacacagtccaaaattcatcataataataggcaattatgccctaaaaatctgattttaaaaattgtgcaaagtatagtgcaaacaaacacgacaattgtgacattttatcaccattatgagcctataaatacccaaaatgatgtaaagtaagggggatgggtcgaaaaaactctctgtaataactactctcataaataaagtgactcgtggactaatgctcattaatgccccaaccacgtaaaaattttcacttgtaacattcattaattacgtcatacaactctaattattagttgaaaaaataatctcggtgaatattttagtgctttcattgagagctgtaggaagcttaccaaaagaggaagtcataaataaccttgtggcataatgttaaagacaagaaacacttcatgtccacaacaactagatgacccaaaggatccagataaagaacaggtggcttctcgggtggatgctgaaggagaaggagacactaatgatccaatatattcaaactaagaagaatatgaaaactacaatgaatacaactatacagaattagttgatgccgaagaatatacaaaataagtgccctattgcttattttagccaggctttgtcttctcgatctcacgccaagtttgtgtatgaacgagaattgatggctattgtgcttgctattcaaaaatggcacccgtatcttttaaggcaccgattcatagtctgaacggattagcgtagccttaaatatttttttggagcaaagattaatggtggatgagcataaaaaatggttaaccaaactattgggttatgactttgagattcaatatcttttgagctggagaacaaggcagttgatgccctctctctcttgggttcaacttgattctttggctgctttatctatgtctcatgtgatttcaattccggacttgcagtcataagtgcaagcagatctgatgttgtccaaggttttaagtgagctgacaaagggacaggatgggggcagctataccttggttcaagggatgttgcattttcgaggccagttggtattgtcatcttcctcgcctttcattctacttcttttacaagagtaccatagcaactcggttgggagacattccggagtgttcaaaaccttccaacgggtgggtgccgatctgtattggccaggtatgaggaaggatattcaaaagtatattgttgaatgtgtgttttgccagcaaaataagtatgtggctcagtctcctgctagtttattaaatcctctacccattccagaacaagtttgggaagatatttctatggacttcatggaagggctacctatatcccacgaatttgattcaattatggtggttgtggaccgcttaactaagtatggccatttaattccctcgagacatccttattcacccactaccgtggctgaggtgttcgtgcctgaggtggtcaaacaccacgatttccctcactcaatcatgtcagaccgtgacaaaatccttttgagcttgttttgaaaagagttgttccgtttgcaaggcactcacttgaagcatagtaccgcctatcatccccaatcggatggtcaaacaaaagtggttaaccgttacttggaaatatatctccgctattttctgggggtgaagcctaccaagtgggttaagtggttggcatgggcgaaatattggtacaataatcctaccacgtttcagcaacaccattcaaagctaaatacaatcgaggtcccccgccacttattcgctttgaaccagccaataccaaagtgttgaaaggggatcagcaactccaagctcgtgatgccattctagtgttgctaaaagaaaacctccaacacgtccaacaaaaaataaaatctcaggcagacaagaagcaccgagatgtgcactttgaggttagtgatttggtctatgtcaaactcaggtcatattgtcaacttatggtggctaagcgcttgaatgagaagcttgccccacactttttggtccttttccaggggtaacacgcatcgatccagcggcctatcgcttacatctcccttctgacgcaaccattaaccaagtgttccatgtttctctccttcgagcagccttgggtcctcatcaacaaccaacaacccctcctccaggtcttactgctaacatggaatggttacttgaacctgaagaaagtgttggacatttgcccaggcacacataaatcggctcctctagctctgatcaagtgggctaacctccctgtgtttgaagctacttgggaagatttttttgtcatccaagaccaatttccacatttttaccttgaggacaaggtgagattttagggggggggagggtattgatagaccacctcttacatttgtgtattctcgaaggtctaggaaaggggttgtgggcaatgttgtaagagattagtgctgaggtgttttctctgtgcgggattgtgataataaaagctagcaagttagtcgttagtgggtgttgaccgaggttttcggcaactaataaaatattataagtttatagagctgtaagaaaatcagagaaggattttttacgtggttggg

SEQ ID NO: 295280 - DNA, 5324 bp, Cannabis indica
ttttataaaaagatggaaaaagttacctcaaatatattaatgtatgcgttgaagaaggttggcaaagctctgcttcctacataagcatctgtctcaacattaagatgctcaaatcgaacttcaattgtgggtagttttattccaactctgaaattgttattttaacataaaaatccaaacatacataaaaatttcataaatattatctattattattattagtattattacctatcaattcgattcttgagtttgagcaaaaacttttgattaccctcatcagcaatggtaaccaacctctcaatcaaactcttcctttgattgagtccaagattatgaatatcaataatctcatgagtggcagcttctcctgtagatgttgttataagtaaaccttttctcaaacgattatatgttggaagcttttcaagtgcaaaccattgaagatcatcttcttcttcttctcttcttgagaaagaaggtaacctttcaaagaccctattgctattgtttctccatgaggaatttctactactagaactcctaatactcatctccattattttctctatacctcttagtgttatgtattcttcaaaatatatagtgtttgaagaaaatcagttatgttatcatattaaaaaaaattctcaatcagtgtcattattaatttagagaatatacataggaggattttatgagattaagatctcatgatttattccagttctatacctgataattgataagattaggagattttttatgtttattttttccaaattaaggaagaatcagagtttgttttgttataggccttgcaagaaaagaaaggtccatttgtaaattttatcatcaaaatattaatcttttcaagattagtaaaaactaatacaatgaatcctgcataatcttgctttatttatttttatttttttttaaaaggatttgtggagcaagaagatctcatctcatccaatttattcatatttgttattttggttatggagaatggatcatcaggccctctgaagatattatgattttgtctgataaggctctctgtttcttaattcatccattcgtacctgctttctttttagttaacataatccttacataattatggattatagcttttctttttctggccaagattatatttttatagctaaaaaatttcaaaaaaagttcacaataaaactcccttaaattctaccttttctgcatttgattttgattttattttttcttgataagatcatgcattaaaagttttcacatagaaaatatgaatttatatttgtcctatttttattacaatatgacactttactttgttacaattgaaacaaacagttggaagtatcatattacaaattcttacttaccaaagagataataataaattacatgttacagctttgctattgcacaaaaaaaaaatagtaatattaataaaatatactgttaaaaaaaaaaaaaaccaagagctaaaacaaatatacagacaaaaccagaacaaattaattaattgtctatcgcttttggaaattgagggccttaacagcaaaggcaaagatgattccgaagaacaatgcaaatgcaacattgacaactgcaacgactcccaagtaatcatgtttgaacccgtaaaatcgtctcagaaactgttgtaccgtctcgcctgtttcctggttaagaacttcggtaacatctccatattgtgaagccaccaatccatacaaagtccatgcaaccgggcaagcatagtaataccatctccaccatattggcatcctctgttgttttcgagaacaaacaaacaaaacattactaactttagacattaaggaaaaactattactatagttgtcgagttgagtaaaacttacagtgcgagggacgacgaatccagagaagaggttccatactccgtagaaggcagaggaaacaatggaagcaatgtgatggtttggagtgattgccacagtcatcataccatagaaagtgaagtagagcatagcaaagaatgtataaaacagataccaaaagaattttgcagcagtccattcgaagttaatcatcgagtatactatgaggcaataaaccaaagcttgacacaaaatgtatggaatctcaaccacagcctgcgttttccaagtacataatgtcaaatacatacatatatttatctaggtttgtatacaaataaatagtgtttgatttgagaatattaaatgtttacctgtccaaatgtgtagggaaaagcagaatacattcctgcagctttttctctgtaaaagactgttctttctatggaaactaccggctgtacagatgaagcgttttggaccccgatgaagaagactgcagcatacattgatcccattgcattgatgagatcttgttgttttgacctgcaattttgttaaatgttcatatcagatgaggaaggcaaaggaaagtaaaggattatatatagagttcaatggggattgtataacttacctcttagatcctaagtcccagaacattgtcccaaatgtcaaggctatgaaagtggtgaaaataaatctcacggcagtataaggcgggtttctccagtacgacagccgttgtttccataagcaagccatacactgagtgacaaatgagcgagagtattgagtagggaagtaaagatccttagaaccaggagcaggggtgcttagctctttaataagttgtttgtttctcctgttgattcaaaaaaatagtttagtatttctctccttaataatgtatagaggtacaataaaaggtctgaataatctaaccaacctgtataattcagaacccttgtaaactttagtaaaatcaactcccaaagatatttcttgggccgaactcgaaacctccaacatccaagttgcaggattataaccatctctgattttgctgacaccttcaatagccttgataaacaccacatatgtaccaaattagcaatgaaggaaaagagatgcattatcttgtataagactcaaagcaaatttaagttgaaataacacaagaatctggtctagttgtacctcaaaatagttgatcagatggcaagaatgtcgacctaatggccccacgtatatctcttctcctcctcttttcataaggaatagctacaagtacaacaaaatatgtttcatttagttatgcaaaaaggaaaagattcaatatgaactctgacatcattgggaatccttgtttaagaaattacctcatcgaaggcttcaaagatgtcaatacttggttgatgaattgtgcacacaacagttctgccagtgtctactgtgttcctaactgttctcataacaattgcagcagctctggcatctagccctgatgttggttcatccatgaatattatagaaggatttgccaccaactcaaccgcaatagtcaacctttttcgctgctcggttgagagaccattcactccaggcaatccaactagtgcttgtctcagtgaagtaagttccacaagctccatcacttcctcaataaacatctgtccaatagcataaaagtttgtcaactcaagttcttgttcattatttaataactaagaaaaaatgaattgaaccaaaaggtgacacattcaagttcatcaaattataacataagctatttacgaaactaacccttctcttttcagaatcaacttctgctggtaaacgaagccatgctgagtagagcaatgactcgtaaatggtaacatgaggtgaatggatgtcattttgctcacaatatccagaaattcttgcaaatgtttcttgcttcttagggtagccagaaattctaacatcgccctcaatatatccaccggtttttctaccggcaagcacatccatcaaagtggtcttaccagctccactaactcccatcagtgctgtcaacacaccaggcctaaaactaccactaacaccctttaatagaaccaatttatcctcaaccacaccttggctcttcatttcctgcaggttcacattcagattgcaaagtttcgttattttaagatcaaactccatttttaaactcactaataaaattactttgttaatgactcttacctgtggcatgtctactgagtagattacatcatcaaaacaaatagaatgtggctcaaatggaaggatcattccttttttggcattgatactttcatcgacggtctgagagtgatggcttgagctatttgctctttggttcatttcaatggcacccctggctctactatcttgaacatcattctcagaatcatctgatttaacactttttgcattttctagtgctgcacacatgaattttatgagattagtttgctaacagaaatccttttggagattttctttagtaaatccaaaaaagaatactcacggttaaggaaagtaagagccagcatgtacaaaaggtttagcaaaataatgaaaccagtcaaccccgccaaaccaatccaataccagtatgcttcagtaaagaaacctcgcgattttaagacttcaacaccaagagattcggttgagcctggtaacacctatcaagagcaataggtacaacacaaaacaaataagatgatggtttcacaaagcaaaagtataaagcttacaaaccaataagttacaagaaacttacacgtctccatttttccccaaggaattcattaactaaaactgcagtctgaccgtacattagaggtgacacccaataaccccaaatccaccaactcttgatatcatctgttggcataataaatcatatcagacaaataaaaagaagcattgccatcaatcaaaatgcattattgaggggaaaatggtctcttgaaataaatagtatagattcagtccactgtacctctagacaacacaaaaccacccagtgtgaagagcaagagcaacacaaatgacccaaatgtgttggctatgatcatgttcctacccgtagctgcagtagctcggaacaatgctgaggccatctgattaacaaatatcagtgcaagatattgccgaaacaacctgaaataatgcacaaaaaccaagtgttcagaagaaaattaaaccacgaaaaccccaattattccagtctttgatttttctttttcttgtgtaccttccaacacttgggtctaatccaattgaataatatgtaatggctacccaaactgctacttctagaaaagctatagggatcttcagaatccaagatggaagagcatatgcccaagcagggtagaactggaggtccctttgcttgtaaaacactggaagcttggcaatggtcatagg

SEQ ID NO: 295281 - DNA, 3939 bp, Cannabis indica
aaaaaaaaaaaagaggaagtagatgaacagatgaagaagaagagcaaaatgaaaatgatgaagaaagggaaattcaaaaaatattgatattaacgagggagtgggatagtgtgtgataactgacaatagaagtgattgaaaattggaagtttggagggaaacgtgtgggcagttgggtgatgtaagcaaaaccgtatatgatgtaaaaagttttaaagaaatcgtataaatgtttaaacaaaatggtaaaattgaaaatgaaactatggaaccgtataattgtttaaaaacagaaaaaatggcattttatgtaaaaattcctacaaaaaatatattgaaaagttgatattgttttgcttattgcaattaggtaaatattttgttattttttaagcgactaagactagcttagtggtgagggagggatgggaaaagggagaggtcattggttcaaactcaggacctttaagctataagctattaattgattgcaaaaatatcattacgatatacttaaaaaaaatattttgtttttttttctgttaatttttagtatttttttgttgttttatagttgttttcatattatttgttaagttattctaaagttttttgagctgtttgttttattttactgaaacgaaatatttttataattttgaaactttaatacaaatatttgtaaatataatacagtaaaactgtaaaaatctccgtgtcccaatattttataaactttccctattttccagtattttttttaagttcctctttatttttacctttagcccataaaaataccaaaaaaggccgtaaggagcagggaagtttaggattgaaatgtggccctttaatccctctcagactcggaacaaggcgaagcaatttattttttaattttaggggagagaatagaaacttgggttggcgtattgtgaaaaatgcatggtgttggtcttcatgaaagttgaatgaaccctagtttttgttttactttaaacttacttaaaagagacaatttacagctcatctgtggtgtcgtggtgtagttggttatcacgtcagtctaacacactgaaggtctccggttcgagtccgggcgacgccacttaattttcttttttgttttttactcacaaaaaaagctcaaatatataaacaaactaaaacttatataaacatgtacatcactagtgttcaggatcagaagtcttgcaaactataaattcaagtttgaataatggaaaaagaacgctataaaataaatgaattctttacaaatgagggaaaaccaaaaaggaaaaaaaagaaaaaaagtcttttctcttaaattaattaatttcatcacaatcccatttcgaggtgggaacacaactgaggtagtgacaccaatgacaatgatggttcccattttctccacgaaagagcataaccaatgcaacaacaaacctgcaatgatcatcacaacagaagtttgtaaagcctcccttttgttatgtcaagaattaatgacatgttgactgtaaaaaaccaaaaaaaaacttaccccgcaatcaggattacaagtgaaatgagccataaaacatattggtaaggcttgtatttggatctgacaataggaatagtactcgtaggaacacttcgttgctccaaccatccaaactgaggacgaggcagcagaacaaaaccaagtagaaacccagtcaaaaaaccacctatgtgtgcgaaattatcgacacgaggcaaaattccaagcccaagattgatgacaatgatgatcaaaagagtaagcagtgctgcagcctatgcaagtgaacatatgaatactttatttattaatcgtctttgtcataacaaaaaatgtaatttacttaatagtatatactatagattagatcaaatgagttgttcaccttgttagtgtaaatagtccaatttgtgagaagttcagacaacattgctccaagaagtccaaaaagagcaccagaggcacccacagaaatattattttgaataaatagtgcagaaagtatgctccctccaaagcctgaaaagaggtatataattccaattcgtactgcaaaagtttcaacaaagcgaatcagaaaatatgtgcacgactttgaatacaatttcaagcttatgtgaaactatctttggagtttagaattgaagaaaacaaagagagagcataccaaagccgaattgctgctctaagcgaattccgataaataccaaactgagcatgttcacaagcagatgaatgacaccagcgtgtagccatatacaagtgacaagcctccatccttgatgcatgtgaaccactttattccactcaagagctcctaacttcttcaatcttcaaaagtttgaaaatcattcagttatatcaaacatctatattttgttgatgtgttattaacttattattattgaattcaaaatgattcacaaatataagctgtatcagcaaacttaaaacaataccacaaattaacttcaaataacataaataatagactgaaatcagaactgaaaatcagagatgggacattaaaagaaactattcagaaagaaaaaaaaatgttgatcaaacagacccaaatagaaataagaagctagttatcttagcaaagaacaatctgactagttcttttcagaaatttgaagcaagcgttcaaaattagaaaacatgaaattaggttctttctttaacaagactttaaactatgctcctaattaaaacaagagacatagcaaagaaaaatcaaattacgaacactaccaaaccaattatgaacaatatgtagggttgattaatatttagataagaggtgtcaactaaaacatacagtaaacaatatgaagttaaattttttctttttttgaaggaaaaacaatataaagtaattaccaagcaatcaaatccccaacataataccatgaataacaatgaaaaagaaaaaagaaaaaagccatatataatttcaaattacgttgaagaagaagcgccaaagagaggattctctttcaaaggctggaatgagaagcgcccaagaaacctggctacacagttgccctgaaaccctgaattatttttaggacaatcgttgacgtacatgaccacaataaacatggcgatattgattaccacaaatatgggcaccaaccatgatgtccattgggtctctgattcttgtattggatatgaagatgctgttgttgagtaaccattattactacctcttcttttatctcctctgttttctggatcttcagtggccattctctctctctctctctgattgtaattaatggatggggttggtgaaggaaggttttaatggaggatggaagaaagagacggtgagctttttcggggttctaactgcccacccccacagtgagcttgagaagtgtttcttaaaagtatgatcaaaaataaaaaagaaaatacaagccctttataatataaaataaaataaaaataaaaagccaatagtattttaccacgtgtacagcaacgtaataggttacgtgctgatgtggtggtatattgttgggttgtgacagtgttggtcgtgaaaaggctgtgaggttaaggaaagatatactccgtgtgggacgtggatgatctgttctgttgttttctctagttcccacgaactgaagtgaccgtttcttcatttttttttaactatctcacattaaataaataatatatataaataaatgaaatgaaaatatctaatttattggagaagttgttaataaatacttaatattttttttagaaaataaatacccaatatttaaaaatgatagcaaaaatacttaaatttctaatttttgaaatatcattagaacatctcaaattaaggtggtacattggtcggtttgagcggcttttccatatattttctaacacaatctaaagtt

SEQ ID NO: 295282 - DNA, 3912 bp, Cannabis indica
attatcaaaataatggtttaaacccatccataccctacaaagtaaatatataaattataatcaaaatttacaaatagctaaatgtgccgagaagtcagaaactttgtaaagcaatcttttaataagggttagtgaaataaacctatgtgaaggaacttctgtagatgtgtagtgttggaggcggaaccatgaaatgatggtttgtaaagatcgataagcgcaaccccaaccctagaaagtgaaaattatatcagttggcaataataattgagggtccaaatatggaaatacaaatagaggattttgttaaaaattgcattttaaaatgctaaacttcttaagacagaactatgtagatactgcaaacttttaaggagacttccattaccgaatcattaaagccatcatgcatataatggtaatattcgtaagaaccttgaacaagagataaagtgcctcctgaaactgcataaggataacacgatgcaatgaaaatttcattcatgacaacagtgtaaacagagtacaagaagttaaaagttgtcacctaccaccactacttggaattccaatatgtacatccttcagcaaagtagaacctgataccaccacaagtatgtaaataatttttctcaaatggaaaaaataaaggatgttttaaagccttatgatgaatgtttgcctacttaaaaagaatggttacctttctttattgagtcactctttagaccatgagatgtaaaaaagttcagagcattagcagctcttaggaggggacgatcaagaggtaaacccagcctcaagtgtagggctttcctaacttcaactgtagtgcaaaaaaaaataaaaaatttacaaggacccctatcagcacaatatgctgatggatgcaaggccaaccaacgagcacaagattcctctctggaattttctcaataatttgaagggaaaaaaacaccacacacaaaccctgtttgaagtttgaacaaagtatctgtttggtttgtgaatatgtaaggataaattatctatatcagtgtatagaggtgaacttcaacactcttaagaagttaccacggcttaccttgcttcatttctgtctcaccatagttaagttcatagataacatttactggatgaagaagccccggaggattaaagtggtaagaatgcaactgaaaaagaacaaaacctggttctcagtagaatataaagccccacaaattttaaaactacgtccaccttaccttgtcgcccgcataatataacaggcaataaaacaaggaagacagaaagaaaaaggagtaaaatgatggtattatcaaacatgtgtttcttactatcagatagaatggctatcacatacttgacgaatttgaggtggagaaaagatttgcctacctgaggatgcttggctaggagatcgggcaaaatagtattcttcattgaattaaattgatcaattaaccctggaactattaacttcgaaactgcagacacaagtggaagatccttggccgcataactgagcacttcaagcttaaattccacaaccaaaagtctggtttcttcaattgctgaaacgcacactaacttccattaaactgagttaacagcagttgatctacagtaaatattttagtttcagtattaattaaagaaattgtgacattgtctaattgatacctggaacatactgtgcaagcggtgcagctactgttggagtattttctgagctgttaacaagaatgcttacttggattttatctgcattctaagcagaaaaatctataaatggaagttgaagaccaaattaatatcaattttttgcatcagaaaacattttaaagtaaatgaaagcaatgtaccatccaaacaccaaaggataatccaacattcttacctcagtagaatacactgaagagtcagatttattattcaaacagaactgcgaacatgttatcaactttgcatcagaatcttgagcaccttccctgaaatttgagatgtctgtactaaagtccaactgtccaccacgcagaatgacaggttgaggtatttcaccggaaatttgtgctgttgtttctacaatgtatgcaatctttgggtcctttaatttggctataacaccttcagttgcacgctggaataccttcttcacatctggaacatataagataactcatatttaatgcactgcatgatcctttacttctaacaagtgcctcttcacaagatctatccccaaatgcaattgtgaccataagtagataaaatgttaagaacagcataaatctaagacttaacaaaataatctgggacataattgaaaagcaacattctatggcagtgttaaatccagactcctgatgagaagaagttagctacaccaatccttttgcattcatacgatccatagaggagggtcgaatccttatctcgagccactaagtttgaaagggctttcttttgtccttgtgtccaaaccactcacagctaaacattaataataaaattttcaagcaataagagcccttagaacctctaacttgttgttcatttcttcttcttccagaaattaaatagttcaaactcaaatgatgatctcaggccgttatacagtcgttacatttgcaagaaggtagtataaatataaaacacatatatgttcttatatcatacagaaaaatactatccaacttgagcttgataaattcgcaattgatccaataggaaaaaagtgagataagtgtagcaggcctttcgattagcaacaatgaaataactgacacagtaagaatctcacatgtgaatcctctgttttatcccattctcgctatatagcactaaactacgaaacttaaagttcaaataaacacaaattcaataaaattctcaaaactaatagaaaaaactttaatgaagcttaccagaagagttgtgtacaggatagtagagtggcaactgaataggaagttcacagcttagcaagcaacctctctcccaaaaatacttctcaggataatcctcatagaccacagaatcaacacgttcaatccccgttgaattatccgaatttgaagtcaaaaagtgaatttccccagtgtctgaatctgccacaactcccagaacttctttcttgcctaatgctccaacgccataaagaagctttctgagcttgcgagcagaatcaatagcctcggcagcattcgtttcgatatcggaatttttaacaatcaaagctccaacgatatcaaatcctttcagcagcaaggttcgaagatcgtctgctcaaataaattactaaatttacgctcaattaccacatgagtattgaggaagtgaaggagatggagatacctgattcttgattgtaatccggggaagaggaatgatgatcaaagtggatgcatttgacggtggagagtattgtgaggggagggaagaatggggatccgatcagccattgaaggccaggttggttcttatggagaaggagcttagggcataaaactcgaacgcttctgtggtcgtcttggttctccattacagctctctctgctgtcgaagaatcaataaatggagtatttttggagtattaatttcccgaggaagaaaacaaagctgtttttttgaaggaaagaaaacaaagctgttaaaagagagtaaatgctaaaaaaattaggaaaatttacaaaaaaaatactgaaattgggattaatttttacaaaaatactgtgtttttataaaacaccagtaaaacacaaagcataacaactcaaaacaacaacagaacaactaaaaaaaatactagtagaacatcacttaacatagaatcctgcagtatgaaactcataaaaaaatatagtaaaaaaataaaaaatattgtctgacattatttttgtaaaaaaa

SEQ ID NO: 295283 - DNA, 1978 bp, Cannabis indica
agaaaacaagtcttatctaaacgaaaagctccacaactatggagatgaacactaccagagaagcaaaacataacagttagcttcagctatttcagttcataatttatttacagtctatcatacactgttctacaagtgcttgctgaggatggattcgacaacaccttgtgcaataggatgataacaatcgcgagcctctgcaaacacccttttcgcgaaaatcttctcttcttccttcccgttcccttgaacgagcgcagtgtagagtggacgaaggtatttcatcctcccaacttctttgagagttttctccacctcgccgtagtagtctctgcacttggcggtaatggctagctgcagaaaccccaccttcacctcgtaatcttttgattctgagagcctgtagcgctggtccaaagctatgatctgcaaatccaaaccaattagaatgataagctaaccgaaaaggataatcaggtcagtaaaaggcaaagaagaaatgatacagtacctgtgaagcttcaacagattttggcaagttttccaagtatagctcccactcttgtcctcgccaatcagcaacttcatcctccctcggcatcctaccaaggttgaattcgttcgcaagagtgacaatctgtgtgtataagctggataccggttcatatgcatctggtgggatacctgtaccctctgtccacaaaactaagtcaacatctttctctatgctggggatgttagctttcagaaagtcaaggaaggtatcggtatcaatcgactggaacttgaacgttgcaatatatttcttcagaaactcatcgaatgcaggccttccaacctgagacaaatccaatacagaattaggtacattcattggcattattgtgtgtatctaaaatgaatgaaaacattaccaacacaaacatacctggcgttcgattcgccatagaaactgaaaacctttctcgtatggaacctgagaatacacatcatcagggtcaactccttcttgattcattttaagctttgtaaactccatgttgtccttgaatctctccatttcctcattcaaacccctccagccaattccaatattcagaacagctttctcttctccttgaacaacctccacaattctcctctcagcataagttgtaaaacccttaaaaacaataaataaaacttatcaaaacccacttgcatttgcagcaaagaaaatagatatcgaaaaccactcacaccatatgcaatatgcatacaatttatgctaattctcactcatgactcgtcccattcgatacaacatacatttttctagtcttcctagccataacatgagagatagcatcatatagcatgagctcctcactacataacctgcaaatcaagcttcataattccgaaaaagaaacatatatctgtcagtcaaaaaccccatgtatgtttttaggttcaacaacttcagttcaatagtacaaagaatttgatttagattcaaactgatcaatcaattccttcaccactaaatttgtaaatgcaaacagtgtttcatataatccataaaccaaaataacctgcaatgcaagcttcatcatttagccaactttcccactacataactatgcaagaaaagcatacatcaacaaaaaaaagtttgtgtaaattgaaatcgaatatgtcaaaaacatttgaagaaacatcaacccaatgaccttttcaatcaaattcttcagtaccacaaagatttttctctagattcaaactgaatatgtcaaaaacgttcggataacaattaaacccaacaaaacccctttcaatcaattcttccattccatgctttcaccaccaaatttgaaaattacaaaacagtgtctcatataaaaagcataaaccaaaaaacaacctgcatgcaattcaagcttcatcatttagtcaacttttccatgtacataatgggaaaaattggattcaattgtca

SEQ ID NO: 295284 - DNA, 1191 bp, Cannabis indica
gttaattattcttataaaaaacatgaaggtatgtacaaaataagaaactagctaatttgtgattcacatcatacaaaacaaaaatgatagatattttagggtaaatactattttggatcttgtattttgcaaaagttattaattggaatttttgttttgttaaatgataaaatagacaatgtattttccaaaatagtataaataggactctggactgattttatgtcaaaataaaatttaataataatctgatctaaagttgttatgacaaaactatttacattttctgtaactgttcgtgtttggaattgttttcaagttggttatattaaataaaattgtcaaaaattaagcctagtgtcttatttttactattttggaaaatacaaaattcgttttattatttaacaaaacagaaagtacaatcaataatttttgcaaaacacataatctaaaataatattaacccatatttttctgttaatttgactgaaatcgataagaggtgaaagaatgatggctattttcatataaaagtaatctctttttggtcaaaaccaaagaaaataccatgtatgtttcaaaattgcggacaaagcaacatacaccataaaattacatttttttttttgctgataaaaattttcaccataaaattgcacttaaaagcttatttttttatatacaaatttaataaatataccccaaaatagtaaaaagactctcatagatatttctataataattaaattatcataaaattaaataaatttagtatgagtaatgataatttttgtttaaaatataagaacaaatactttttgtaacaattaagctctagtttaaaataaaaaatttaggctcgctattaattacaataatctataaaagaaattagagtttaatgtagagttcaaaatgattgttagtagagccctaattagaaggaggtgcttttacttggccaaatgggacaagtaaactcttgtaagtaaaaaacgagaaatctatttttacaaataaagagtaagaaaacatattcatgtaagcataataatatataggcagccgattttgtgcccatatatgcaaaacacggattggaatccgttgtacggcagcggggccccaccgtacttttaaatgttttttaatttttgaaatgtaagtggtaaccggttgttgtaggtg

SEQ ID NO: 295285 - DNA, 2648 bp, Cannabis indica
aaaaaaaaatataagagattttgctagcgttattttggaatgctatatcaactcgaatgtgcaagttttgtataatatattattttattgtcaaaattattgtattttttttttgaaatcaaagttcattagttagaaagaagattacaaaggatttggcgagtccgttgaatagcatgactcacacaagggggttaaaacttgattagctaatacatgtgctaccctactagcttttctaaaaataaaagaaattcgaacaacatttatatttaataataaactcttaatatgcacaagtatattatcgacattcctatagctgtgtttttttttttgaatcaattggacaacttttaggcactcagattctatgctaaacctttgtaaacgtatctgaataccaaactgcaacccaatctaaacagccataagttcctactataatgggttgtagtcttgttggagagcagtggttaccgcaaacaccacatggccatcttaatttctagccacacaattgattcccgagcatctccttccctaccgcacactcgcatcaatattcagcttcaacattccttcaacaggtggatcccagcgagcatcttgtctttgatttcctttttgtttcatccctgtggattcttgatattccatgagaaattggtaacaccattcaacaatctcagtcggctttggaggaaccatgagaaattgctttgtattatgacagtacaataaataatttaaattcatcttgctgccatgtccttgataatctcattaagaattctaatacatctttaccaccacgccttttcacttgttgcggtcagttacataacttccataccaatttggttgagttgcactcccataaagcatgaaaaattgtctccttagcacctgtagagcatctactgcatgttgtatccacttgaagttttctagaggctaagactgattgagcaggcaaccatgaatgtgccatcttcttagcaaaatgttttactttcgaaggaattttaagcttccataattttctccatcatgccaccaattgattatcatctgattggtgtttctctcaccttagctcagctgccatttgatacccacttttcacttaatagtctctatttttgttatagtgccaaagaattttatcttctaactcccacccccacatggtatcttgagaatcatatcaatgtcatcatcattaaaattagcacgtataaaatcttcatcccacattccatttcgtaacttaagatcaaccacaaaaagctcccccaataaatttggcctatcgaaaatcttaaaagtaataggtcgaggaagccatggatattgaagaatcttcacactattgccattctctattcgccatctataaccgtttaaaatgactttctttccccaaactaagcttctccaaacaaaagaagcatgatttccacatttagcatgcaatacactcccatcgcaaaataacttacttgcaacactttagtactcaacgaagaagggtgtctaatacatcgccagctttgttttgctaagagcgcctgatcaaacgaggttaaatattctcgaaagcccaacccacctttttgcaccagtgtatcttatcatttttctttgaagagccccaccaaaaccttgttcccattttagactactaatagtactctttgacatacgaaaacaactcatcgtatatgtgggaattgcttgaatgatagcctttataagaatctctttcccaaccacagaaaacaaggagtttttccatcctcgtagttttgcccataccttatttttaatgacatcaaaaagtttcattttatttctaccaacaaaggagggcaggccaaggtacttaccatggtttgcaacaagttgaacacatatcaagtcaaccaacttttgtttggtatcatcttctatcaaacttgcgaagcaaatctcaaatttatgaaaatatataatttgatccgaagcaactgtatattttctcaaaagttcctaaaatcggtggcagtcctctctagtagcatcaaagaaaatcaaactatcatctgcaaatgaaaggtgagacacattaacacctcgcctaccaaaccgaataccccagagagttcccataacttcttcattctgaatcaaactagagaaagctttcgcacaaaatagaaataggaaaggggataggggataggggataggggataggggatccccttgcctcaaaccccgctgtggaacaactaccccttgaacttccccattaatcataaatgaaaaaccatcagatgtgacacatctcatgattttgtccacccattcaacctgatatctcagccgcaacatcatagccccaatgaagcaccactccactattggaatatatttgaccaggatgtagatttactaacaagtatgtttttaacttcctaatatgaatttgtaaaacgatgaaaataaacacataaaaggtatgagaaaccttacagtggttgtagcggaatgaaatgactccttccgctcagatctctaacccttgtatcctttttgtagtatagtatcaccaagatctgagccaaattctctttcttgttgtttggattcttcacagtctt

SEQ ID NO: 295286 - DNA, 4828 bp, Cannabis indica
ttagttgagaaccaatttgatagaaagatcaaggctattaaaatcgattggggtggggagttccaatcctttgctatgtgtatcatagaaaatggagtagaatttgcatacccttgtcctcacacatctgcccaaaatggaagagccgagagaaaatataggcatattgtcaagatgggcttgaccctctttgctcaagctcatatgcctctcaaatatttgtgagagtctttccaaatagttgtttagcttattaacagactcccaacgcctattttgaaagacaaatcaccttatgaaatcatctatggtaagaaacctgattataagtttcttaaaacttttagagtaacatgctttcctttccttagaccctatcaaacacataaattccaatttcattctaccaagtgtgttactttaggatatagtgatgcacataaatgatataggtatctcagctctatagggaggttatacatctctcgaaatgtcatcttcaatgaagatgattttcctttcctaactggttttttgaacacttattagcctgtgcaatctgtaaatgtgcaggttccttcttggtctaccttgtttcaatctatcaggtctcatacacaaaatcaacacaatccatctactcaagttcttggagaagacaccccaaaacattccttcatgcaagttctgaaccaggaaactaaaaacatggttgttgaaaacaaccctccatcttgttctcatcagtcaaatatggttgatgatcctagtttggaacaaagtcctagtcccctaagtaatgtgggttctaaaatctctgctcatagaaatctcaatgaatcccctcaaccagcagcacccttagcaccatctcatcctatggtgataaaagccaagacaagaatttttttaaccaaaagtttatttgggggaatctcaatggcaatgggacaatgaagagcctagttcagttgaagaagctatctgtgacaaaggttggaatgctgctatgggagaggagatgatagctttgaagaaaaatagaacatggattctggttcccaaaactgctggcatgaacgttattggcaacaaatggattttcaagaagaaatagaatgctgacagcacatttcaaagatacaaaactcgtctagttgctaaaggcttcaatcaaagaactggtattgattttggggacacctatagccttattttaaaggcttccacagttcgaattatcctcacaattgttgtagctaagtcatgggagatttgacaactcgacatcaacaatgctttccttaatgggaacttagaagaggatgtttatatgtataaaccttaaggctttgaagatccaaatcaaccagatgttgtatgcaagttaaccaagtcattatatggcttaaaacaagcacctcgtgcctgctttgatagacttaaagcaactttgatcagctagaattttgtgaactcaaaggcatactcttctctcttcttctataaaatagttggttcaattattctagagttgatatatgtggatgatataataattacaggaaaccacattggcaaactgaatgaattcatccacaaactcaacaccatgtttgctctaaaagacttgggacctctacagtttttcttaggaattgaagtccattgtgttaaaacagggttcttcctaaattagggaaaatatgtcaaagaattacttactagaagtggtatgatgcatctaaaaccatgctctaatcctatggcaactgggaaaaatatgtccaaaacagattgtgaatttcttgcaaatctcacagattacaggagcatcatagggggggttacaatacctcactcacacaaggccagacttgtctttttctatcaataaactgagccagtttctataggctcctacaacggcacattggagcacaacaaaaagagtattaaggtatctaaagggtactgcttaccatggtcttcatattaagcattcgaatagactagacatcataggtttttagacgcagactaggcttgttgccctgatgatagaagaagtgttgctggttattgtgtttactttggagatactttagtatcttggtctttcaagaaacaaactgtggtgccaagatccagtacgaaatctgagtatcgtgctcttgcacaagttgttgctaaaatctcttggattaaaagtctcttaaaggaattcaattttcctctcgaacacactctggtcacttagtgtgataatatgggggctagtgcacttgccatgaatcctgtctatcatcctcgcacaaagcatattgaactgaatgttcattttgtgagggataaggtcatcaacaaaacacttaaaatcatatatgttcctttaagtgatcaaattgatgattgtctaaccaaaagtttaactaatcatagatttcattggtggacaaacttggtgtagttgagacaccaccaagtttgagaggggttgtgaagaaatgattttctctctgcatttggttagatataatgaggtggcataccaacctttggtggtccccaaattgtttaacaaactttgtccttttttgtaccgttaggatattctttttgctatgtaaaagatttgattaatttataatgattgtacattgtattctgttgtaatcattggtctataaatacaattggctagcctcatgttcaaatgagttgagctttttattttttctatttgttatttttctaagtgcacatcacaccaataaactagctcagattggttgaacggatggtagcggcgtgtgtgtgcggtgttcaggtgagcatttatgtgactcttccctcttttacaaaagtgcataccctttgtagcccaacccaattgaccacgtctatcatttctatacacttgcaaacatgtgtcccaaagtaatgtgggactaatcttctaaggacctcaaattgtatattttctttttgttttttaacaattcacacaaaatgttccaagagattgtgcccctatttatatattgcttgtaattaataccttataacatttatagtacttatgtcttgcatagaagagataaggggaggtgagcaacctgacaaagctacaaggtacagacaaagttctggccaattgtacccaagggtacttgccagataaattacattgtacaaggctaggaatcagcaaagtaccgtctcaagtatatctaattagacaaatggtgagtcctaagatgtgtatatatggactcactaccaagtcttatacagagtttccaagggaaccacatatgagattacaattgtagtacaaggtcgtcaggaaccccttcatgaggtcaaaagaggataagaacttggctacctgcttgaaaccttggccttggccggccaaggttctcaagctaagagagggtcggccaggtctcatgacctaaccaagggccagcaaggttttctatgcccaagcatgggcgagccagcttttggggtaccccctatggctggccagctcccatgagaaagaccctaggttggccaggtcttgaacaagacccctatggccgaccatggtgcatatcggatctaagtgtgtgttttttcaagaactcaaacaagttcttcatgttctttgtgactcaaagagtcaagaatcacaacgaagatcaaaatctaatcttttttgtcaagaaatcaaacattatatatccaaggactatccttcaaatcaaaataccaaaaagattacaatctttcgtgggaataaaaaaaaatattcaaagtgaataaaagcttcatgctaccatggaataatgaactaaaataagtgaatagcaggattagaaagcttacccactacaagaaacctttggcgaagaggatgggaagcttggatcgttaaaatggcgcaaaaatcccaggagttgaagcaatgtgggtatcgacctctagagagaaggaggagctttccaaagttgctttcctagagagagaatgaaaagtgactagtgaagagtagtttccctcccataagcttatatagcttctgtgggacttcttctttacttaccatgcagtacacaactaaaaagcatgcagagagcaatacagtcaacttactgcacaaagtgtgattagacagtcaagagcaaacatttcaaaggctaaatacgctggaatatttactcagctaacgctacaccagtcccaactaagctggaaagtccctatttgcacagacatcaacatagggactttgggggaaattatcatcccaatttttgcccatttgacgtggcatgtctacgtggccaacattagtatcgtgtggcaatacaattcaccaacaagaaggccaagccatctactgagcacttgaaccaacaagaagtccaaatactcaagcgggacggtgaaatgacaaccaaccacctcaagggggttggttagccacccctagccagccctatggcctgcataggccagccaggttttggatatcccatggccagctagcatgcatcctgcaggtgcatggctgatcagcttttggcctggcaggattttggtgcgcacctttcatacgtcgacaacaagctagatcacaaattgggccttaacaacccatgagtatagagggaaaatatctatttttgaggggcattttagtcatttgtgttttattaatttaatatgtaaataatagcttattttacctatttctaagggatttgaagggtgtagctctcctatataaagaacctttgtaatgaccgctttagtaatttggattagtaaaggc

SEQ ID NO: 295287 - DNA, 3645 bp, Cannabis indica
gtttttgtgaaaattgttgttgattctcttcagtattgagaaaacttgagttaaagcgtcgttcttttcttcctttcatagattttgcgccctgtattaacttatgcctttgtttaatttccatttcacaggtacattttcaagagatttgaaagcttttttctttgaaggaatctgaacaagtgttaatcatcgttctggacccaagtgattcggtctccgaattgggacaatcttctcgagctcttcggagaagttgttgtctgaattgaggatgaaggtagcggcggcggcgcccaaatctgagtaacagaggtaagaaatccatgctctgagtcatagatcagagaaaatgggatttcgctcttctctttttctatgctttgttacagaaatggaaagctctaactctttgatttggtttcttctttttctacagaaataatcttcttaactggattttggtttcggtctttttcggatacataaaatttacaatatcatctggaatttcaggtaatgccatggcttcttcttcttactgtattctaattctcagctcctctctttctttgtctctgtggaatggggttattgtctattgatcctttcttctacttttaggttccaatctaatcttttcccacttcttcatttcaccccttttcgttttgccccctttgattcgttgttctcgatttcctgcaacgaaagccgaagcctttttctcttcagaattttcttttaccgtaatatgttaccatttgtttctctttctgttttgttttttgtttttggggggggggttgattgtagatgaaatatgttagttagtttccgagaaaattaagcaaagaaagaaaacaaaagtactgaatgttcaatccatgtttgtgtttttttttcttgttgtctccagaattcaagtacagttcgagcaaagctataattagtttgatcagaatttggcggtgtggataataagcgtcttgcttggaaaatagatgagaatcgtagttctgggtacttacttcttcttcacaacattttctcaccacccaaacatcattcacaacttaccctttatcgttttcatccatccgatccacaaaatcttcacttttcgtcatcttcatcatcatacatatacatccgaaatccgaaatccgaaatccaaattcgaaattgagttttgggtcaacttgtttttgtttttgtatttttttggtgggttagtgggagaaattattggttaaataataaaaattgggtatttgtttggttggtttgttggttggtacaggtgtacaaaagcaaatggacaaagactccactagacaccacaaccattctcataataataataatattaataataataatattattagagatagagaaagaatcggagaagatggatcggttctattgagagcgagttcagataatactctcagatcccaaacaacaacttcagcctcagatttcgtattacagtggggaaatcggaaaagactcaggtgtatgaaggtccaggtcaaagacgactctaccaccaccaacaccaccacagccaccgctccggttaatcggaccaccgtaagagtggatcgtagggttgtcagagccgataaggactcctctgcctatttaaatctccgtcacaggccatcttcgccgcctactactcaccggattcttaggtaaaaatcctttcttttttatttgtttcctttgtagaagaaaattgaggggtatttttgtcattttacaaaatgggtttttgtggggtccaaagttattcttaatcttgtaaattttaagattgaattggattttaacatagagatctgtgtttttattttagcacgtgtgtaataaaatgttacagtgtcttttttttttagtaattttggtaataagggaagaaaataatgatttgttgaaactagtgggtattattgaattaaaaaaaaaaaaacaaaagtaggcataaaatttgatgaatgtaaaactatgaaatgaaacatttggtgctttggggttgtggggtgaatttggaaaatatcttaagttttgagatatttgactatttgagtaggtttaaataaataaaaaattaataattgtgtgagaaggattgtaacgactttagattctatttgtagaaaaacagtggttgcttaacctaacctaacctaagtatgtttaaaattgaaaatgtatgtgattgacatttggttgaggtaagaaaaaaaaacaagtggataggataagcataagcatgtttgttgatgtttcagagcagagatagataaggttgcgtacgtagttggacttttatttgttccttcctttgttttgggcctgtctagatgccactctccattgccatagtttgttgactatttttaatttgatttgatgataagaagagagttttggttttggatttggaaaaaacaaaatagtggttgcttttgggccgaaagcttattacttgcacttgatcaggtgaggtgaggtgggtgcagatatatttgatttggtttggctcaaagtgagacctcaggctcaggctcaggctcaggccctcctggtaagctgagttgggctttgggaaaattaggtttcttttttatataagaatgagtgaatgaatttgtaactagcgtgtagaactaggtagagtttagtttcttgtattatgaattaggtgctgtggtagtactagtagtagtgccattttaccttttctcttttcataaagattgaaatttgaatttgatgtttgttttatttctctctatctctttagttgtttaatgataaagcttccatgtttttgttttgtttgttgtctttaataataagtcaaataaaaaagtagagtccactaggaaggagatagagagagagagtttgtttgtgtaattatatatatatacataaatgtgacgtgtaatagaggaaaagcacttgatcacagctcacttgcatctgatccattcattcattataataagtattagtagtagtgagtggtaaacaacacttgtaaacatgtaatggggcaaactctgggttccacgtgtccatcaacccaaaacaacactctttttgtttacaaacccctctgtctatttgaaccgttgattccaaaaccatcatcacatgctcttcttttctctctctctctctcttaatcttcaaaaaggtacactctttaatctatcggttcatagccaccctaaacacccagttgtgcacgttattcacaatcttagccctttctttttctctctctaaaatatactacctttttaattaaagaaaaataaagcaaaagatcacaataataataatagtaaatattggtattaacaaacaactcccatctcttgaaaagcaaaaggtccctcagagaaagccaaaagagaaagagagagagagagaatagtagtgagtcctttcccccattttccacgaaaaacctgtccatacttttctcttctaaataacttgtttcattcacttaccccatccacttcaattcatattatatcccaaaggttaattccgtcatttcagaataaataaaattaacccaacccaattttacatttatttatttctttttttttt

SEQ ID NO: 295288 - DNA, 4122 bp, Cannabis indica
atgtatcactctcaaattgtattttttttagatttaattatcaaacaataaaatataaataaatatttaatttaatagtctagtttacattaaatatttaagtatgttattcatataatttaatcatcacacatcgtctatctatataattttaataataatattgctttcttataattttatacaaaaaaataatagacatattattgtaatattaaatgttgtagatatatgttttaaaaaaaatatatatatatatatatattgtccatataattataactttaatcttttatttatgagaagggtatataaggaaaaataatttttggttggtatggaatgacttttcaagtcattttatttagaaaaagctattccttagtttacatgaattacaattcctattggaatggattttttaatggcaataaacaaaccaaacacttgaatgatctttctttaggaataatactttcattcctatactcattcatgtaaaccaatcactactttatataggctcatatctcattatcttttaattttaattttttaaaatagaccgtcacaataagttaatctcctaaagagcaaataaaactccacctaaaaaaattgtgataggattcgaacctgtaaccaaacaaagaaagatgctaacaaaaacattcttattactacactacacatggtgggaatatactcatttgatacttgataatttgtaattaaatttgagttcaaaatcctattttataccgacttagtataggtgcataattaaaacaaaatgctagtaagcatcatatcactattgacataattaaatatcgaaattcacatactttgagtaccaccttagtgtaatacctagcagactaatgtctaatagcaacactctaattaaaacataaaaaagaaaattattttttatatatatatatatatttttaataaatattatatgtaaaatacataaaattatattttttttcttttaattttcgaaagactaatatatatttttatataatgttcaaaaaaacactataaaaaatttgtaaaaaaaaataaaataaaataggggagccataacaatccatgtcccaaataccttgtccaaaatatccgacaattgttttgagaacacagtttactaaaattttattaatttaaaacataaagtacccaataagtaatgttatccttttcttctttttcatagtataaaaatataaattaataaggatgactcattatattttatttaaggtaaatatgatttgagactttgagttttgttaaagttattaattggatcctctattttattaaatgataaattgaatcctgtattttttaaaataatactaaatagtacacttaactaattttttatcaaaattaaacataataataaggtgatatagaggtgttattacaaaactaattacgttttctatatctgttcatactagaaattgtcttcaagttggttatattaaaaaaaaattgaaaattaagctaaggttatatttgtacaattttagaaaatacatgatctagtttgtcatttaacaaaatagaaagtcgaatcggtattttttgcaaaacacagagtttaaaatgatattaacttttttatttacgataaatttgacggttaaattttcttggtcaaccggggttgtttcagccctaatctatggtggagctgagtagttggaccagtttagtcaggccaacttccaaccatggaaaatcataattattgttataatattttttgtcaaaaagtcatgagttagaaaattcagacatgtgagacgttgaaagttctaatagaacaaatttatgtttgaagctaataatattattaagatgaaacagagacttataatgttggaaaaacacaagtagctaatatttatatatataagtaaataaaactcactcagaactggtctttcaaactatgaaaaatcatgcttgtctgctatgaaggttaattaactaaagccattattatttgactgagaaacttgttaagttatcaaatttaatcagttattcataaatgtcaaacatttttctgagacatatattgttctttatttctttttccgaaaagggtgacatttacattatgtaagaattgtaattagtatatggaagttacaactactaaccacatgtttttgacaaggattttccaagcatattcttttctactttttcataagaagaaccacagtgtgagcagcgatgcttcgattttccccgagactatcgaccttttcgtgagttttcgctttcagattaacaactgcagggtcagctcctagaagttcagacaagttggctctgatagcttccttgtgtggacttaactttggtctttgaagaattaatgttgcatctaaatttccaagctcataacctgcctcatgcatcagtctcacctaaaatatagataaaacatattcaaacatgtttatattgtctctcaactactaatagacagctcagagtgaatggttttcaataattgtgttccattgtttgtgacaaagagacattgttgagaaaaacttcccaagtataattctaaatgataatttcaacaagtgtgtgtgtgtggatgtaaattctacagttaacaattcattattggcttcaaacaaaaagtcagacctaaacagataaataagactttgtcaagggttaatcccaatcccaacagtctcaatcatttgggtttgtgttgaaaattgataaaactaaatatgaaatacttagttaacattatgaaaagagaaagaaaaacatcatttcttgcttagagtttatgttatagacagtggactaggcaaaccgagctttgttgaaccactatatttcctttgtgtcattactttttactttctttttcattgcttattatttgagtattcgtactttaagcgagtaatcgctgttttggtgtgattgttcttgccttgctcgaatactcgcacttttagtgaaagatagaaaaacattatttcttgcttagagtttatgtttgaactgataaaaagcaatatagcataaagtcaattcaatggtaaaaatctgcacatgactgaagatttcataagcacaaaacaattcaatcaagtgtaaaatgcatagaaaaatcaaacaaaattggttgaatgaaacataacaataacaacttacagcttctttgatgaaaactgatgatgcagcccctttccatttgggatcagaatcagggaaaatttgaccaatatcaggaagccccaaagcacccaaaatagcatcaactacacaatgaagcaaaacatcccctacaaacccaaatcaaagaatatatctttaactctcttttcacaaagaaaatctaagaaagttcaagtttttattttctcagcaaccaaacagtataaaatttaagagttcttctacactgcacctcttagtgttaaacttgcaacagactatttgacgagttaaattattttgaatttctataaattataccaaatataagattaaaactatctaattatggaaaacaaagagtcgaaatttctgtaaatttagagcttttactaacttaatccaaaaattaaaagaaacccatttcagatacgaatgattaccatcagaatgagcttcgcaacctttctcatgaggtatattaatacctccaattatcaaaggatacccaggctccaatcgatgaaggtcaaacccatgaccaacccgaaaaggaagagcctttgagggagtagcagatacctcagacggagcttgctcagcgttcaaagcggtggtcgcggcggccgatacagaaggcagagccgaaagcggcgtcgttttcgattgtcttagagatgaaattgaggacgatgagaagagatttctgggaactgcgactgtgaaatgggagtgattgaatgatttgggggaggtattggagtagtgtggtggaagagttgaagcacagagtggtgttgccgtcgccgccgccatggccgtcgaaggtggaggtccgtgggtttgtggtttggctttctcttcttagctatttgttaattttttttttaaaaa

SEQ ID NO: 295289 - DNA, 2804 bp, Cannabis indica
ggcataccatgatgcataacactacataaatagcatatcaataagtgaacttttcatatagtgagaactgaacccagaaggtacagcagcataaagtatacatctaattatttcacaacaagcagaaacgcatgtgtgtagacatacttgagagtgctgggccccaacaccagcagcagccccatttggtcctctgaaaacaataggtacagaaatctggccagcagacatataatttgactttgccgctgaattgataatgtggtcaattgcctgcaaaaacaaccaagtgagatttacaacaactacaacctaaaaagtggagtatgcagaatcatatgaaatttcaaaatacgttcaattctttaaactaccgttcaaaaaaaaagttcattaaaatataatgccttatgccaagccaacctagtgagatacaacaactacaacctaaaaagtagagtacgcagaatcatatgaaatttcaaaatacacgttcaattctttaaactaccattcaaaaaagaagttcattaaaatataggacaatcccttatgccaagccaacctagtcaaccaataggagcaggcaaactataaaacttacgttgacttgttcttcaaaaccaatacaaaccaatagtgaaaaaatttaggagcattaatctcctaactgatcctaaaaatcccattacacagtttttagagggaaaaaattaattaatgaaacaaattcataacattctgtttagtaagatgtataacccaattctagcaagcattaagcatcactacaaaaacaaaaacaaaaaaagggtaaatcaacagaatgagaaaccctgagaagaatcttgcctgcattgagaaattaaacgtcataaactctacaacaggtctaagcccatagtaagcagcaccaactccaattccagtaaacccagcctggaaagcatacagaagaaaatcaggtcatgcaagaagtgcagctactaaaacaagaataatctcccttccttattccagaataaacaagacattcgattaacatagccttgctattattattgttcaaaaacataaacttgttattattgagatgagattcagtgtgagaaagggaaaaacataataacactttgaataataaccacactcaaaaaggtcagcatgtcaaataacaaaacacacctctgtgattggagtatcaagaactctgtcaggaccatacttgtccaaaagacctttagttatctatacaaagcaaaggaaaaagaatcatcaaacaaaagtctttaaagaatatacccaaaaaaaaatcacctcttcaataaataataaaatccaaccttgtatgcgccttggtattccccaacctgcattgacaaaaatatgacagaaaaataagaacagaaagactgaaagagcaaggaatagctgggaaaattatatccaaattttcctacctcttctcccatcaagaagaccttaggatcagcagacatttcctcatcaagtgcagagtttaaagcatctctcactgtcatctgtgcataattattgtttcaagacaagaaaaacaagttcagcatttttaaaaggcataccatgtcattaagcagaaaggtggagaataagaaatataatttgcccatattagatatatatattggattttccattaaaaaaagaaagcaaaaagcataaaaaaaaaaaatgaaatcgtcaatgcagcacctagtctaaacaagcgtatatagaaagaaactctcaacacatgaataagtaagtcactaggcagcttaatattgaattaacacaaaactttgaacatgtatcacaagttccttttggcactatttggcaggtaaaaataacacagacacacacacaaagctcccttcaaatgtaataggcagaggtctgacaatgacattgatactccaaagacaaataaaaaagaacgagattatcataatttacaccaaagaaaaaccctcatcgcacatttgacgtgaacatgtccacataaccattacctctttaacagcggaagaatagttcctcaaagctgatacggcaggacgaatcaactgccgagattgccccaaaatctgaatccacacacacaattgggtcacaccgaaatcacataaacatacagaaaccaactacagtttacgttgatgagaaaaaactaaagttgaataccatagcagatgaggttccagagccaattttttgccttaataaccccaacatctttctttatttcttcacaaaattcctccgatcactgaaaatatgaacaaacaataaaaacttcaactccagattcatttgaaggattaccacttgtgtatttatacctaaatgagataacgaaattaactcaaacaaaaaccaaaagtcccatttcaccatagaagtactcacatcgattacaggggaaagggtatgaaaaactcaagagcagatgcgaaaccagcaatacaaatacatataatacatataatgaataaatatcgattctgaatatataaagccaaaataggaaagaagaataagcgaagaacctgattgaagaattgtcaatccaagggtttggatcagatcggcgagaagaagaaggaggttgatgtagccaccatacactttccacactttggttcactttgcctgcttttattctctctctactatttcttaattctattttgaccatctcattttcctttttttattatttttcttttgagcaattcttattttattttggctattttttccccgaattttgatatgtacta

SEQ ID NO: 295290 - DNA, 1363 bp, Cannabis indica
ctcaaactattagtattctacactataaaaatagtattctaccctcaaactattaattaaccctgtttctgtcatgtatatatatacactataaactagctttctaatttatggattagtcaatatattcggctacactacacatatggtatctaattatgttaatgtgtaaattaatttaaaacagggtctaattataataacttaataattaatagtgttcagtaatataaaagacagatagattaccatccaaaaattacaattgaacaactaaactagcgaaccacgtattttgggtacattttagatagtaataatgatatggatgagataaaaaatatatataggccctctatggagcattggaaagaagaatacatatatagatgcgaatgtgaataagaccaacataacgctatctggtacgactacattaatataggtggtcaaatttgtccgattagtactctggtttagtaatataaaagagatcaaacaatcatcaactgacccatacaagagtcttatgaaaatacttcaaaagggtaacgtaactatctttaccaacttctaaatagaccttccttcatcgtgtgtaaatggtccattggtccatttgcaattgcataatgtgactcatgactatatataacaaaagaatagtaaccagtgatagtgcgaataacgtgtttggccattaatagtaggacagcgctgagtattctattcataaaaatatggtcacatgtagaaatagatccatctttaacactttacgaaaagtcacggaaagtaataaagtggctttatcaatttatttataagtaatctgtcttacttttcttgaatctccaatattaaaaatttatttacttgagatatatataaaatatgtgttgaattattatataaatgagtaaatagtttatgacataagagtataattgttatgattttaatatataaatactataagaataatttgtaatttgatgagaaatcaaataaaaataatcaataaatattactaactgtttaacaattggaaatataatagattcgccaagagagtgttccaaagttgatcctaaatgatagtctatgggagatggacaaacatattaataagtttaggatttataacaatttaagaaagtacgagacctaaatggaatagactctccgttcaggaggagatgcctggcaagtgcacggaagggggcttcaaataacacggatagcacttgtaacaccctgatacttaggcgcgcgattttttaattaatgtattacctttgctaatcaaagggttttcctcaaaaatcgtgccaaattaaaacttttgatttaaattattaaa

SEQ ID NO: 295291 - DNA, 1693 bp, Cannabis indica
taataataataataatagaatttatatatttatattctttttttatatatataaattatactaaatataatatttattcaattacaaaaattctaccattaaaatttgatttgtgagatttatattatatgttattagttaacaagtgaatttttctaattaaaacaatttcacaaaaaattgctaaaagaaatatttttcacaaaaaattatattagttagataaatagataagtattcattgctttcagaaaaaaaaaaaatagataagtattcattaaaatgacaagataaatagacaagtacggttttgctgaatagataagtacgattttaggatactttttcaatgcaaggaatgacttgcaccacaatttcttgcaagtccttttctttcttattgattaaaggggtgattcaccaaaaggcaacaacatctatcttgatttttgaatattcttcaacactaaaattcaaaattttatttacatcatacaaaatgataaatgcactttaatatttaaaaaaattacttaaattttttaaaattattttaaatttttcttaaaaaattctcatattattttgtgttaattttaatacttattttaattttattttaataattttttaaattatgtgtaacttttatttcatttttttagtaaaattacacataaaaataaaaaaatataagaatgtatttataagtttttggggcacaaataaagcccccttttaattatactacaatagaaatttacaattatataaaattaaaagaaaataagaataaataaataggatttttgctaaatttggacactaatatgatttttccttcttaattattttgtttttgtaaaactaaaatattcctcaattggaaacaattgtaaatttgctcattcggttgcatttcactcacttttactatgcatttcactcacttttacaaatagttttctgatataatactgatccacgattactttactgtaatttgagagtacatgcaaaaaaatatataattgtataaatagtactctaacgataaaatttgggactgaatgattgtaattttagtttaaagtttgaatgaggtcattatacttggttttagctagaggaatttagacaataccaaaatttcatgaatattcaagccaacaaaaatacacacatgcataaatgggagtattcacctagatcgatgagtactgaaaataattacaagattacgcaaatagaacaacaaacaaacagatgaacacgaaggaattataatggctaagccatagctcgatctacttagtactctactttagaaaaagatttgtgattagatttattccaaattgaatcactaatttatatagacagtaagtgatccttcatataacataactggtcagacaaaccgttgcaacattaattacatttaattaggatagaaaacatttaaagaatttattcttaattgatattcgaacgtatacgactttgtaagtcacacgctggtcgttcatcttcttgagtaacacatgaacttgcgggctctttggtgttactcgcatataaggtttttggattacctatgaaattccgtattttaatattcccagtttgattattaaattaagtgattaattaaatgcggaataatgaaactggtactgaaaacagttttctg

SEQ ID NO: 295292 - DNA, 1133 bp, Cannabis indica
ttagttttttacgttttttttttttttttttagaaaaaaaaaattcatctcttacgtattctaatacccatttttttttcttatttcattttcaatcaatatctcattattatacttatgctttatatgtagaatcaatttttcaaatcaaatttttacttcaactagaattttttttccaaactttactttattatcacttgttctctttattttatttttaattttataagaattaagtaatttattttacccaaaactacaataaactttagctactctaatattcataattgactcatttgaatactttttggtatcttactttctatatgatagctttattttgttttttttaatactatgtagtatcttattttttatatgacaaccttaattcatcatcacttaaaactcttattttcttttaatacaatttagtagtacactgacatattcttaatttggtatccgaaaccacttactagtacactaaaaaatctaaaaagaatttacacttattagtatcatatgaaatttgatactaattagtatctaaaattaacaacttgttattaattggtatccaaataacttaattaccaatataattgactactaatcactagtctaccattaacgtgggttaattatgtcctaaattgtataatatttgtttttttttaacaatgtattacacttttaatgagttttaattattttataaatattaatgttattaataaatttaagaagtcaattatcttgaatatatatatatttttatatttaataatattagggaaatttacacttcatactgtatttttcccatttatttcaattatatacgacagttttttttttactgtctattttatactgccttcttattttatgtattgtaaatttttgtaaaagtttttttattttttttttttgtttacacgtgtaagcctagagttacgcagcgagaaaatggtagaatcttcgtcaggcgactcggttttggaagtgagatcagatacgcagcgagcggaaccatcatgtggtggcagcgagcggaaccatcatgtattcatcatcttcttcttgtgttctttttttttcaaaaaaaaatacatccagttatt

SEQ ID NO: 295293 - DNA, 2283 bp, Cannabis indica
gtaatctcagattctaaagtggcagtccaagctttagaatagaggaggcgtattcctaattggcaacttttagatctatcttttctattttagaccttataatagctttagtctttgtaatttttctttgttaagcgttgtaactgttttgtgtggatggtttagcaaaaagagtcaaattttctggcaatcttgttggtttgttttaaggggagggaaatctccctctgatccccatccattcttcttagtaattgaacttgggttctttccaaaaaaaaaaaaaactagctcacaccttattaaccctaaacacatataatatacatataatgtaaatttctaagtagtttaaaaaatattatatatatgagacccaatatatagctcatatttctttattggctcataatatcatgcaagaaaaagatagaacaatccggataaataatagaaccttcaattattgaccatatatcgatttgatcaacttgcataaatatgtatagggtaggttattaattgattgtagaatagggcttgtgttatgaattattgatgacatgaaaaatagaaaaatgaaaagaagttaatgatatatgatataattaattgtttttttttggaaaaagaggagaataactctttatataattattattaatgtttgatgcttatatttctgtcttcttctttccctgaaatggaggctcacatgttaattattcaactaaaattaacaacacttactaagatttgacattttcttttataaatttttacataacaaattaaatttaactttcttttttgctttctaataatcatgtttttgtacccttatactttgcgacatttgtggggtatgttcctttttcctttttcttttttaatttttgtccaaaacaaattaattagataaacaatgagcaaagtatagtagtataaaattacataattttttttttgagtcctgtaaattaaaccttaagcatatgcttaactcgtctatacctaaagacaaatctgttctgatcactaaactcaaaacaaatatcttatatatcacatcagaattttcgcaaagagaaagaatatcatggatataactccatcagcttcaacacaatcctattgatctattcttaaccaacatcatcaccgcatgcatgcgattagtcgaactccaccgtgcacctagagctcgaacttggcatgccctaatccctaacaattcggcagagagaagagcaagaggagtgtccattatgcatgaacactaaatcagcagctaccaatttcggaccactaatccagtactgcaacaattagttttataggattatcttactacacaacttccttattctttttaaacatatcatcattattattaatttaaaaaatcaccatataaattataatgacaaatttttcttcacaattgtcttttgacaaaatggtacctttaatcatagtaaaatgttaattgtgattatatagtatttagatataagttgttagatgcaactaaaggggcattggtgatcacatatattgtaatatttgtttttgatcaaatatattgtaatatttgtttaattttttaataataatataaacttaatattagtttttttttttttttgaaaacatttaatgttagttttttagttacaaaaatttgttatataacagtaaaaagagaaaaaaaattataatgttaggaggcgagaattaattgagtagggttttttagaatatgatattcatgcctaatctctatctccatgttatataatttttagaatacgatagtcatgcctaatcgtatttaaatatgattagtaactcaatttattaatttaatagtgagatgagttataaattttatgattatgaatagcggtacgacactttataagggtattaggtaatcgtctcacttaaattttatttcttattttgcctctgggtgtagcacacttatgaaaaacttccgacaaccactcatgctcataaatatatatatatatatatttataggatttaagcctctattaatagtgatcatttgttcacttataagacatatatatagtttttttttctacagttgtaaggtatatagttgaaaggctatttacgatttttgtctcacaactatgacttatgtatatattattgtgtccctaaactttttagtctgttaaaaatagtccctgaactatattcgcagtgttataaattagctcttttgtcaaattttgtcacacgtggcaa

SEQ ID NO: 295294 - DNA, 2464 bp, Cannabis indica
ttttttcaaatttacggttttagtttctaaagtggttgcagcgctagttgcaatagggatttctatacgattttttattgtaatttatgttgtagcgctagttgcaatagaaatttctatgtagaaattcgtaaaaatataaaaaaaaaactgttttaaagtgtaaaaatgaaaaaactcctaaaaagtttatatagtaaaatataaataatatataattttttttgaacgttccttatttttttatttcctttctaattttatgagaagaagaagaatcaaaatttgaaattgggaagttttaaatagattcgttagaaaagggaagaaagaagaaagaaaagcgaaaattagaaaataagtgagcccaaatgggcccaagttcatgctttatgaaaattttgggccctacaattgaagattataaagcccacccacccaccagcaccatcattatccatctgaaactccaagtctccaaggggcaatatagtaagctcactcccttcttccctgaaacgcttaaacgtcgccgttaagcttcgctgtgtcttctccatcacctcaacttagagagagaagctatacattacggttctaccttctagagagagagagagctccatcggcctctttttctacatgaatttgactgagcagtagtcgtgcggagaattagggtttgttgtttgagtttcccggtaaaatggtgggcgcttcttcgctcgttggcctccaagatcatctgaagttggcaagggaatacgctcttgaaggaatctacgacacctccattatcttcttcgacggtgctattgctcagatcaacaagtacttttcttcgtctttccccattttttcaactagtgtttgatgttctagggtttcgtttactgatgcttttgaaaattcaagctttaatttttgattgttgcagagaatgtgggtgttcttggttttgggatgttttagtttatcttcttggataatttaatcgcatttattgttgatctgattagtttgactggtaactaagcttttttgcatgaattactatattctatgggctctgtctgacttcaaaaactttagaatgtttggagacattctatattcattatacacaaacaaaactgggacttcattttgtggtttgtgaatttcgggttatattacattaataattatgtgctacaaaatccagtgaaacgatgctgtttaatttactcaatttttaaaattgacaatagggtgcaaaggctgaagtttgaacctttattttagtttcttttaataaaaaatatgttcttgatactttctcttgtcaaagcaagttaatttttttttttgtggaaccgctttgagtatcaaataaattggacactggtaattgatgttgctttgttgggttgtttggtgccgtgcctctgctcacttatatattgattttaagttttcctacttgtttaggcacctaaactcactcgatgaccctttgattcgttcaaaatggatgaatgttaagaaagccatttccgaggaaacggaagctgtgaagcaattagatgcagaaagaagggcatttaaggaaattccaactggtcgacgtgctgcttctcctcctatacattccaagtcttcctttgtttttcaaccattggatgagtacccgacttcgtcaggtacacatatggatgatcatgaccctgatgtttggaggccaccaagtcgggacacaagtcgcagaactgcaagggctggccccggtggtatgaggaagtcgccacaggatggggcttggtcacgaggtggtgctactagacctgcaccaagtgctcgtggtggtgcaaaatcaggtgcgtcaagcagggttaactcaggggtcagagcatcaactactggaaaaaaaggcactagctcgggaaaatcgagcaagggggattcagcagtatgttacatcatttcaataagtttgttttgtcataagattgtagttttgagattctattataaagctaaatcttttatcagttattgtaaagaataatccatttagtagggtttgaaatttgatggtaaagacttaatttattattgatatacttgttgaaattttcagaatggcgatgctgaagatgggaagggtaaaaagaaagagtacgagggacctgatcctgatttggctgcaatgctggaaagagatgtcctcgaaaccagccccggagtgagatgggaggatgtcgctggattgagtgaagcaaaaagacttttagaggaggctgttgtgcttcctctctggatgccagatatttccaggtaatctttcttaaatggctaagcaaattatcttattttatcttacttcaaggtatcctagacagccattactatttgatgacattactaactgtttaaaataactcttactgtcttgatttagcttttattggtctattgttttttc

SEQ ID NO: 295295 - DNA, 2005 bp, Cannabis indica
ttatttccgctagaattacaacatattgtaaagcacataaagtgcttcgatacaaggtaacatcttcgaagggttccccatctatgagacttagtttagctgtggagctagttggagtagagaaattctttgcttcttctatgtgtagtcttgtaagaagataagtacttgctttgacttaagtacatacctttggcatatttgaaagtttccacactgagaaaatagtaaaactgatcccagatctttcaaagaaaattcggtctaggttagatatgagttgagagatgagagaagaatttggtcacgtgatgagaatatcatcaacatagaccaataggtaagccagagagttacctatctcatgaatgaatagagaattgtcacatttagatgcttttgaaacctcaatgaaacaaattggttttacccttttcattctaggctctaggagcttgttttaacccatacaaggccttgtgaagaagacatacatgattgagtttgttaggatcaacaaatccttgaggttgatgcttgtaaatagtccctttaaggtttccatgaagaaagacattgctggcatctatttgtttcacatgccattgagatgaaacaattatgtcgaggacaacccgaagtgtagttggtttgacaacatgactaaaagtgtcctcataatctattcctggggttcggagaaaacctttggctaccaatcatgacttgaacttgtctaatgtaccatcaacactcaattttactctgtgaactcatttattgtcaattacattcatagaacggtcataaggaacatgagtccaggtgccttgctttgttaaagtatcaaactcaactttcatagctgtaccattgagggctcttaagagtagctattattgatcttggttcaatgggaaaaagagattctagaagagggtgtttagtttctaagtaagccttgggtttagtaatgccactctaagacttagttctcatagaatgaaccttggaaggcagtgtagcaatactgttgagtgaattaggcaaatttgatgaagatacttccttctcaagtatataggtaagggtggtgggagagagggttctggtgtgaaattggatgatatagcatcaaggttaggtgaggtgtttgtagggttaagataatcgatttggttaatttttggttgcttggtttgagatgatggagtaagggttgtttcaggtataatatatgttgggagttgtggttgattgtctggagttacgatgacaggtaagtttggctcagttgggattgtattaggtattattggtggttgctgtaaaggctctggtgagggattagtagggaccatgaagtgttggtgggaacacaatagtctcagattttacactagaagagacaacaacagatattgcagtactacagttggacaaggttcaatgtggaaagtagttacaagaaagaaggaagaggggaaggaatgtacctgaggtgcatcttgagatgtagaagttgtaggtagcttagctgggaagtgctcttcattgaagataacattcataacaatgtaaaacttacaaatagagacattgttgtgacctgaagtcaagtttatgcttgttgtatggccttaagttgggaaaatatgcacacccaaatgattttagaatagtataatcttgtttcttgtgaaataagacttaataaggggatagaaagtttagcactttggtaggtaatctattgattataaacactacacaactgaaggcatgccaccgatattgaagatttaagccagcttgagcgaagagagttcattgatgtgtctatgttttctctctatccttccattttgttcatggatatgagtaggggtgttcatccaatccaatccgcactattttactcagagtacatccgatccgcactaagtgcgaattttttttttttggatccaatctaatccgcactatagctcaaatccaatcaaat

SEQ ID NO: 295296 - DNA, 2442 bp, Cannabis indica
tttgtcacctaacttaccaaaaaaaaggactttacaaaaagattgctaataactaatcctacaagccctactaatacctaatatagcaatgatatagaaagaaggagaaatgctaaaatgtatcaatggtgcttaatacctttttacatctcaatatcactatttgtctaattaaatattgaattttatataatttaatataataattttaaaaatagtagcgctaatcaatcataaaataacatatttaaagatattagacattattggtgtccaataacacttatttaaaacagaaacaacaggtaaagtatgacactcctattttagcaagtgatagtgatccccattttgttattggaaaaaaaggctatcaattaatgatagaatatcattacacttgtctaatcatattgtatatttatatctctttttttccttcaatttttatatagataaattctatatgtgttaggtacacctaggagaaactatacaattatcataaaataattgaagaagtaactatttattaataatgattattaattgtggtgaccaaagagataatcatctccaaaaaggtacatcatcctctccttcctccatggatcatcatcatcatcatcatcatcttgattttgtgccaacaacttggatcggcaaagaggacaagaaggttgaccttggtcaacccaagcatccaaacactctttgtggaacacgtggcaacagttgattggcactctcacctcttccttaccctctatctcattcatacacacaatgcaataattacatgatgatgatggtggtggtgatgatccagtgttactcttctccaacaaggtgttgtagggcatcattggaattcgcttcttgattgactcaccggccgtgataaaaaacacggccgggactgccactaatgaaggaggaggacgacgatgatcatgatcgtgatcatgatcatcctcgtgatcatgattaatagtattattaaaaaatttatgagtgtgagaaagtgttttagatgggaaaatagagaagaagaataaaatttagaagtagcattagtgatttgatgatgaaagagttttagagttgttataatataattacttcttctaataagactcaagtatggcaaacccatttatataaatataatgatatgttaagatatgatgaagagagaactacaaaaaaatattgggttatttataggtaaagaataattatttaagtggggccaattttatgggttttactatatatatagctgcactaataattataatataagtagggaaagaagagcatgataaggaaaaaaattccattttgattcagtcatatctctctcaaaatttgactttttatttttgttggcaatcaaattacttaaaaatttaaagtaagtctacggtgctcttttaaaaagatatttaggtagacttgtaatttgtttaagcatataagaatgttttttagttttttttgtatcattataattgtagatttatagttatttatgactacatattaatttttaaaaatttttaaagtagtttataataccgaaaattttcgagagacatctatgaataaagaaaatagagaaaaataaacactcagacaaaaaaatagcaacaatcccgataaaatcaaaaatagtgtagaaattaataaaacctaactagagccattgtagggtcgagaaacgatcggcaagccctggctagacaaaaaagtcaagcgtaagttacgaactggtagagggaaacttagagagaaagatgcacatattttattattgagcattgttattgaataccagtgatatctaatactttttataagtgataccctacgactagttatcaatattctttaaaaattattttttaaagtaatatagagtctcttacttaattacaccataacttttaacaatttaataatgaaatagtgttaattagtgcactctttttgaaatgatataaagttgggatgtgatgatattattgttgttattattattattattattattattatgtcttctttttgactacttttatatatagcttgagatcgtgcgtatagcatggtgtgcggggaaaggaataggaaaataccaattcccattttccaccctatggggagcaccttgtgtttcttttgatcttaattataagataatctttttgttaatattaattaattcttaattttactacatattagtgctactacttggctttaattctttgctttatatattttgattctttgaagatatatatgtcatgtgaataacatataacaaatatcacattctaatttgggtaaatactattttgaaccatgtattttgtaaaagttaccaaccgaatcttttattttgttaaataaaaaaatagaccctatattttctaa

SEQ ID NO: 295297 - DNA, 3532 bp, Cannabis indica
aaaaaaaaagttaaaaaacaatacatgggtaatttttttttttcattttctcttagaaaaatatagaaaagggtttatcttttacaaaagaggaagtaggatgaatatggtgactcaagatttctctctctgtaaaaccctaaaccccaaattctctcttctccattgctcatctctctcaccattctccaatccacttcgaaagactctcactttcccacctcaaaatgctccaaaaccctcccacttccccaccatccccgcaattctcgcttccggaggaaaatcgcgagatctccgttcatacgccggccggagcaagaaaaagccgcccggcccaggcggcggctcctcatcgggaggacgcatcgagggcaacgccgaatttcgccgggaagtaaaacgcaacgctcgccggagaaacaagaaaatggcggaatcactcttttaccgtttgaaaaaccctaacagaaaccatccagataatttcacagaagacgagctccaagaaattggacttgggtacgatagattggttaggtttatggataaggacgaccccaatttacgaaaccctaatgattggtacaagtacggcgaattcgggccctattcgtggcgcggtgtggtgctcggcgacccggttcgggggcgattttcggacgagagagtggctatgatcagcgaggttagggatgcagaggagtgggagaagattgagaaatcggaaatgggacagaaatttgggaagagattggagcaaatggataggaaaaagtttaagtatttttgggtttttgttaggcatccaaggtggagactttcagagcttccatggcagcaatggacattggtatgtgaagttgttgttgaaaatggttttgatcaaagattagataaatggaatttaatgggtagattagggaatatgacaagatcaatgataacaaaatgtgcagcttggtttagaccagatataatttatgttaagagacctgtttatcaatgtagatttgagcctcaagataatttctttaaggttttaatgccatttctcgatccgaaaacggagaaagattgtttgtttgagttggagaaagatgatgggagtgttgagttgtgtacttactatggtgggctttgtaagattttgaaggttagtcaaaaggtaggttatgttgatgatgttgttaaggcttatgagaaattgagtgatgaagataaatctaagtgtttggagtttttgcttaagaatcatccaatgcagttgttgcatccttatactaaggaatggaaggcgaaattggaggagattgaactcggttgtgatgccccggatgatgatgagagcgatatgcgagtgggcaatggttcgggtgagattgtggattggataagaagaagaagaagatgaagttgttgttgatgaggaagaagaagatagtgaagaagaagatgaagatgaagaaggtgatgataagtattgggaagatgagtttaaaaaggcattgacaagctcagaaggaatggagaatttagtgaagaggagtgtggagttgtctaatgaaaggtatagagagcatttaggtgctgcaatggatatggaagataatgatgatggtggtggtgatggtgatgataatgatggtggtgatggtgatgagattgagatgaggggtaagagggctaaagtgagtccagaggaatggaagatagttggaattggtccatggaggaagagaatcaagaagagtagaatcccacctgaactttttcttagagctgcagttagaccttttacttatagaaatttagtaaaggagattgttttgacaagacatggaattttggatggtgatattagttcaactgataatttattgtaagataaaagatttttgtagattagagtgagtagagtgctatcattattcattttcattcatgtaatgaaatgaatttactttgtttcatattctaatctttaaaatactttaccaaaattcaattttttctattttacttcatacttttacttcaaaaaatagaaaaagaaaagagagaaattatcaaaatatgataaagcacaattttaacatatctttcatatttaaccttttaatctattttgaagagattgttgtgagtggtagagtttttttttcctttctttcttgctttatacaatataggtttgattacatgtaaagaataggattcatcagatttctataagcatctttgtaatggttaaactttaagaaaatgagtgatgatacatgcacattacaaattacacacctaacatgtgttgtttggtaattcatattacaaacaatattgaatataacaaatctaactaacaaactattgagttaaatgttgcagctttggttttgttgtgttaattgaaatgatgtagcattttgttgtatttagtttttgttatttaaaggctttgatcattcttgtattgtaagaaacaattcatactgaattgagagagagagtgagattgagtgggagagaaaccatttaagagaaaaaaattagagagaagagagtttgggaaaactggatcaagactaatgttcatcgagctgagttttaggggtgtttttttgtaattttctctacgatgcacacaaccattgaaaccttgtattcatcatattaatggagaagaaaaactcaagggagtaacaggaagcaggttctttgtttcgccgaacttgtataataatcttgtgtctcttttactttagttttcttacatttaatttttgttttcgatttgtggtttgattagtgactagttggttgtgtatggattcattttaacttgttgtatgttggctcttggttgagttttatgttgtaaagttataacatgatgcatcaagtaatttcaatcaatcatcttaagtttcagtcatatatataaatattataataaatattgacataaattagttatttattggtgcaatgaataaataattgattagtaagtaaagaatatctttttttactaacattgatataattgatatcgaaaagtactagtaagtgcaagaagagaatcgttgtggttagcaaccataaggtatcattttatagcgatattctgcaattactattaaataaattatattaaattgaatatttaattctatcaataacaatataacactttatatggtactagacatcatttgtatattttaacattttacttgcaagaaaaataaaaacatctaatatttatgtcttttctcattttacttattttcattttcactactttttctcttgtttttttgccttcttacaaaaacataacctaaagttaatgttataaggtttacctattgggattataacaatggataactaatagcgtatctatatcgtggaacatatagagcgttctatataattgtgagtgaaattccaagttctatgagtggatgcaacaaaaaattaataagtcagtgaaattacttggtaaattctgggtctgcttattgga

SEQ ID NO: 295298 - DNA, 5964 bp, Cannabis indica
agagagagagagacagtaaatcatactgaatttaagatacaatagtttcatagtcatttgcagttcatctcagtgccttgaatcaataacatacataaaaagttcgacaaaactttgtgaaccatgcatgtagagaactacataatattactttctatgaaattcttatcaaaggatcattgtaaagtaatgtggtccacaatgtgacaacaaacctcatatggtttctgagcagcaagtaatgcatttactcggcctcgtagaacgtcaaaactgagatacttagacacctgccacatagtaacaagatgtcaatggaccatattattaaatccaattcagtagtatgatcatgtcttattcattaactatcaatattaatcctaaaagagttttgagaaatgaatatcatgttttttatgttcttcaatctcttcccattacatttcaagggagcaccacattaacatgtttcttgttcataatactaaaagataactgaaaactaaatggaagataaaatgtaaaataaataaaacatgaaacagtactatggaaaaggaaaaacaaacgatataaaagtaaattaatccagcagttattcttgttaatttatgcgtgggtgggggtggtcagatatttttcattatgattcactaaatcacatatcattttgttgtacaatgaacataatagaaattaaaagtataagctataatctacaacctgtaattatcaagtacaggtatttgatgctgataaacttggtgtcaagaaaagatatcagtggactaagcaaaagaagagtagtaaaatgtgttgcataaacagaaataacacctttgcagaactttcatatgcattagcgcttccgtcataatcctttagtttatatttaacttctccaagcaaacgcaaaacatcagggtcatttggcttctcctgtgtaacacaaaaaacacaaatacaagcaagcttagatcataattttttactgaacccttcacttgaccagcatcatccaagtacagctcatgactcttcaggaagaacagaagcaaacctttgtcaagttctcaagcaaagatgccgcccgagtatattctcctaactcagccaaagttacagcagctccctgaaaatagcccaaaacaaatttaccatggatgatgctaaacagacaacaggaatatacatggtaaaccaaacagtcaaattaagaaaaccctttggcaccatacccaactcagagcactgttactgtaaatttaaatcagatgatgttgcagctagtagcatcttttatttttctcattctttatctaacttttagagtttaaacactaatccagctttctttatctttttactctatactataattttattaaaagagaataagaacaattccagtctttattatgtccaatatatataaaaaatataggattattctcaacctcagggtacagtgatcctacatctggccagcttgaaattagcaatgaaaatcttaatattttctacaaaaacatataagatgtagaatcatctcagctgttttggtttgaaataagaagcaatcaaggcttcagtttacatttaaccctcaccagataataacaagtgatttaagcagatgacttcttttttaaacccagctaggatgaaataaaacaatcagcacaatagcttattactattagacaagttttatcacttttcagaacataaaatattgcaatcttcctgtaggacacacctagttaaccttgttccctttttgtattcataatcttttctcatattaataatctgtgtccttgtgagagacagttagggagactcacaaaagaacataatctaaaattaaccatttctgactcacctcaagagcaattgggtcttttggggaattgctcagtgttgcctcgaattctctcagttgagtctgcaatgaatcagaagtaaaataattaacctgttaggcagctcttgaccactttctggatgatttctctaaaatacacagcatacaatgatggtccattaggatcaaccagaaatatgtgaagtataacccagctcagcagcaaaggaaagcataaaatgtatataagactagaaatccagcaaagaaagctaaaacaggctgtataagaaagaaaaattgtttacataccacaacgatcaaatgagttgtcagaaacagcaacagtattaaaagtagttacacagcaggaaatgaaaagcgttacagattttagttttagtgtgctaaatttaagaggatgccaagggaactcaaatcccaaagtatacacaaaagggaacatgtatactgcaccaaaaaaaaaatcagggaaacaatcaccgagccaaagaaaagagagggcataacagtacaatggaatattttcagtcttataaatgaccagtgatgttaaattaatcaatgatagagtgactctttctaatttaaatccacacaatgtcattcagtttatttttatgttcactccaactttctcaacctactaccaatatatttaaatggctcccaagttatttaacttactccacaagttattcgaattaaaaataatagagagaaaaaaatatatattagctgcaattattttttctactagcaaaaggtcagtcattaaattctcacttatcaggtttcctttaaatggatgtgcaacaagttatttagcttttattctatcaacattccttccaaagagggaagacaccacaaagtaatggttctaaattgtagttcgtaactctcgaagtctgctatcctaaggaccataaattgttgtttgaaaaacccattctctctaataattgagaaacaaaggaaatttctattactcttaaatagtatgtaatgtttcacaatagagcacaaaaagttttcttttttagattttgaactgtttcaatactgagtactgtgatcatgtctaatgtctaggcagaccatgctgattgatccaaggcacttctagctttgaagaaaagcacgcacctactaatatgaatattacctgaagagtagttttctcttcttctgacagttgattaccaacaactgcagcatcctcaggaccaacactgaaaacttgtagaccatatcaaatgcaatcacttctcagaaaagtaagcaataaagtaatgcaaaacaaacatatgacaaacaaatcaggattgaataaatgtagtatacatatttttctttgacaatgctaaagtaattcgatctaatcaaaaattgtattaatggttatcaatatcgattaccttccagcctgattaaaggacaaaagtataatctatatgacagaaattggaaattgagaccaatttcatgtaaatagaagtttctacaaccaaatagcattacacaattacaagagtttttgacaactctgtttaaaaggaatgtaaactaaagactggcaaataaattggtacataagaatgcaggacctctgaaatgaaataaatgaaaaggtgaacgatttacaattcttatttgtaacatttacttattgaaaatattatatatttatgtatattaaaatatagtgtgtttgtatgtgtgcatgtgtgagtttaattgaccattgcataccttcccgttggaagaaagtccccaagagcaaataccaagccaaaaaccacaacagctacacctactccaatctactccacatagatagaacttttattagtaatatacatgcaataaaagatgttgttggagagcttcccatatgaatacatgggaaaaaagaacccccccgccaaaaaaaaaaagaaaaagaccaagtcttaccttggtaccaagtccaattgttttcttctctgattcaacaggtgcatcatagtcgattggtccaaattctttttccccatctgcctttttctgttcaagggctgctctgagaaggataattattgaaaagaacatcagccaatcaaccacaattgttagcattgtatgtttccagagaaggaacccaaaaattattgtcaaaatgacctaggtacacttttcaataaataacagttcaagataattttacttttaaggaatgttttcaatgcaaagtatctctggaacataagcaatgctacttcaacagtgcaataaggtcaatatggcaagttaatcgacatcaatgatgattgaagtgctctttaggaacgtgcaaagtgttccactggagaaagaaacaacaaatactaaaccttttaactgctttcagcttctcctcaaaatcaaggtctttcaaagtagtgttgttgttagatttcccaccaaatctagaactcacaccaggcgcttctgaaaaagaaaattacatgtaatgattaacagaacccatactccaaataaactaagaccatctccaatgggagatgtaaaaattgtgctatatttagcacaaaaaagtagttttgtggtaaatttacaccaaattttagctttgtactccaatgcacaattgcaaaatttaatatctaattaatgttttgttataaaaaaaacaaaatctaataactataatcaattttattattattttaatatgtaagacaataaaaaataatataaatgtttcataatttaatgtgatagttaaatatactaacaaaataatagaaatgacataaaatgtaattgaaaaagtagtacatttattgtggtgtaaattttacatcatagcaaatattgtgccaaatttaatacaaaatttgctatgtaccaaatttacatcattttttggcacaccaatagagcacactttttgttaaattttgttaaatgaactatattttaacttttcaccacttatttacaccttcggagatgctctaatacatagctaaaagcaccgtaccagatgtgatgtcaacagtttgtgaatgctctcttccttttactatattaatcaaattgttacattaaataaaaaaaaaatcaaattgttacattaattttttaatcaacttaacaatttagcttttaatatatgggttaggattcaagattcaagacaaaattataatccatttcccataaaatagctgttgaatccagtaattctataaccctttcgctactcctgttcaggacattgatatctatagacaattcatgtattgtcaaccaaagcaaaaacgatagttacagcataagaaacaatcaaattaccagttaggaacagcatcagatggtttagttgttgatttcctacaacaaaagcaagaacaacagttatagttatagcataataaagaagtaatcgaaagtaacaatgagttattacctttgttgtaagaccatgccctttttagtaactttcttcccctgaatgaatttccgtaataattaaaaaccaattctgaattgttattatcaacataataaaagaaaaccttcaaaatctaaacaagtggatactttgttggggctgtcgtttgaattggttccgaaaccacgccggggattggaatcagcagagcatcgtattggaaagaagaggaaacgacatgtcgttgaggccgccgtaatcgacatcgacagacagatggagaaagaaacgagtaaacggagctgagactgaatcctctcttctctgcttacttaggccaagcccaacttctccgccagaacagaattagagtggggccttttaatatccagaatcaccgttaattttgcttgccacgtgtcaactccaaatttattccccaatttttttttaaaactagggaactaagccgcgcgagttgtctaatttttgtaatctttatatatattgcaattatattgagtgatataatctaaaatataatattttaatttgtgttattataaacaaagtaatagtattaaaattataaatataattttgttataaatattaataattatgtggatgt

SEQ ID NO: 295299 - DNA, 1523 bp, Cannabis indica
gtaaactgccaaaaaaaaaacagtataaatgttgtttttgccgtggaacagtataaatgtaataaaatgggaaaaatcagtagtgggtgtaaatttcccaaaaaaaaaaccaaagttaaaaggttaaaaggccattttttatattgaggaaattagactctataccctttttatattgtcttcttttatttttaccctcttttttaaattttattatttttatttctttttttaaacattgtactaattttgtccttaaacattgtactaattttgtcctgtcacttcaagatactctctatgtgactcccttatgtaagggtattttgagtacaatatatataaaaagaggtatattttaattaaataaaaattagaggtaaatttagttaattgattgataaaagaggcattttataaacttacccctattgtattagtgtcatatgactaaggttctaatgaaaatatataacatgaactattacaaaaagatcctttttggtcaaatatttgtgacaaatatgaaaacaattgaggctattgaaaaatgggtggtttgtgaactaacaatacaaatgatttacaaccaaggttacaatgcaaaagcctattgcgtcagaattaattattactccctatccaaattaataggcctttcgtatcataagctcctcacacaaaattcaatttaattatatcaaccaaactgagatgttcttttccactattaattacgtcgatcaaaaagtagcttatataatatacatgcatttgtttagctttgctcatagttttgagtaaaaaaataatgaattaaagctgaaaggactaattgttaatttcaataatgaacaaaagtttaattaagaatcgaaataatatttcttcatagctaagacatctatataaaaatgtatactggaatggataatttattttatcagaatatagaaatacgtcagtttcaatattaatatgaatggagtttgttgaacaatacataataataaatatataagaatgatatgtagtgttgcatgtggttcatgtgtgcacctgtttttcttctgctatatattatttgaggtcaccattatggaccctctccagctctaataatgaaatgcagaacaagacctttgacagcgacgagcctttaatactttttctatctttttcttttgttgctgagctgatgatcataggcttatgacttataataatatctacttctataaaatttaaaccttgataaatttattattttattttaacacatctatattctttataagagaaaaagtacatccactcaaaattttcacatggctgcaaatttttctatatctcaattaattaatttaaaatacatttacaaaagtatgacatcaaaggctaaaaataatagtgacaccagatttacatacactataaaaaaattgctattttagtgataactttttagtcacaataaaatttatttgtgactaaatgtgacttttagtcacaacaaattatgt

SEQ ID NO: 295300 - DNA, 2363 bp, Cannabis indica
atatataagtatagaaaatcaaatttccctattaatatttggaaattctctattgattttgcgaagttgcaatttcagccttttctaagcaatttctttgttaaaatattatgtttaagcaagttttaactattagttatcttcttaaatttaatattttgtaggttatagaagtcaatcttcattcatgtaaagataagtattaactcgtaagctttacttgttatgcttagttatgtatctgattatattacttacaagagtgattacttaaaagattcattatgcacattttctctatatcagaactttaaccattcaaagtcaaattgtatcaacctcaatgtagaataaagataatttggttaagggcatgcaatttatttacactttttttcttctaaataaaccagagatctcaaattccctggcccatttagccaaacagtctgcagcagcaaagttagaaggaacgcaatgaaaattatagagcaagtttaaaatactattaagaatggggtatcaaacaagttaaggagcaaattcataaacaacatagaccatcacataaatgataagtaaatccacagaacgttatcgtgacttatgacaacgattctactaatacatcagctcacaaatactgaatactaattcccattcccatcggaattgtagtattagacccccttatttcttcccacttttcttgagcccagaacctccaaaagctcccttctgttgtgccttggctttgaggtctttcagagcctaaacatcataagaatcataatcagaaaatgctattcacaaaaaatatcattaaagaaagtatgccagactcgaactctcaccttttcctcttccttctttttctgaatgttggccaagtcagtctgttaataagaatacaagccaagcagtcagaacaagattgaacagcattacacagtagatatagaggcttgacataaagaaaggagttacagttactatatcttgttgcaatgatatacattgttttaataagaaagacatgggaactacttaggagtagatagttaattaatcaatatatgtgtgtgagaattaataaactttaggaaaaagcacccccaatatttgaataataaggcaaaaagtaaaagctaaatgctaaatcgtttagtgttaatgcttcttttttgcaatgttcagatgaaactcattatattttatatgttggttagaacaagattcaaacaccaagttaggcagaaaatataaaggtgcaccgtggaaatagctaacgttattaaacataacagaacaatgcaactagaaacactgtattgtacagtatgctgtgtaacaattttgaattatatatttgatgaaagaaacatgaaaaaccttgaaactcaaaaactagtttgaatcatcaaaagaccattgtatatacaaagaaatgtatcattaataactatacatcgatctaaatagtgacaaggttattaaaaagttatttagcatccaacatttacaagaagacttggatacctatggtcaatagaaatcatagttttaaagcaaaagattaatcccattgggatcaaattaaaaaagaaactaagtaaagaaaaacaccatgaagttgattaattcaaaattaagctaaaaaaagggccaaaatcggtataccctgatggttaacaaaaatattcaaatagttatgaaacagaacaaacgcttatcaaataaagcaaaatcagcccaggtaatcagattactagattaaaacaatataaacaaatcaagtcagttagcaaaatcaacaagatgatcaaattaaaacagtataaatcaactcagttagcaaaaaaaaaaaaaagaactcagttagcaagatcctaattctaccgaccactagtaaaattgaaataaaattcaatttaaaaagaatgtttgcctcgtcataatctttctggtccttcttgggttgcttcaaaggcttagcttttccacctacaaaataaatatacatagaagtcagttcatactataatcgaaaccagataacataaatcgagctttacaaataacgaaatattgactaaggaatagaaaaaaaccttgcttggaagacatggttgtagctagggtttttgatttggaatcgaaaggaaaagggaaacagaaccctaagcttcaaaattcagaacaagagaaagaaaaaaacccaacgcctaaatataacgcaaccttgggatattttaatgagtgggcaataatatttatagggcctccgctatttaaagacttttcacgtgagattatctttttttttcttttctttttatatttaaatattttgaataaaaaaa

SEQ ID NO: 295301 - DNA, 2930 bp, Cannabis indica
ccaaagttacgtagtatagaaataatggtaaagaaggttaaaaaagataatttgataaataaaatttattaattaataaaatttaagtggcgtttagtaatatttttttaatttaattttttaatttttaattaagaaaaataaaaactattttactttaaaacttattttttttttctaattttttttttaattgagaatcaaaatgttcacaaaattataaaaaaaacacttttcaattttttttctctaatcaatattttaaattatgatcagaccaaattcgaatttgaattcagaccctagtcccgaacccgaacttggaccccagctccaaactcgaactcggacccaacccagactcagatacaacttaaataaaatcaaaaaatcaaatcaaatttacaaacactttttttttgttattataattaaaaaacaaaaatggttataaaatatatttttatcttttaaatgattgaaaataaaaattttacttttatttttatgattaaaaaatttaaaaataatagtgttaccaaattgctaccttaatttacaattttttttttctagctattgagattaaaagttgtattacttattttatttacaataatggcaagtatctttattatcaataaacgaattatctccttgaaataattattaattcgtcaaaatataacctaattgaatatgagtttgaaagaatttcaaatacaaactaagaaatctaaatataagaaattaaatcaaagacaaaatcaaactacacaatgttagaacttaccacaaataaggactcatctaagcagaaagccaaagacaaagagacaaaggaacccgatcgcatactccacacgcaccaaatattcgttccatcatccacgaaaattagaagcacacctcattgtcatcgacaaatactaaaagctcatacgtcaactcaaaataaaatagaacaactaatgcaaggtgtttctgagattaattgagtcttagatagcaacaaaattattaggccatttcaaaattactaaaaaaaaatatacatgtatttttaaaatgacgactttgcatgctttagctcaagcccgactttgcactaaggtcaacagagcaagaggccacattagaaaccaaaccactataaacaatcttagccttgtacacttgcaaggctcatgtgagaaaacaataacaaagtttaaactaattaattgtcactgtttttagcttaattatgaagtttcattaaattttttaagactaaaaaaaaataataataataagtacttttacaaattatctaaatagtatatttagccacatgacaattttttaaaccaaatatatttatttaaactggacttaatattaaaagttaataataataataaaaattgagaatatattttagaaaaacctagtgttagagttgataaaatattataaaatttaaagcaattgtaaataatataagttaagataattgattcaaaaaagtttattactataaagttttaagaaattgttttctcctaaccttttttttttattgttttcactcacaatttttttccaccatccaaacactgcctaattgtgtaattaaaaatctaatatatcattaattgtttaatttgtatttatagacaaatgagtgttagcatcatttataaaacattaatccatgacacttaattcttagctagatttttagccaaccgatgcggagtcgtaataaatgagatttaaactaaaattacaataataaatgcagttaataacaccagaatttacaataaatgtaaataaaacactgaaattcaaagaggttcggccctggatgtcggcaatagcataatctccttgtattttattgatctgagttgtaaaagttaagaacaggctcttgattgcaaagaatgagaagtatttatttttctaagtgttcaaaattgtggatccccctcccaggtcatggatgacccctaatataggggagggggtcggtgcttctcgctttaggagacgcgactaacgcggagctacctcaaccgtctccttgattttcggaggtagttgaagtttgatttttatgataatatcccgctattttcgtggaatgacaactgtctttgagcctttcgtgagatttaaacatttgaaggagctactgacgataagagtcccttatgggtgtgacatggtcgtcaaccacctttagcgatgaagctcatacttgggggcaacactcccgagactctcgttaagggggatgatgaccaccatcgttgggtgaccccccaggatccaacttaagggggggtgataacaaccatcgttgggtgaccccctaagacccaacttgaggggggtgataaccaccatcgttgtgtgacccccccctggacccgacttgtgggggggtgacaaccaccattgttgggtgacccctcgggacccaacttgagaggggtgactaccaccttcgttgggtgacccctcttccgttgtcagtagttatggtgcaatatggatgtctccatatacttttgagaatgtcattgtatctatgataaaatacatgactcataccatgaaggtgtaggaggtagtggtatactcctagactaacacttcatggttggcggtcatctcaacggtcatgactttatacattcttcattaatttagtcccggtatttttgtgccacgtgctgctactcttgacacgtcatcgtcgtaaaattttgggtaaacactaatcaaaggggtcccaaagtttagaaaatacggtcttttgatatatttttatattgtactattgttaatttgttattgatttttattatttgtatgtttatttttattgttgtttggatgttatttttctgttagttttatattatttttttgttatt

SEQ ID NO: 295302 - DNA, 1124 bp, Cannabis indica
tttttttattaaaatacaatttatatataatgttacatgagaatattttatcattaattaatattatataattactacgaagacttccaaaacgcctttactataataagttttaaaaaaatatcaacttctagaaaagtctttaattaattaagtaataggaaactgggcaagtttcaaggcgcgttcaaaatgaagccacgtgtcgagaaaggaatataacacacttcgaggtatttgtgttgagaaataaaaaggaggtcatagtcaactctcccactcccatcgcaaccgtttatttttatatagctcatccaacggttaatatatgatataccggcagtaaacggtttttaaattaaaaactggtcaacagtttcagctttaaataaagaaaaacgaatgactccacgtgatccccactttcagagtcagctttctttctctaacaaaattaatatgtgtctgtagattaattaatctcgtgattagttagatttaattttttaattaacttcaattaaatattttactttttcactgaattattaagagattatctagaagaaaaaaattccatataaaattggaaatgtcgagtcaaaaatattgaattttttttaggcggctttcatttactaattttctcttaaaaaataaattagaggtaaagaatcttacaaataaagaaaaaaaaatagaggtaaagaaaaaaaaaaaaatacatttggaatttggatcagcatcgtttcttgctaaaactttgaatgtagacaaaactaaagttgtctttaaacggataagttattaataaaaatttgggaaaaggtttacattggtgataccaacacaacttataaacgaatactgcgtgttaatttttatttttgtcttttgttccaaatttaaatttaaatttaaattaaagaagaaacgttcctctttatattattattattattattattattattattattattattattattattacaaacaaaaagtttgctaaaatagtaagagtgcgtttggaagtatctatttaattattaggtaaggtaatttttaagatagtaattacgtaatttagggtgcgtttggaaagtcacaatgtaattgaa

SEQ ID NO: 295303 - DNA, 4879 bp, Cannabis indica
gtaaataaaatttttctttttttagtaatttagagatttttgaaaacctggaagaatatcaccattaaaaattctaatgatcttaattttatgagcatattcaacaacacctcaaaaagaattgatgccactctgaattctttcctaatacgaaacaaaatatgctgaagaaagcaaacaaagcaaactattcaataaaataacatctcccaatcaaacccacataattaaacttttatcttttcttttaaaagtagtaaatgtctttgttttcctaattgagcaccagctatggtatgggatcctgttcttaggtagacttaaaaaccaaaacaacaaaaagatgaaacattttgaatcttttccaacgacttagatatcaaagccaaacttgaacaagtgccctacaaatccatatagactattgattgaaagacatctaagatttttgacaagaacccattagcattttttttctttgttcctttatcattctacattttttcttggtttcactttccataattccacacatttattctcttcaaataataaaaggttggaaatgattgtaggcaacaaaataaataaataaagaattgaggcatccaatcatacattggaatatagtgcttcttgtcaaaaagggtcaagaaggcacaacaatggaggctcccaccaaataggcctagttaaccccacaacatttaagtataacctatcaactaattgcttagtgatattagttgttttgggggattaaatttttctacaaaagtgaagttcttattttatttgatttgattactaaatagctcatacgtatttatttgacaaacttaattctttgcttttgttgataccccatcaaatatgtgcttcacacaactaacattccatatatatggactagcaattaagcataatagtgaggtgatttgacaacacaaataatttactaatcaaattttgaatgaaaattattttatttcccttttttaaagaaactaattaaaattgtagtagataatataatttgagggcccttaggaatatgattgaaatcgtcttaaaactaaatgataagaagtagagtttatatctagttttgtgttcgtcatatatatttcatgtgagaattttccctcacatttaggtctcaaattgtcgacattgagaacaatacaacaagactgaacgtaaattgtttaattgaatcccacttcaaatttatcagagtatatttacaatacaaagttggttgggaatttacagatatatgcacaatatttgaaataggtcattaaatcaaacatgataaatcaacatacgtttgtctaaataccccaaatgcttgccttatcttttattagctagagttagtttcacattactaatgtgtggaagtaaattgttatttataaaataaataggctactacttttgttgacaattagttttgagatggaacctcattcagcttatcctaaattttaacatggtatctgagccgcttgtgatccgttgtgagcccaaagtgctgctggtctaaaaagacgacccaaactaaaaacttccaatgtctcctctttaatctctatttgggatattttgaccaatgtgtgtcagtttccaagtgttggggatctttgacctgttcaaaaatctaaaaaaattttgacgtgtgcacccacaaatttccgaatatatatttagcctggaggaattttttcaaatgtcaagttcggtcctctgtggtttcttaaaggttgttcgttatatctacaatttctaggcccaaacattagtcccacattgctaatgtgtggaaataaattacaatatataagattaatagagtactcctcctatgaaaatttagttttgagatgaaaccccatgcaccttaactactttcattctatgttctaacatgttttgcatgacactttttatttctccaaactcacctctaattaattactttttcacaatactctttatttatatagcatacacttaaccaagaatttatggttatttgagattataaaagtaacatagaaaagactattgaagtcaccaaccttgtaaacgataaatgcgtaatgaaaaatattgtacagtcatgtttcacttacattgacattaaaaaaaaaatagtaaataaaatgaaaagtaaactacatatagtgacaatttgtcagtcagaataatatttttttgtgactaaatgtgactacagcaaaaagttatttgtgactaaaatatattattttgatacaaattgtcactaaattagttttaatcacaacaagcagtgtgactaaaaccacatttaatcacaataaattgtaatttttataactaatatatttagcaaaacacctattatgaatgataatttataataagtgttaaccctaaaaattaatacggctaactctctaagctagttgactaataatcaagggactaaaaaaaagaattcgacaagcttactcactcggcatgcatttattaaagacacaatcaatacttatggttctcgggatacgtccgagagactcaaggaccaatcccgtggtgattgacaaacaaaatagcaaaaagcgaggatgtgaacaagtaaagttataaatgggtaccaagttgtggatgcatttgtgtgtgtgtgcattgtgtgtggtgtgcgtgagtggaggctcgcatgcgagcccatgagggggactcacatgaaagccatgaggagtgtgtgaatggggactcttatttgagcccatgtgagagtctctcatgggagtcctgtgtaataccctaagattaaggaatcggattagcaaaccctaactagttaaatgtgtattaatgtagaattataatattatataatttaatatatttgaatcatactgataaataacatgttaagaccacgttggtgagctaggggcattttcataattttaaccttagaatggtaaaactgtaattttaatattatagcatgcttatggaatatatttttctatagtataatttttttttccttctgcagatgttttctgacaagtcggcatggtgttgtcacaaccggatattttgggccgaaccgagttcggggctcgaaatacatttttggaattttattttggcattttataaataattgaataatctaaagtttattatagtttggtgtgtgacaaaatgacaatttttcccttgttgtatgcatatgtggtgtattggtcctatgggcatttcagtcatttgactttattttaaacaaaaggaattttggtaaaatagaaaactaatttttctggtttcttcaacccttagccacccccctttttctccctttctcatctcttagaaattttcttgattttaagagttgtgcttgaagttggaggtgaatttgtgtacgattcttggtgttaggagcttgagaatttgtggtaagcctctaagtttccttttgctgggtttcatttctgttatttgaatttgaatagcttgtgttgttgttgtttgtgtttttgaatgtatgtatgtgaggtatgtttaatttgaggtgttttacctaagttttattattagttgggaattctagttaatgttatggttattgggaaactttgattgaatttagagtgtgtgatctcaagtttaattttgatttttctgaggtggaagtttgaattgaactttttgagatggtgtttgaatatgtgaggttatggttttttgattttaagttcaagatttttgatggtggtaacacttgttgagcttgatttggaattgcatatttggatgttattcaaagcttgaattgtgtttttaataccctattggaatgactataatttgtggatattgaatttgggtttcggtatgtttttagttgagcttggtgcatgtttgggctggaattcgtgttgctaaattggtaattttctgggtttggaaccccggcgccgcggccccttctacgagcatcgtggcccgcccacttgaatctgggttgatcaacccaggtgccgcggcatgcttgggaagtgccgcggcccgccttggggttcttgggcaattttcaatgttaattttgattgttcataacttttgaatccggagtccatttggggtgttccatatatcgttggaaagctcgttctaagctctatatgtttatttgtatttgaatgccaactatattattatgtggaaatggatttagggattaacattatttgtgaattcctagaattgtgactagaattaccagcacttgttcattagcacctgggatttggaatctccatgtacttgggacatcaggtaagatagtagttagcacgtagatttaagtgcggtggtgctcttgtttattattataattgtgattaattgagaaccgagattaggattattaccctaaagtgagcagtaatatggcctagggttattaccatagtaatttaatgattttaaatgctatgtcatgctagatatatcgaagtaaagaattatgcattcaaggcataatttagttagactcgataattggaaccgagataaaccattctaaggccttgttttaattaaacgtaagtgtaacacgtgggtctatgccacatagacataaataggcgtgtgagcctaacatgcaggtctatgtcaaatagacattaagtgtaatggcattaatatatatgagaaatgttttattgtgtatattcatatttatcttgttttgctgagcttgactcacgggtgttctactgtgcaggaaagggtaaatctatctgtaatcatcaaggagttcgagagcttgacgatggattgtacatgttcgtgttggaaattattt

SEQ ID NO: 295304 - DNA, 2342 bp, Cannabis indica
actaattaataaaagattaaaaatcattctatgttgcatggttcacatgatttctttcatgaatatatgtataatgtataaattctattaaagtcaaaacatatagttattatagtgttgtcaacacagtgaaatataagcatgattatatgttttaaagtttaagtcacatgatttgtcaatacacttgttttatactgacatgataatcaatgataaaatttacttacaccttggataagtattatgtcctttctagggtattgacaaagtatactagtatcagatgcatggagtatacattggacttgaccgatattgattttggataagatatcaaaagcttaccaatatatctatctatgtcaatattacttagttgatcttaggtcaatagatcttaatactgagatggttaggttttggcttgaatatattatttgtgttgtttaacttgttcattaaagctgaccaattggatcgacccaatagttacatcttgggaacatgagcgctaatcatagatatggaatctatagcttatataacttccaaaagtgaaacgataatttttttctagcttagcttaacgcgataaatgattgagatctcatttcaataattatattagttttaaaatacacaatgtgtgatttcttgacgaaaagattcgattttgaccttcattgtggttcttgactctttgagtcatgaagaacaggaagaccacgtttgagtttttgaaaaactcacactttgattcatcatcaaccttgccttgccaaatgggtcttgtttaagacctggtcagccataaggtcttttcattggagttggcctgccataggggttcaccctagagggctagccagttcatgcctaggcctgggaccctagccgaatcttggctgggtcattggaccctggctagtcctcgcattgctcggaaaccctagccagcctaggcctaggttccaagcaagcggccaagtttctatcctcttttgacctcggcaagaatctcgttaaggcgttgcatgcatgtacaaaattagtctcataagtggttcctttagaaactctgtacaaaacttactggtagtctattattgttgaatgctcaacttaagactcaacatttatccaaattattatacttaagacggtactttgctaatacttagccttgtatgatgaaattgtttggcaagtacccttgagtaagattggccaaaaatttgtctgtacctagttgctttgtcatgtgtctcacctccccttgtctcttctgtgcaggtgaactcgagtgatagtcatgggagatgacaaccgcattgataaagatttatttggtcttccctttgtgatctattatctagttcattcccttagaaacttcttgagtgatcttgagactagtagtggtccattatggcaaggatcaaacagacctgccgtaggcaccttttgaccctcacattgtcaagctagttactaaaggtagggttggggtgattgaggaggctacacagcctctaaacagcaaagagccagaggttggccaagcagaggtgccaatggccgaccaggatgcgcacaactcggatagtgagtccaaggttgaggaggttgtacctgttaggaggcagctgtacaggacatgttttattttcctcaactgccctttgggcttgtatgatgagggtgagtggccctttaatagacttgatcaaccttcaagggtcggagtggaccatgttctaaggatggctgtcgagcctcaagctcttgatgagggggagcagcaggaccaatgggtctctcgtccatccattatcagtgctgagacacttgacaggattagggagagtggactaataggtgatgtccagtgtgaccagccatcaagggaccaacaagtgcatctattggccctcaactagatgacgtggtcagagtgtcacatagagtagggatcagtatttctcctacacccctattttaaagacatcacctctgccttctccatcatcatcttcaccagagctaggaaccagtcaccacatgatcttccgcaaaagcatagcaacaactttcgcactgcatttcttgggtttttgattgtattttagtagattgcatttgagtgctctatggctatgtgtgatgaaatttgtttttgattctagcgatgaatattcaacattttggtggttgtcatggtcatctaaattaggtgaagttctaaactgttggaaattattttaccaggatcttagatctactcacaagtatatatgttgattaacaccctaaatatgaacttctataacgattatgaa

SEQ ID NO: 295305 - DNA, 3623 bp, Cannabis indica
attatatattactattgtgttctatgttatatacaaatagatcttgagttaattattaatttttctatcatttgagacaagaagaaacacttgtactgaagtaagcaaccacacaaacttgcaatcttcgattcttcatcaccaccctcaactgttcactaaaataatgtttattctcaaggttagccttttgactagattgacttttctgtcagcactcatgtattctcattgcaactccacaaactactaaatccaatagcattttagtatcattttcttttataagaaaaaaaaaataaacgtaatgagaaatccacgtgttacagataattagctacatgggaagaaaataattgtaaacttttaatttacatccaaatactcgcaacacaatattattattacacacaataccacaatattattatattacatcatcataataatctaatgaacaccacagcattagcagcttactcaattaaacaacactacacttactaactatacacacacaagtagtcctaaggtggataatacacactgattcattcaatcttttcagcttgggatggcagatactttttggtcaacatcatcagggtagttggtgatttgataacgacgaggaacctcccagtgttttagtgcaggcatggccttcttcacatcctcccaatccaatttcagcatcttcagttccttcaaacacaaaccttcaagtacaccccatttgtaagctgagcattggtcattttcaaatttaggaatgaagtctgtgatgtctgcatcttcaatacaaagatattgtaactctttgagagttgaaggatgaacccaattgggtagcctggctctgtggaagctcctaagatacagctccctcaggctttctggagggcacagaaaatttatctttttaaatactttgtcatctctgcattgatcagcatcaatatcaagaaccttgagattcttgagctgcggaaggatatcttttagatcattatttgagatttgaatctcatcattgcttagaacaatatgtagcattctcagctgggttaatatttttagctcaagaagcccgcaaaccttgggttttgtctggccaaccactctgaaccctgtaagctcttgaagctcagataacatctttaaaccctcaggtatgtactcgaggggacaacctcccatatgcaacaccatcagccttctcaaattggctatggaaggagaaagcctttttaacttggtacactcattcaataccaggagttttagattcagaagttcacaaattgaagatggcagttggatcaaacctttgagttcacttaaattcaagcaagcaaggcgtttaagggtactgatccaatccaagagattcttcacatttttctcgtctatagaactgcagccagcagataaatccaagaccctgagagaaagtagctgtcctgagtttctactgaaatcgattctacgacttccagtgagaaacaatgctcgaagtttcgagtttgctccgaatgaagttaattccatttcatctgtgaggcctaaccaatataaatctggtctccactgtatgatacccttctcgttaaaggagcaaaatccttcttcttcatctgcaattgttataagcaactcacgtaccatatcatgtatcttgcaagaataaactttgtcatcgtagctgcgacgatcaacaacttcgatcaaacacctactggccagtttcgaaagacactcatagcccaattccaatacagttttcttgtcctccattgctttcttctgtagaaagccttccccaacccaccaatgaattaactgctctgcacttatcacatagtcttcaggataaatagacaagcacaaaagacattgctgaagatgaggatccaactcactatagctccatcgaagagactggataacttcatcattccctttgattggagacttatgaaacttctccaacacctctgtccatgtcttgaccctagtctttgttgaaagcaaggatccaatagtcttgattgatagtggaagtcctccacatttttccgcaatctttttgcctatttcctccaaaactttagaggatttggctgatgaattagatcctttatcagtaaaagcccaagcggtgaataacgaccaactgtcttcattgtttagaggatttggctgatgaattagatccttttccactccaatgctatcaacaacctctctatctctgctagtaattacgatggtgatatttttatcctcgaaagtgaaaatggacttcaaatcatgccaccaactgttgtccatactccacacgtcgtccatcacaattaggtagtttactttatcatcctttcttagtgattctctaagttcttccatcaaattgcaactatcaagtttgcttggtattctatctggtaactttttcaacatcagcttcaaaatcctgtgcttgttgaaattcctggtaacattcaaccatacgacactgcattcttttgggatttcatcaaagactttctggacaagggtagttttccccaaaccccccatgcccaccacggcaatgatttgaaatcctggctttgttgggttaacgatccaattttttagcttccttgtatcttcttctaatccaataataccagctggcttgtcctttagggacagtgcttgctggggatcataatcttcttcatcattacaacccgactttctcgatttttctaaatgtccagagtactgacccaaggtgttgatgtgttgttgtatatgtgaattgatctccttcaatttcttggattcttgaagcgaaaaaaatggatcatttccacggacaaaactgaaacaacaactttgcgtgggttcttttttcattaagcaatctgtgagtatgtcgtttgcatcaaaaacctgtccctttaattggatcaaagtttctttgactatccctttttcctgcttcagactttttttctcgtcgagtaattcagtggcctgttttagtttattttctaactgaattaactgactcccaaattcactttctgttcttgcagcctttattagttcctccgttaacaccggaataagagcaattactacctccattgattgttgttgtttgcgatgatttcacagtttcctatttagatttaataaaagagaagtatatatatatataaggtaaatatatgaacaactgagttgtattatattacataactaatagaattataagaatagcaatcatgtaactaataattgtgatacagattctgattctaatatagcgtaaaacaaactcaataatagtgtttactttactgtagtatatctgggagaacaacattcaatctaatccaataacaaaaaattatatattttattacaattaaattacatttagatacaaaaagttagattctaattagataatatgggataagatcgatgttgaaaattatctgattctatctcaaaactaattagtaataagtggaatagtcaatatctattctatataaattgtgcatatataacagaattcttggtttataagagattcatgggtgactttttatttatattaa

SEQ ID NO: 295306 - DNA, 11107 bp, Cannabis indica
attaatatttacacatattcctatataaaaataaaaattaaaactccaaacaattaataaaataagtttagagcaataaataatatttataaatgtagagcatgaatagtaattttaaagaagctttaaaatagagaatgagtttagaacatctgatgtagcttgtttttagttcagttctttaaatattttagaaaatctttattttaaaacatctgatgtgaatgctctttgactagacaatgaattatactggtttgaagaagtctctgcgtcaattgttgaagttttatcaaaaatgtcttaatgtaattcagatcatgttataaaaaaatattaaacataaactatacatatgtatttaatttgaagtaaaaattaaactttaagttgccaaaaacaccacttacaaaaataacatttattagagaatactaataaatggtatggagtctataatttaacaaaattgccaaaatttgtcaatagtccaatatttgacaaataagagtatcgtattgcaaaggactaaaaagtagaaaatttgaaatcattacgacagttttataatttctcaaaagaatagagacgtgtttagtgcaaacacataagtcgaaagggccttttcgtaatttgaccatactctttccctaaactaaaaacaaaaccaaaggggaagagagagagagagagaaacgccgaagaagggtttgggttttggtttcgaaaggaaaaaaaaaagaacgattatagagagtggctcgagtcaagactcacactcggtagtgtgtgttagtttttgttattgcaaagcacagattaaaactccatttttaaatagccgttaagtgggttttcttctcccgccatggctcagctcgagacccagtcccagagccagagccagagcccacagcaacccccattagacctcatccaccagaccaagtctttgatttccgctctcaacttcgtctcccggaacctccctctccctgctgacctccttgacaccgtttcctccatctattatgacgccgaacgagatgcccaactcgcaagatctgaccagagtgactcggtatgtttttcttcgcatacccttcttctgtttttggtttttgactaatggggtttcgggtttttgacgatttttaaattttggggttgaattttgattgtgggtacttttcaatttgggattttgtttggattcgtgaatctgggttcttgtttgaaaggatgtttggttacagcatgtttgatttcggacttgtatctgttctttttctttaattgtacttgttctgataaatgtttacatatagctacatggagacctttaaggccacgcttaggctcaggcttttgtttgtttgttgttttttatttcgagtttttaaatagaacttgttgtttttgataaatttgtaatgaatgttcttccgtgcttttgaaaataatcacatccacacatacaatatgataaagctaggcaattttgatggtaatgaagctcctgcaatcagcgaggattagaaaaggaaaacaaaaaccattctttatgtgaagttcatggtcccatttaaagccaactaattttattcatttctgattatcaacgttcgttgttcattggtttaaagttttgtgaagaaaaataatgtaaaatgtgtcttttcctgtctcttgcgagcacagtttaaataaaatatttggctcttttagcaccatccctaaggtaaagcactcgtagagtcaatgaattaatttctgatgcaggacaagaaagttttcgattatgttagataagatcattttgaagacttgaccttgcataacctttttgagagtaacagtgcatcattagcacctaagttgcatttgttgggtgttttttcttatagtgttggtatttgatatctgtgacaggaaaatcatgctgatatttccgaagaattgttacctgaacttcaggaggcactgcttaaacagcgttctaattgcatgtcaagttttgaattaacagaatcaagggataaacgttatcaaagccacattcaacatcgattaactgaacttgaaggtaactatttcatataaacgttgtcatttgtctcagttttgagagcggaagaagttgacattgtcattgggacttgaatccagtctgctcctacacatgcactcacacaaccatttgagtagtctcaaattgcattttttggggcatgtttacgaatttatttgttgcattccgaaatgtccttaaaaaacaagcacttatccagatatcatatttttttaaatcagaattaccttcaagtagaggagaggagttacaaacgaagtgcttgcttgagctttatggattaaaggtaaacttgatggattgaaatttatttgaagcatgattcaaacattggttaaagcatgtgaagttcatattgtgcgaaaggcataggagatgagggaatgatttgcttggacaggaaagattggtttttagttgaaaaaaattgtattgaatttttttccccattttaaaaaatcataaaaaagatacatttacaatttgctttctgaatattgtttcactgagagataattgaatttatgcttgtgttacatgaaagagtctggcctaatcattgattcaaggataattgtttgaaagactatcaatacagtaggagtttcggtttcataatatctaatttcctcttgttgtgtattaagaaataacatgggttctgtccttgtgaacaaggactttttctctggcagctagcagatttgcaaaagaaggttcgtgctgaagtcagttcagagtattggctacgcacaaactgtgcacatcctgacaaacagctatttgactggggcatgatgcgtttgcgtcgcccattatatggtgttggagatgcgtttgccatggaggctgatgatcaattcagaaagaaacgggatgctgaggttagtacaatatatcatgtcaaacctaatgagaagaattttgttgtgaattggaggctgttttgctctatatcattagcaagtgaattgtgtgttggaaattatttgtttgctgacaattaaatgtctaatacagaggctctcaaggttacaagaagaagagaaaaatcaggttgaaactcggaaaagaaaatttttcgctgaagtccttaatgcagttcgtgaattccagttgcaaattcaagcttctttgaaacgccgaaaacaaaggaatgatggagtcctggtatgttatcactctatctccctcttcccaacttttacttgttcaaatgggaatagttatacatatatacacataacccggagagacacgagctaaaatgtcgtctaaaaattcttgaatttcatggtgatctaaatttccaaaggaaatattgacaatgaaaaataagttgcagatggaagatgattttttttttcttactagttttgcaaaatatctataatgtcttgtttaacgaattagtagtgtgacctatggttattttcttgttaagaaatagttaggaaaattgacatgcattgcaaaatttgctaaatgatataataagagtgctttaacaggcatggcatggaaggcaaaggcaacgtgcaacacgggctgagaagttgaggtttcaagcattgaaagctgatgatcaagaagcatacatgagaatggtgaaggagagtaagaatgagcgattgacaattcttcttgaagaaacaaataagcttcttgttaatttaggagctgctgttcaacgtcagaaagataataaaacttcagatggaattgaatccttgcatggctctgaatctgattcacctgagttggatgatgaatttattgattctgatcggaatgatgaggccaacgacttacttgaaggtcagcggcagtataactcagcaattcactccattcaggaaaaggtaagttatacattcttttctcattgtattattgttcttatttatcctcttttatctaaacgtgtcattcagcctacccatattaattatccataggtgaaccctatacgttttattcctctatgtcatttgtaattaaatgcaacctattggtacgttccagattgtctaagcggccggtaatgtagtataatgtcaattttctccaaagttcttgttcactaatatagattttcagccaggggcattgcactttctctggcagttttactaacattttctgcttgtccaaaatttccatgtcttgcaacttgatgagtatcatgattactttgtgaactttgtacatggttttgcatatgttattaccaatgtttgatgggattcttatccatttgtctttctgtactttgtgataacttcaaagatcttttattttttgttacttcttgtgtagtgcctttttgttgcatttttgttaatgggaactgttttgtaaaagaggaccttactgtaacttaataataggtaacggagcaaccatccatgctacaaggtggagaattaagaccatatcaggtagaaggattacaatggatgctctcattgttcaataacaaccttaatggaattctggctgatgagatggggttaggaaaaacaattcaaaccatttctctgattgcttatctcatagaacacaagggtgtgcatggaccccacttgatagtggccccaaaagcagttctgcccaactgggttaatgaatttgcaacatgggctcctaggtatgttcaatgtattctttaataaatctctctcattaatatatcaaattaatagatgtagaaccttcagaaaaattaatagatgtcgaattttcctttttaagttaccgaattttcttaatttctttttagagttgctgacttttcttattcattcagtattgcagccattctctatgacgggcgtctggatgaaagaaaggcaatgaaagaagagttagctggggaaggaaaatttaatgtgctgatcacacattatgacctaattatgagagataaaacatttttaaagaaaattccttggtgctacctgattgtagatgaaggccatagattgaaaaatcatgaatgtgctcttgcacagacacttgcagggtatataattctatgttcatcataaaggctgcatttctttgatgtttcaacatatgcctaattttttagtctttttttttcctttcagactttgaccatgctgtttccatggatgtatacaccatctcatttctagttatttgtgctctttgtgttgcattttatgcagttatgatatgcggcgaagactcctattgactggtactcctatacagaatagtttgcaggagctatggtccctgcttaattttcttcttccacacatttttaattcagttcagaacttcgaggattggttcaatgcaccatttgccgatcgaggagatatttctctaacagatgaggaacagctgttgattattcgtcgtcttcatcatgtcagtgtcttatcattgtttcctagtgtcttttttctatcatttatagtatcttcttgggtccttatttgctatggatttacaggttataagaccatttatattgaggaggaaaaaggatgaagtggagaaataccttcctcagaaatctcaggtcatactgaaatgtgatatgtcagcgtggcagaaagtatattatcaacaagtcactgatgtgggtagagttggactagataatggtgagtaggtttcacttttagttttcacattctttatggcaaacactcttttcaaaatgtcttgtactcgtgtctttattccttcccaacaccgttgttagcaatttcaaatttccagcagatactatttataagacagattgcatctacacattcaataatgttttacttttacttatggttatttttttgcaggtagtgggaaatcgaagagtctacagaaccttacaatgcagctgagaaaatgttgtaaccacccatattttttgtgggggagtataatatgtggcgcagggaagagatcatcagagcatctggaaaatttgaattgctggaccgtttactcccaaaactccaaagagctgggcatagggtcctgctttttttcacaaatgactcgtcttatggacattctttgaaatatatctacgccttcatgaaattaagtttcttagacttgatggttcaacaaaaactgaggaaagagggactctgctaaagcaattcaatgctccagactcccctttcttcatgtttctcctgagtactcgtgctggaggtcttggtttgaacttgcaaacagcagatacagtaattatttttgacagtgattggaatccacaaatggatcaacaggcagaggatcgagctcatcgtataggacaaaaaaggaagtcagagtttttgtattggttagtgttggatctattgaagaggttatcttggaacgtgctaaacagaagatgggtatagatgccaaggtcatccaagccggtttattcaatacaacatcgacaggtttgttatacactctactcatgttattcaatacatgcctgctatgccaatgatgtcttaaaatacgtattcatcggtgtattcttggataatagagtcagtccaatttttggctcctacatggtctagagctctcagagtttgaggtcacctgatggaacattttaattttcatgctttccttttctctttttctttgtttttgaaaaaaaaaaaaaagttaacccactctccaattatcataccctctatgccaatgtggtcttaaaatacatgttcattggtgtattcttggatattagagtcaatccctggtgatccattttaattttcatgatttccttttctctctttataatttgtttttaaaaagaaaagaaaaattaacagggctctccaagtatcttatacccaatgcacatttcttattggaagtaacaatcatcatgtactttttatgcagctcaagacagaagagagatgctagaagagatcatgcgcagaggtacaagttcacttgggacagatgtgccgagtgagagggaaatcaaccgccttgctgctcggtcagatgatgagttttggatgtttgagaagatggacgaagagagaaggcaaaaggagaattaccgatctcgacttatggaagatcacgaggttcctgaatgggcatattctaaacctgacaaagaacacgagaccaaagggtttcatagcggaagtataacaggaaagcgacgaagaaaagaagttgtttatgcggattccctgagcgatgtgcagtggatgaaagcagtggaaaatggagaagatatatcaaagctttctggcaaaggaaaaaggagaaaccactttatatcagagaccagtgaagctagtaataatagtaacggtgtggaagaggataaggttatagaactaactgaatctacaccacttgccagtgagggaacaagcgaagacacctatgctcagacaccactgatgaagagactcaagtcagaagaaggaacaagtacagagagacatgattatgaaggtgttggtgtaagtagttggaatggacagatattgacatggaaaacccacaaaaagaagagatcaagctactctactcagagctcattctctgattctagaggacagaacagtaatggaagaggaaatggatggagttgatcatagttagattggtggaaaaaatggataaaatattttggtagaattgtctcttcttagtacatattcagcagccctctagattttgtacatgggtctgagctgtgacaagcttttagctaacttgttagggcagagcaaggcattcaaggccatatgaagatggctatggctaatgcccactcacaatccatttattattctactttgtaagactatctcccacagtcttaaaggatcaatttgtgctatatttagcacaaaaagttaatgtgatatatttggcacaatttttaacaatatgcttcaatgcacaagtgtaaaagttcatgaaaaaattaatttttcaattaatgctcatttaatttattgaaaaatacacttgaaataataataatattttttcttcttaaatttagcatttaaatgatttaatgttaatagtgaaaaatactaataatattaaacaatgagataaaagtaaatataaaaaatatagcatacaaatatgttaggacttagccagcacttcttttggtgcagtaattatattttttttaaagatggtttaacatgtctttttggagatggtataacatgcatatagaggagtgctaattacaatttcttagtcaattttcgttcgaaatcacatgccgaatttttttttataaatttttatagcggtattcgttataattacaatatcatcccctaaaattttcaaaaattttgaatagtttatagtatcaaaaacagaatttctattatttcagtttaccacacgtgtttaaaaaatttcaatgtatttttagcaccgtaaattatttgaaattttttaaaaatttacaaagatgatttgtaagcataacaaatgtaaaaaaattgaaaaaaaaatattctaacatatttcaggcatagaggttgacaggtaaggcacatcgtcaaacaccaaatttcttttttctaagggcaggcattgcttgacaaatatatgtaaaacataagaaagtaacactgaaatacaactactctataatcattagtaacacccatacaagacacttttgctgtatagcaaaagggcaaatactagattcaaatattaaaataatacctggtaagttccaagacaccattttttttgccaagatttatgatgacataataaactcgttgaatccaaaaagacaacttaaaatggaacaataaaccaaataactaacaactaatcctactgatatctttagatccaaaatgctttgcctaaactaccccatacatctcttcctcaaaataagattcagtagaacagtcaatcctaatgcttaaatgcctccaacaataaacaatattaatgactatgaggtttacacgctataataatggagaaacaattgaaatacagggcctctagtccgcttcatcaacttcaaggtttttcagctttgatcctaattcatcttcatcctcaccaccttcttcattatcattatcatcatcatcatcagcatcagcatcttctccctcaggatcattctcatccaaaggaccaagaagatcaggagttttcttgaaaatatccttcacctcgtcaatcccttcatcagagatgtaatttccattgatgttcaacaacttgaaaccaggcttttggaccacaatctgagccaaaagacgagccccggctcttcttattaagttagtactcatatccacttcagtcaattttgagtgaccttctaatgcattggctatctgaatagtaccttcatctttgagttcattttcagacaagttcagcttactgagatgcttcatcgaagatatacaagctgcaagggcaggagcagcttcagcagttatgtcattaccagccatatccaaaacttcaagtaaaggagctgattccttgagagtgttggctatagcaactgcaccctcattttccatgttaatgtaactcaagtaaacttctgtcatgtatgcgtggttggacagtgttttgctcaatgcaattccactccacaccaaacatgttgtccctcaaatcaagcttctttaaatgggtacacgtagctagagcttcagataaggccactcctccttcggcaccaactctcgtagaggagcaacgaaagtcctccaacagaggagagcgtttcacaacctcagagatagccactgctccttcatctcctgtcatattattgtgaaaatgtaggattttaagtttctccgtcgaaggaatcaactcacaaattgctcgagcagcttcttcggagattccatcattcatcaaatagagctcctccaactgagattgtgatttaagaagggctccgaaagctctaacacctttctcacccaaggcattgtttgagagattcagagacttcaaaacactgccttccaaagcttctgaaaatatattcatcaccttcagagcttctgcctcagatctcccagctaccaaatctgatagatctacttctttcaactggcttttaagtgaagccaaaatgggatcagcaacttgggctgcttctaaaccaaagcttctattgctgaagcaaatctttgaataagaattccctggctcctgtaatggctttagaagtttttcaacctcttcagcttcaataaaggctcgtttacctttagatatatcaaaaaaagtttcattggagacaatatgattttccttgtcctttttaatagaacctcctttgagaacttgtaggagaagcttactgcattctcttgcgtatagctgcaccgcagaacctccatcaccatcaggctcgttttcgtgatgttgatctgctgtgagaaatgccttctcttcaatgtactttgcattgtcttcagcatcttccttgttcagaattccatacttttgagtgaaaatagattcagttgaaagattgtttatcatccgctccacaaggacttgcctagtgttttggctaggaggccacagtttgattgaaaatggccgattttgtgaagtcatagtagttgcatccattctaactatgatctacacatataaatttttttattaggcaagcaacactttaaaatattcaacacattagattatacattcttaaatcatgataaataaatatatatataaagtaggaaatagcgagagaggaagcaactaagaagggccgggacttgcagtgcgagaagaagacggagactgtagtcgacagtgagtctgagtctgagaaaggagcggctgctttggttaaggcgaactgggcaagagagacagagaactagggttagggtatgtattggccttgggcttggtcttaggccatgtaagtttttttttgggttcagatgcaaaatgagactaaatttgctaactaagttagtaaat

SEQ ID NO: 295307 - DNA, 1310 bp, Cannabis indica
gatgttaatgaaacatacttgttagtaaatcctgatcctggtaaaataatttccaacaatctgaacctctagtcagggagattgttcaaggtatctctgctacttcttttggtcttaagaagaagaagaagattaggaaggggagtatacctattgaagttgttccccttgcccaagacagtgggaaggagaaatctaaagctattagtgctgatgaggatctcccattgatattcctccagatgagactgagaatggtgttctgaacacaagttcagacctagtggagaaattgcgtgtgcagtgctcttgtattcttgccaatggtgatgccttgattggatccaacgctaagaacattctgctgtagaagttggttagctctaaacttccgtatgtcatcacccaaagatgcttcaccaatatctttgaggtaagtttttttcttgtctcctcttgaataaactttcttttgcttatccccacctgactttgtcttcttgctttcagacttgtgtcggttactcttacaccatgggtaatgaacacaagaaggtggttgaacttgctgaaaagctcaagatcaggttgttggcttgagagaaagcattgactctctagagaaatgtatggctagtctctgagaagtgggtgatggtgacaaggcttgagagatcaatttgaaaaagagcctgactgctgcttggaagaaaactttagatattgaagattcttctcatctagcacttgacgcgcaagccttagctgcttctcagcttgaagataaagtcaaagttttgagggagcaagtgactacactagaggagcaggttgttgttgatgtcaccttttatgatggcttacgctttgatgccatctaccatgcttggtcttccaatggaggagcacagccgtttaatatgtcgaccttccataccacaatagtctccttaattatttataaggcgatgtgagcaacattttaatgaagatgacccagtagtcgaagaagctgcaagggtcaaaggctacgaccctgagcatccctacattcctcctcttgcatttgatgcgccatttgtagggaatgaggaacaagatgaagcttttgttgacataggaagcttctaggacgttgtcttagtccattcttcttttatatttttagcttttagcattagtgtgttcattcgtcggtctgagcagtctttcgatgtggacaatcctcggtaaaatgttctaagaattatttgagttaaattagaaattattccgacgtaataaaagctttattctgatattttcttttt

SEQ ID NO: 295308 - DNA, 9422 bp, Cannabis indica
atatataatatttttttttcacaatttcggaaccttgagcgtttggaggccgaggcgcacgcctagcctgcctaccctcagggccggcctgaacacaccaattgaccacgacacccttcaatcacaccaaaatctcatccaaaaatttccaaagttactccaataattcatacctctaccaacaattctaaaatatcaacattgcccaaattaatttacccccaaaaattcaactaattggcatctatttcaaggttagccctggtcgactgacagtgaatacaatttgggtgttgaatctatttgaacatgttgaattggtgaagttgcacatttgggtttcaagtgacagtgacagtgaatacagtacgtaatctttcttgggccatgcagcccagtatgagaagcccaataagagaagcccaataacaaacccaactgtgtttcattttcatcctttgcaaacactcatacgaattcttcttcttctttctctatcggcgactaaaccctagaaatatcaacctccttcactaactgatcgctgatcggagatcggagagggagaattccgtttctcttattggccgtcggattagcaattgcttcactcgcaacaggtacgctgtacttacggatttgaggctgctaatgaggattaaatacacagagagagagagacggtggagactttgtttgattgtttgagttttctttaagtgattctctttgttctgttgcatagagttgttctacattagcattttataggattatgatttagctattaattttcatacgagattttgtttctgatctgtatggttccgagattttgttctcaaaacttttttcatttgaaatgtaagggttagggccaaagaaagtttcagaattttttgagtttggttcagtaaaagaatttctgtttctttcatgtgaatcttttttgtatggcatttgttcctacattcattttatttcagtactgtgttcctaggcaatttgaattgtaattcatagtgacaaataagttacctggagcaatgttgtgttgttgattggagaaataatttgtagatgtttcaaattttactcggatttttaataggagaagcgaaataagaaaatactttattaccaatgcaattattattaatgacctgtttagagatgttttgaaccaaatggacaatacttcaatgattaggtaccaactaataacctgtttagagaagttgtgaacaattatggtttattcatttgcatctcttcagcattgttgttagtatatgacgtgtttcagttaaaattgtcacaaaaaattctgttagataggcatttattatgtaggtaagggataagatacaccatctttattgaaccaataaaaagagtttaagacttggcctgcccatcaacgtgagtggggtagtacacagctgcagacatggcaaaatgtttatttatttttctcctctcctatctttgtttttgaagtttggctttggtattgatgttattggcttcgagttatctttgcggtgcgttgggcatttgaattgttggcacaacaaaatctgcaaccacaccactttaacatgttagagacatgcgttgacatcttccatcttatgagcatgaaaatctgatgctacagattttgtttgagtctttgctagcttcttggtctaggtttcattgctttttctgtagacattaacgctgaggcaataattcttgctgctttttctcaccattctgtttttacccgtggggtttttctccttaagattagttgtagctcatagtctatcctttcaagtgtatctctgatacatgtgttgtgtttctatagcaatgttgatcatggactactactgcctatgcactttcggtttattataacttacaagtatacatggttggaagtgtttccactttgtgttatgacctctgtactacatgattcgtatatcaatatcaatgatgggtagttctaaccttttaatggaaagaagctaaaatgtagtattgtatcatttttcttttctgactactctagagttgtgtctgattgagtcaaaatatatatgtattttttcattgataaccatttgcgtgcaactaacagtgaagcttgtggttttttgggaattaggattggggctttttgattttcttgtccaagaatggcgaaggaggagttaagggtttacaattccatgactcagcagaaggagatcttcaagcctaaggtttcgggaaaggttgggatgtatgtctgtggagttactgcctacgatcttagccatctcggccatgcccgagctgccattaattttgatgtcctctacaggtctcatatatgtaaatattttgtttattatattgtgaactatttatttatatgtataaattgattggtttgaatatgtgatgttatttatataatataattttactataattattgtcactagttgaaatttataaaaatgaaaactttattggtagaaactaaccatcttttactttatttgtcattgcagatatttacaacacttgggttatgaagtcacatatgtccgaaatttcactgatgttgacgacaaggtgaaaatttctgatttgtttgtagttttatgatatttctcatgcttggtgtttttgtttgagcttgttcattcttttccctcgttcctgttcctcagaatagttagtatgtcaggatataatttgactgaattcttaaagttgtgaatatgctgtttcaattggattggaaattggcaaaccatcttattataatgtccatgcttgtgatatctaaatcttctttcctttgtttcctgaaatttcactcttcatgtacatgcactttccccacttgcttttctaaaccctgaattatgagatcttcgaattttgatgactaagattggaatttatgcagattattcgtcgggcaaatgagattggggaagatccactaagtttaagtaatcggttctgccaagaatacctttctgacatggatgctcttcagtgtctccttcctacccatcagccacgtgtatctgatcatttggaagaaataaaggatatgatatcgctggtaactattttcccgatcatatttttgataacttaaagaccccaactgctaaaggatttcaatattaattagtggtgcattcttcctaagatcttatttatgggattgtattttaatataatatttttttcatcgtactttgcagatcatcaagaatgactatgcatatgcagttgatggagatgtattctttgctgttgaaaaactcccaaattatggtcaattgtctggacaaaagttggaaaataatagagctggggagcgagtggctgttgattcaagaaagcggaatccagctgactttgcattgtggaaggtctgaaaggctatacaagtttccatgtttctaatatttgatataatatatatatatatatatttcttattgtttttgatgttttatgatttttgcaggctgcaaagcctggtgagcctagttgggacagcccttggggtcttggaagacctgggtggcatattgaatgcagtgctatgagtgcgaaatatttaacattcaagtttgatattcatggtggtggaattgacttgatctttccacatcatgaaaatgaggttgcccagagctgtgctgcatgccaagagagcaatgtaagttactggatgcataatggacatgttacgaacaacaatgagaaaatgtcgaagtccttgggtaactttttcactattcgcgaggtaaatttttagtcttttgggtgtttttgaagctttaatatgatatcagataccatcatttaagcatgtgtcattttatattgtagattattggaaggtaccatccattgtcgttgagacactttgtgttaagtgcacattaccgttctcctctcaattacactttctcccagctggagagttcttcagatgctgtttattacatttatcaggtttgaagctttctaagaaacttgaacaatgtttaattgagattgtgacctaattggaatatgtgttaagttactgcaagctgagatttctctttttcttgcattgatacttttgtttgagcttctttatcttggcttaattattacttttagttgattttgtttttttaattgaaatccaagtaattgcatcaacttagtttaaatgactggtatttattgggtttcccctaagaattttcatttttgaagaagtcctttagaacattgtttaattgggaatccaatctgaggagctgttacagaactatttcacattcaatatgatcagatcttttgattgctagactttgcaagactgcgaggattcattatcgatgtttcaagaagggatcttgaaggaaggagcagatcaaagtggcaaaaccattcaactcgatcctgctgacgctcaagaatgcattcgtaagctacgcagtgaattcgagactaaaatgaatgatgacttgaacactgcgcacatattgactggtgcgttccaagatgccttgaaattgataaacagttccatcaacgcagttaaggtaagagtttcaaacaaatgaacaatctctctctctctgtgttgaggtgttaggttaaccgatacttttgatactttaacagaagaagcaaccgaagaaacaaaaacagcagaagcagaagcagcaggatcaagcggatcaagaagaacaacagaagcagcaacagttgttaatgaatcaatctcttgttgaagtgaagcaagaaattatatcatttctaagtattctgggtttactatcctcacattcatacactgaggtaatatgagttatggcttgttcttatcaattcaaggtagggaaaaaaatatattatatcgaatattgaccaatatttccctctacaggtactacagcagttcaaagataaggctttgaagcgagctgatttagttgaaagcgatgtgaccaacttgattgaagcgcgagcagaagctagaaaaaacaaggagtttgcaaagagtgatcagatcagagccgatttaagtgcgaagggaattgcgctcatggatctaggtaaggaaacaatttggagaccgtgtgtcccggtagaacagcaacaacagtcagttaaaacatgaaagttctttctttaatccattagcttggatttaaatggtgcattttgcatatcaaagtgcaaaaagtaaaaaaactgtataattgcttagcattacattattgatgttgaggctttttcacttgttatgtaaaccccattataagttatcattgtttttttttttcaatcaactcaatctcatagcttggcctaatacactttttttttagttgaatacccaacaaagctacttgaatggggatatttgtaaccttctcacattaattttatacaaaggtttttgtttcttatatattattttcccttgaatgtaaaaagaatcaattttctctgtttgatttcagtttaagaaattgaattttccaccattttgataggactatttcttacaaaaattggaagaaatgtcaaatgttattcaatgacactaatgaaatattattacagagaatcaatggtttaataaagtcaacaatgacttagacaaggcttgactattgctcatctatctatgttcccaggtcaacactctaaagaaagatcttaatttatggaaatgtagacttggcttttcaatgtcactcaagtcaaatagatattttcataaagagggtgaactatgattattaattgctgcactaacaaaagtgtatggtagagatttctctatttttaacacttctgtattgaaaataaaatttaaacatttaattacacgtgttaatattttttttataaatgtgtaattaattattttaaattttattttaatattataaattattcaaaaagttattttttattttatataagggtacaattaattattttaaattttatatttaatattataaattattcaaaaagatattgaaaattggtagaaatcttcatatagaaaaaattaagttacgatttatctaaatattaaaaatataaatatctcaatttactgattaggacaaaagtgacattcctactataattgttcccactatacatctatagcaaataaatttaaatttaaatctaatttaataaatgaatattataaatattttttgaaagttaaatagaaatttttatgaataggtaaattaaacacaatccattacatgcataaattgctcatgagcaaaatcaacaaagataatcaagcatttatggtcacaaaaacattattcaaataactaaaaatctaaacataaagtgaactaataaaggaatatggatctggtgggattgaaacatcaacagttccttcaagcatttgtgtaacttttttcatagttggtctaaatgaaggatcttcttgaatacaccaaatagcaaccataacacatttctcaacttttctcatgtcactcaaagcctcatcatcatttcccaacagcaaactcaattgaccatctctataacaatcatttgcccaatcagccaacaccatttgttcttcttcttccatctcagcctcaaaattcctcctacaacatatgatctccaacaacataatcccatagctataaacatcaaccttaaccgaaacaggagtgtttcgaaaccattcgggagcaacataccctttggtacctctcaatgcagtagttgttctagtctgatctctctttagtagcttggctagtccaaaatcagctattcttgcattgaaaaactcatcaagaagaacattatgaggctttatatcacaatgtatgatttggtttttgcactcttcatgtaaataaaatagccctcttgcaatgcctaaagcaatttcttttctttgataccaacttggcttagaagaagatttgaatagaaagttagctaatgaaccattgctcatgaattcatagacaagtaatcttttttcttcttcattgcagaacccaattagttgaaccaaattcttatgattagttctactaattgcattaacttctgccttaaattcttcttctccttctcttacaacattgtccaactttttcactgcaacaaaattaccatcacaaagaacccctttgaatacaacggcgaaagcgcctcttcctagctcttcattgaatccatttgtggcttcttccaactcttcataggtgaaactttgtaaattcatgccttccttgaattgggtttgtttagaaacttttgcttttctatacaagtgaaaaataaccactagtgcaggaattagtacaaggatatttataaggaaaaaaggtgtaccaaagagtagtgatgcaataacaactagtattgaatcatttctcttgtggggttgatctaatcttactttaataagagctttcccaccaacacttgaatccaattttccattagaaagaggtgttttcttcttccaacactcaccatttctaaaaatagccacagcacaaaaacaatctcataaacaagccttcctgcaccaattctcatccaccaaccgaaaatactcataatcagacagaggccagtctgtgttttccatggtgttgaagtagaaattttcttcatccttagaatctttatcacaactttgagcctcaaagttttgttggcaacctttcatcacatcattttgatctataaaggagtaaccattcgggcacttacaactcggtctttgctccttttctaggctgcagtagctgttgaaaccgcaagctccacttcccgttggttccataagtttagtacaaatatttggaggtatgggagttgaacaatgagtccaagccttactccatcctatggattcttcaccatcatttttcgggtaaacatagtgccttaaaacaccatcatactcaagtatcatcctttgatagaaaccttgtgttgaacaaggttttgctgataaaatacttagtatttctccattctttccttgcaaataaatcaacccggattggttaaacactacccgagattcattagccgtcgtttcacttgaccaatacatagaattagcctcatccaatgggaaagttgttgtgtaaagcttaagatttccactttgctgcagcataagctgaaatcttcctttggaaaaatttgtattcgagtatcgagctacaagcttcttaccttgattcaaagtttgtaatggtaataatgtatctgttggctcatcaaaactctcccatagatagttagaattcttgtcaacaagcacaaaattccctgtgtcaagcatagctgcataggcaacaccatcaccatcaccaacaccaacaatccatatctgttttccttttcgggttttgagaacaagcaaaccattttcggttagttcaagtgttgagccttgttgaacgagagtgctgccatttgctgaccaaacaatggttttttcaggtatgttgttgaaccatatggctaaaagaaagtcaccatctttttcaacttgatgaaaaccaaaggcaaattcacttgaatctgatgaccaaaacatgttgttgtgagtgtcttttgttgagagagatgaacctaatgggatctttccatgagttgaagcattaataatggtgatgaatgttagaagaaaccattgaaaaataaggaaaggcattttttttttctttctttaaggtgacaaaacaatgttataggaagagagacatgatttttctcacaacacaattgttggaattttatatgattttttatttgtatttgttgaaaaatttggtaaatgatttgaaagttgttactaataattagtggaaaaataactatctttttttgttatgttcttcaacttttcaaccttttggatggttttgttgactttgaaagttccatgagagactaaggttcttgtttggaccttgaattttaagagggaagaaaataaataaaatccaaatgatttctttttcttcatgaaatgaatcaataaattaagatttttttaagaaattaatacttgagtatagcataattttatgaaaattagaataattacaaatatatatatatttaaaaaagtcttatattaaattttttgaaatatttgcctttataaaattaaacatgtagatgtaaaaagaaaaagcatcaaaggtaacatggtaactcacatcaagcacaatacaataagaagatgacattcaaaaggtattggaattatcaatattttattttaattatgattaatatggttttttaaattttatggcacgtgttttttggtttttgttaaggcaatatatctagttttgtaa

SEQ ID NO: 295309 - DNA, 3596 bp, Cannabis indica
tatctttcggaggggctgagctatggtctaaactaggtttcgaaaaattcaaggtgaatattgacgctgctctcctcttttgacgaggaaggaagacatggttttagtgggattattttggatcaccgtggacgggtggtgactgagatttttaagttgcgatatgggcaagttctgccaaaaattgctgaagtcgtggttgtcaaggaagtgcttttgtgattgaagcgtgatttcatgggtgttagtattatcgaatctaactgtctggtgttggtacaagttattcaaatttgaatgtattgcaatccactcttggtggtatcattgaggattgtaaacttctatcttcttttagtgatgtttctttattttttgttaaacaatctgttaattgggtcgcttaccttgtgactagagcgtctcagttacatgttaattgtattttttttgaaatctaatcttttttatgatgttgatgtttttgttgagaccgagttgatctagttgaataaaataagacattgcctcgtgatgatgttggacattagtgtctaatagcaatattcttgatttaaaggctgcttacataatattaaattacaagtttaatgttaattaaagaaattcaatttttagtactctacaaaaacactaataatgatgcacctttaatatttttgacattcggtagatataatatagttggaatatgaaccaacctgaattatacaaatataaatacatctagataactcgtctcgggaagtacagttggtagaaatatatgaactcaccctcttaaagacaatggcgagccacgaataataactactgactgatgagactagcgagacgaacaaagaaggtccatctcagaatacacataatacacaacaaaattgtttggaaaaggtagataatgaattttccaaaaagcttgcagctcattgacccacatactcgtatgttgaaagagtaaagataacaccttcaacatggttcacttcttaattcttagatggtgataaacgtctcacttatgccttactcgatattaatggaagaacgcaaggaatactactatactcagacattgatctgtgatcaaacatctaagggagaattgttacattgtaagaatgatgaatcatagtcagtataactacttacagattacgttcaaaaaagcagttatgagaagttacttgtaattaccccatgcgatgaaaatgtgaaacgtggagattgtccacatttcacgaacggttacaaatgataagatcccaaggaaataactatcatcctagactcctataaatagggacagaactcagggaacaagagacaaccaatgtaagaaagagagagaattataccaatttttcattctgtaaacaatttattgtattctgtatacaaatttatcaatctctgaataagatggactcgtggactatgaagagttaacttaaaaaccacgttaaaaactctcttgtcattatttatttattattattattattcacttaattcctgggtatattaatacaaaaaggcttatttattagttttagaaaatctaccttaataatttagtactttcattgagagccttgtaataaaaactcaaaaattatcctccttgagaacatattcaaaatttccatccatggcagacgatactccttaaaacgagaatcaaccaggggaaacaacagcatccaaggaaagaatatgagaattcttgaaggacaaatgaaactgagactccccgctcaagagataagaaatggtggagaatttgagcaacctgaggatgaaatcccagagagacaaagtgaggatgcctataaagtagtgcatttaatgtgatagttaaagtagtgcattttcataaatgtaaatggggtaaatattatttgtattttttaccaaaatacgtgagaagtagagaatatttcacgtgtccacaagatatacgagagcacgtggatgatcaatattaacataataaatgctcagtattatctttaaggcatgaggaatgttcgagagtgcgcgattggccttaaaggaactctgaagtcaaagtcaagtgtttccctctgagaagatgcaagcctctcagataacatagcatccgggaattggccatgtgttccacacgattctcaaggtaaacactgtaagtgactacttcaacgcaggtaataaagtaaacctaccctccaaatggagatatcattcgaactcagtccatactgttctgacgttatgttttcccataaatactaattgacggttaaattcttgtgatgtcccatcaatcgcatacaagacaaaccttatctcaccaaactccagctttagagcttaccattggtacacacggcaaatatcatttcctacacctagtaaaaaggccatgtagagcctagacgtaaagagaatatgtacccatcgtccaaagaatatcctattttttaaactataaatgcaaagagaatgtaatgggaaaggggattcaaaaaatagagagaaaagagaactttgaaactgtaatagagaatatatcctcaagcaaaagagatatttctcattaataaaagtgactcgtggactacggttaatcaacacatgaaccacgtaaaaatactattctctactcataattaatttcttaatcaaagatttaggagttgccaaaaatcttggtcaacaatattataaaaaactttttttatttttaaaataattctgccacatcgataattatttaggcttaaaagttatattatcgcaacctactcttcaatgtgaatattttaatatgtgtgaagcatatattttttttccttcaccgaaaaaatgattggaaatatatgtaactttttaattacttttctattaaattactcattgataagttgatattttgtcttataaatatgaccaatttatgtattaatattcttaaatggattctttaaattatttattagtgtgattataatttattagactattttaaagactaatcatgaatttagagtcatttagagagaggttagcatatttggattgaaaatagtggaacccaacgagctcggtttgataagacagaatttaattatacatttctacaactttaatggtagagttggacttggagttcaatatgaaagttgtagatctcgttctcagttttccgaatcatcttgaatcgtccaaaatactaatttgaacgattgtattgaggaagttatggccagaatactaatttgaacactcgacataattttttaaccaacaagttgttgtcgcgatgatggaactcgtggctgcaacgaggatgcaatttctgcctgtttttaaattcttatttttttcttaaaatgagatatttttaggggtatttataggacttttaaggtttgcttttagcaacttttgaactacgaaattgaaagagaaacccagagagagagcaagaagaatacagagattgtggcatcgattgttctacatcatagttctttttcttctccttaaactcttactatttattatgattttgattataatgtctagtt

SEQ ID NO: 295310 - DNA, 1985 bp, Cannabis indica
aatatttttttttataaaaatatatagtaaggtcgtccattaatgtatatatatatattttgatatctttatatattttaggacttattatatgttatcaagtctaccgttaggtatatcaatgcataggtacaaagctcgtgaatctctgcgattttaaacgagcgaacaagaggagaaaatagaaatggttgccaaattgaattctctatcgaaagtgccacaaattcggcactatatattttgagcgtgaaggaaaagaataagaattgagtgggacaatgagtatgagattctctggtggccaaaaagatgagcttcaatgacgtttttcttcccaataatttttaaaaaaaataaaagaaagaaaagccacttgaataggcgggaagataaggttgataaggctatgaaaacgataggtggggggttgtggcctgtggataagcagatgccagatggtaaatggctggctccatttttatgatttgggttttggtctattgtcttttaactccaaatttgtagtggtcccgtaggtaaaaacaaagaaaaaggtatcacttatccatccggaaattgaggtatcaatacccaaaacactagtttcagattataaataatgggaactcaaaacaatagtcccattccatcccatctctggactgggaatatcataatcatagtatagtgggataatatccacattttttttttattttgacaaatttacaaattacgtatggacttgggtgtcccacttttttttatctaaaaggattgaatgagaagttatttgatgttggaattaattttaagaagtttgagtcgcttaaaccattccataaatatcaaactgatcaatttacaatttaattcctcataataaaaaaaccacaaatccctatttatacaataagaaaactaagattttcttttttcattggctgcgatttcaccactaatttttaaagcacttcttaaacaatatctcaggtgcaatttcatcttatcctcaaggtgaaatgtgtgaaattgagtcaaatagtctcccttgattgctacagcttgttccgccactttaaatttcaataattgatgcttccaatctatgttttcattacccaaaggttccaaccattttattcctaaaatgatattcgtgcctcccaaactaaatggcaggaagtcatccacaatgctaagtgcttgtgactcgagcaccacttctctacacactcccttattaattattgattctcccaaccctaatgtgactccatactcccttgttttgatcaataacaacttgttcattttcactaattccttggaaaagaaaatatggtagccccaaagtcaattataaccgtcacttcatgactaccaatattcctcttaatcttaatagtttttggagttgcatttcatattgttgaatgcaatgaaacttatattgtcctagtaatttctgcactatttaaagccaaattccatgcttttggaggccctagatcctcgtattcatgacaagtaataattatgttcaattccttcttctcacatcgatgtatactgaatgccatttgttatcacaacgtgataaattccctttcaacgtttttcatgaacttcagcattagtgaaccttcgatatgggcctatcagtttgtgcacgttgttcgaaattttggtgcccttccattcaatggtattgctatttcccttataattccctgaaccagcttaagaaccaaataaagattggttcttattctcgattttggccgcaaaattcatggctttttgcaaaattcttggctcaaatagttgcaactcatctctgatgccttgttgcaatatgttcaataattggctcaatgccaccaaataatatacatcttcaagaggtaaaaataagtgcaaaaatcctccacgatgatcctccattggtcatgtaaagtccttttttggcaagttaggtg

SEQ ID NO: 295311 - DNA, 1441 bp, Cannabis indica
aaaattaaaaataaaaatatattgcctaattaaaaattgaaaaaaaaattaattatacgtacattgcacgtaacatcaacatagtagatatagatagatatataaattttatttttcctataaaaatatattaaatatcattaaccaactcatatatctatctattatttattaataaattatattcatcttaaaaactaattttttatataatttttttttgatagaaatagaattttattaagaagttaaattgtctataaacatagacttaagcatagaagaaataacacttgaaaattcaatttggaaacaaacacgaagttctaacaaaactatcagctactctattagcagaacgatacacaaataataaagagaccccgctcatataattaatcaaatgtctatagtcattaacaactaaactaaaaaaagagttcatcactaattaattgtgaatagcctctaccgccactaagcaatctatctcaagaaccattgttaaccaatctttttccttaatccaactgagagcttcctaaatgcccataacttcaaccatctctaaaaccacatcaccactaagccctaataatcgcgagctatgaatagcagcaaacaatgcatcatcgacattttgatttgaatctcatgaggctttaccttagcaccatcatgtgccacaccactctacaatggtgtataatcatcatttgttagagcattcttctatttttcaagatacaattttgttgacgtaactacattattcacgctaggaattttttattccaaataaatttatttcaagctcgccaaataccccaacagatcaccactacctcgcgttgcttctccttacccaccctatagccccaacaacatcattcaaaccaatagcacgagccaaatatttgagcagaaaataaataaagcattagattgtgaacaatagtctcattagatcgcaaaacaaagaggacaatgccaaataataaaattaaacataaacaatgtttattatatgatattaaaagaaataatataccataccaaataataacattctatattttttattcttctcataaaatttagggcattattattatctaaatctctgtttttttttccacacatttttagaggcacaacaacctcttctattctattactaattgcatgcacgcgttaattgtaacattcccctttaaatttatattgggtctttattacatttacagaataatgactcttatacatgagtacgtcactctggctacttttaggaatatgattgaccttacaaaccaacatgagtatttttagcgtactttgtcctcacttgcatattttttgagaaaatttcccaaaaagtcacccattttaaaattacctgaggtcaagcacccttaactgtggagttctttcgtgatgg

SEQ ID NO: 295312 - DNA, 5167 bp, Cannabis indica
gtaaaataatttccaacatagacgcccctgcctcttgtaaagaaaaccccgcatcaacattcaccgcaaagcacccaacagcaggcagctcccatcgttgcttttgccgagtccctccccctttagatcgcccaacaccttgctgaaattcctgaacgtacttcccataccactccacaatatctcccgccttaggaggataacccccatgaacatacttattcctaaccgaccacaggtgccatgaaacaacaagaataaaatcaaaggtggaaggagaacaaaccttttgaagctgttggagaactaacaacacatcacttgatctaaccttaaccacttgatcgcacaaaccacattttttccacacctccttactccaagaacaatcccacaacacatgagcaccatcctcaatccatcctcccttacaccgagggcacgtaggcaccaccggaatgcctcgtttagacaatgcataattcgttgggagccatgtatgacataccttccaagcgaaatgcttaacttttggcggcaccttcgctttccataaagattgccaccactgttccttctccttgtcattagattgataggagacctcccgcatatcatgagccaaccgatatccactacgcaccgtatactcaccatttttagtgtaatgccacattattttatcttccacaccccacgacccacttggcaagttcaaaatcaaatcaacatcttcctcattaaaatgtgcctttataaacccttcatcccaccccccatccgccaacttcaagtccaccacatacaactcttgcgggaactccggtttatcataaacacggaatgtgaccggccgaggcaaccatggatcatccaatacctgaacccctttcccattcccgattcgccaccgatacccctttaaaagaagctttttcccccacatcatactatgccacataaatgaggaatgactaccacatttagcatccaacacatcgacaccaggataataacaagcctttagaacccgactactcaaaagtgtcggacaccgcaaacaccgccaaacttgctttgccaaaagagcctgattaaacaaccccaagtctctaaatcccaaaccacccttctccttctgcttacacatataattccacttacaccaatgaactttcttttggcggaccgacgatccccaccaaaatcgagcagccatactatgcagactctttgtagtactcttcggtagctgaaaacaactcatcgtatatgtcggcatagcttgaaggatggctttaataagaacctccttaccagccaccgaaaacatggatcctttccaaccacgaaccttttgccaaactttattcttaatcatctcaaacagctcttttttactccttccaacaaacgacggaagtcccaaatactaactataattatttaccactttcacatccaacaaagcagctaaccgactccgaagacttctatcaaccaatgcaccaaaacacatctcagacttggtaaaattgactgcctgaccggacgccgccgtatacttatccaataagtccttgaaacgaccacactccaccccaaaaaattttaaagacacttcattttaataattattattttatgtaaaatttatatctttaattgtactaagtttttttaattttttcttccaattcatattcttaaaaaatatacatattaaataaaaataaattatattttaaatattataacaaaaaattaaaataaaaaattatataaaattttcttaaaaaaaataaaaaaaatatatacacgagttaaaaaaattataaaaataaaattaaaataagtattgaaattaacataaaataatacgagaaaaaagatttaaaaaatattaaaagtaatttttaaaaattatttaaatttatattttttaataataggtgtatttatcggttgcaaataaaactctccaaataaaaatgtaattttttgaattttcatgtaatttttttatttatgtatatatttaattaaatgttaagggcgctctaacggctaggagatttcaactttgtaatttgaaatcttgaactgaaaagttccccaaaagctttttctttcatacccaaacagaagcaaaccccctcttctcttcttttcttcatcgtatttttgctttctagggtttcaatttcggaaaccctccctcatcgaagcttcttcgattcctttcagaaattgtaaggcctttcaagtacagtacagcaccggaacccgccaatggatcttccaaaagaagtcgacgagtacatcaaagggtcgattgattacaccgtaggccttcctgtgtcaactaagacgcttgagttgaagcttcgatcaattgaagaagcgcaaacccaacttcgtgatcgctatttgctactactgtcccgattgaaggaaaaagatcaaaccagcgaacgcgttagggtttgttccttcctaaaaatttcctcttgaatgtgtgtactagatgtagaaatgggtatcttttaagttttaaggggtattttcaattcctgaatcttgatgcataatttgcactccaagaaccatctcttccatgcaaaaaagtttctggcatttttcttttatatttgtcttgaagaggattgaattgtgtcttgaagaggttgtttctgtgtgatttaggttgtttattttctgtgttctttatggtttttaggctgaatcaaatatgaatgctatagctttgaagaagttcatcgaggaaaatcagaaattggcatctgagtgcaatagtctcttgagccagtgtaacaaatgggaacgagagtgttcgttatatgatcgtgacagggaagcactgatggactttgggaatgaggctgatcaacgtgccaaggacgccgaggttcgctgtcaagagttggaggaggaaatgaaaggattatcaaaggaactgctgttctataagtctcaacatgagaagcgtgtggtaatgtctataattcgtttgtgttttcttttgtttctcttaacatctacttttgttttgataaatatggaagaaaatggcaatttgttaatagattgaaactataataacttgcattactttctttatactgaatttactctcgaagaaccttttgattttcttctttgaattgaaaatgtgttaatgtatactttagtagatgataaaattagttttttttccgagtatatgtttgctttgatcttatataggtaatatttcactgcttaataagcttgaggtaataaaatagcactcacctcttaaaagaattcaacggtaaattgatcaggtgcttatgataaagccttcatatttatggtagttatgaactgctctctcattttttgctatggtttgaaggctgattcatctctaggcgcaactactcaagacaccttacttgagtctgttttagggacattgattaatgaggaaaatgttgcgttggggcggtcatttctagaagctaacagcaatcacgaatcatgtcaaaagttgctagaaatgtggaattcgtaagtccctgtgtaattgagttgtataattatcattataaatcaagtctcatattcatttcctattatttatagtttaaagccatcaactcaaaaagtcctgtcaatggcttccaagttaaaggtactagagaatgataaggagcatctgagaatcaacctttgtaaagctgaagaagaggtgagacaatcctaaggaccactcccactgcttaatcttgccgtccatcttcctctacggatccttggtttaaaaatgatatgtgaggctatgatggtgcaggtcaaggttctctttgaagataacaatttgctagaagaggaaaacaagaaattgctgtcactatgctgtaaagaaagaatccacaatgattctagtggaaagaatggaagcaatgcatcagctaaggtgaaaaattagatgacagctttctagatttatggaactttctatggtggatctatctagtctcaagctttgtctatttttttgcagtcaaacaagcggaagtcgtctagttcaaggattagtagcccaattgaaaagaagcttgattttactgaggtagatacaacaagaaagcccctatcaccattgcaatgtaattcacctaaatctagaatgtttaagaagtgaaagattgactgttatggtgtgattctattagaacaactgtagttggtaggtttttaaggaaatgtaccatttcgaagagaaatcagaagttttttctttctttggtatatgatgcaacaaatttctacaattaatatccatttgtaattttttttttcctttctcttgtcaccgagacagcaacacagctcggataatatgtgaaatagccagggtgataatatgaagtacagcccttgtagtaggtgattcgaaaatggcaaatttcaagcagtttcttatacccggttgtcttctatttttgctaactatttgaaatagtaaagtgaaaaaggttgatttctagtctgtaatatcatatttgacatgtagggtggtggtggtcctggtaagcaacaaaataaattgtaacttctttcttgtatcgaaatagtaatcatttttgatcctgtttgttaaaaattcttattcgtaattcgctttaaaatcaaaggtataacttcaatgctgttttcttccaagaaaaaaaaaacttcaattctgttattctaataccctatttttctcgagactttcgatgccaaaacggctgagagagtttttttttttcccaataattcagacaatggcatgtagactggtaatgtgattcgtaaggcatagccttttaatgaatgggtcagttaacacttaaaaaagcaatgaaaatgtaaaaactaaggaagatatggcaggtaaatctattgtatcatttgtttaaaaatatgtgtttataattaaaataaaagttattaaagtttttcaattttcaaatttttttttttttttgtaatgaaagagatgctttattaatgaagaaagtcattcattacaatttccaccaactcggatggtaaattactagcatcaatagtgcgatctgacatgtaataagagctacgtgcaagaaaatgcgcg

SEQ ID NO: 295313 - DNA, 5985 bp, Cannabis indica
aagattcggttacgttgtttctcttctgttagttatatttttattatatatatatatatatatatatacatagaaaattatatatttcagaatttacagttcataataaaaaaaatatatgaactgcccaactggtttttttgtgtggataagttagttattattgatgtaactgttaataacttacaatacaatctataacactgtttaattcagtcagtttgagctctaatatacatgattgcagtactaattgtgcttagcaaataatgaaaatagtttaaaagaaagaaaaaagaacgagttatatatgattcaaatattaaaatgaagtgtttgattatgattgaaacccataattcgaactatgtgatgtgattgctcggtattagttgagactcgtgtaaataccgagcaatcacgtgattcgagttgtgagtttgaatcgagacatgcatcattgctttaaggatatgtttcgtaagaatgaaggagagtatgattagagagaatttcgaaaagaaatagaggtaagaggagtggagagtataattggtcgttttactttctgttgattggtattaagagtaaagttagaaatatgtaaaataaatattaaaattattattttattatttttaatacaattatatattactttttatagggtacaagagacattttatatagtttttcttgaaatctactatatttgaaagaattgaaatttgtgtatttcaagggattgtgtttccctcctctctcctcttcctcttgtcaaagagaagaattcatcaaccctccacctttgtctaccttaccaaacatagtgtaagtaaagtaatattattttggaattttttcattttaaccctttaaaatagtttttttttttcttttttgtattttcacgaaattccacacagaaacccctatagcaactaacggagcaacataaatcgcaaccaaaatccgtatagcaacccacataaaaactaccgaagaaaccactgtagcaacccaaaccgtaaattttaataaaaaataatatatggggtaattctgatattattttcttaaataatttttgtttagagcattattattgtgcattagtagtgcttagtactttctaaagatgacatcctgtgattagttaacgatcttctttaaaaattattataaattattatattaaattacataaaatctaatacttgatcgcattaatagcagtgtgaaaacgaaaagaatgctagacatcacagatattttttaacattgctcttttgtttatggcaataatgacctcttgcattaaaaaaatcaatgtctagtcaatacatatgtcacacctaattacaagggtagggtgctaccattgtttacaacctacccatctttggaataataatattaatatatataaatgtcaacattataatgataaaaaattccattacataagaaaagtatgataaaaaagttacaaagacaaagtaccattacacatggtccatatactctatgccaagttgatttaggaaactacatctaaaagagtatagaataacaaagacaaatacaaagtaacaaaagattcatccaattttcaattttatacacacacacatatatatatatatattcctgaaaatgacaatcctacccatgctctctgtacaagcaaaagaacaagatctgtaactctcaatatcttttattccaatacatctgtgttctttctttctctaaatcttcacacaattaacaaaaaaattcaattcaaatatgcttcaattttcttccttagtcaatttattgtccttttattcagtatcaaatgtttgtaaaccagaaacagtggacttctctattgctttccaagctttttcctaagttctgtggaagatatatcgatacgaaatttctcttcgggtattgtgatgaacatgtctttcaactcttctggaatatctaaatcatcaagcacctatagaattgtacaacaataagcattggaatttcccacaaagtagttattttcaaagcttagaatagtaccttgaaaacgccatctacattacgaccacccacaagaaaagtgcagccggttgctttgcatccattaagaatcatcaacatcttattgtagtccccatcatagtatttgggctagaaaatgagaaaaaagatatgatgattataatttgaagttcataaaatgattttgttgctgataatatttttttgggaccacaactaatgcaactaattgtattgagaggaccatacgttaataagcctggctgctgtgtcagcgccaattacgaaagcactgcctggaaatatttcagctttcttataaaaataaggttgattagataagattatcgtcttacctgacacacaaagagaattaaattaatacatgtaaactaaaataagaagctgagctcacttaaaaaaaggttcacttataaaatatgcagagtatgacagaagggttgggattagcttaagtgcaaagctactaaggtatagtcaacgcactattttgtcatgccaaagaaactaaaggtcacaataaacggcatgttgtaggaccaagatggaagaaacacaactagactcaccagccttttcaaactgcttaacacgatctttgatttgagatattgaaagtgggggtttgtcagcattgattgctgatatttcaaagcatggatatccacctccacatatgctgcatgagaataattaaccactcactaatattttcagaggttaaatgtcttggacatgcattaccacattaattcttacttcagaagtgttaagatagaaattcttactctgttttattatttcgaagatagaaattgagattctgaagatcgaaagaatttgagcttgaaaacaaattcatacgtacctggtagcaacttccaaaagcttgaggtgaccttcatgcagtggattgaaagaaccaggtaatattatccttctttctccgtttgagttatctgcgacaagagatggtaatccagtacatgattatatgtagatgcacactgatgaaggattgatatggattactttctgcttttgattactggtgatgcgtgttttgtgtaaggttgttttaccagtaaatcattcagctattgatcaaatcatagaactaagaattttcttccagttttttcgctaatatatcatatatgtacattggtttggttgaaaccaaggactaaatcataccttttgaaaatggataaaccttgaaacttatttccccatttataagttgctctagctcttgatcttcactgaactctctttcttgttcatcagatacatcagattctattaaatctgggacaaatgttcctggtactttgcatgcatttgcaattgcctgtaagcaacaacattataacatagccacatgagaaacattatcaaaatataagattcagatttatattttttatgaattttatacaaacagcgtaatcattagaaatcacgtttaagtttaacacacacaccttcagaaaaatttgacttgacagatgatcttcttgctctctagttcgcaaaccctaaaaagatgagaaacacaatagctgagccaagttacacttcgcaattctacttgttcaagtatggattgcataaaaagatagagcaagaatgatcctacaatcaccttagtaaaggtaactgtcgatatacaaagccggtcagatgttcttgttgacaagtaaaacctgttaatagtttaaacaacagggtaaatagctagtcaaaaactaaaaaatccgaaaataaagctaatattttgtgcaacatttcatttcagactatgagactatcatacatctcagtcaataattaaccaatgaatatacaaactgaacaaaaagaataaaaaaaatggcaaaatcaagtactcaattttactgctttctatacatatataacaaagccttgacaaatgcatcatgggttgggttcagataaacagtttcaaaaccataaaaacaagccaaggcaataacactagattcaatccaatcaagataacattctcatgcatgtgtatgttgactgagatgtacatgaacttgtcacaaaccgaattttacataaaccatacctgtgatccccacgctttggaggcatgctagctaaagcaccagtaaaacccacaccaagaactggagaacctattgcagaatcaatattatagtgtcaacatactaactacatagtttacagcaccaaaaataagttttgattagtttacattaccgaaaataagtttaaatcttttattttgaacaagcaataaattggaatatcagaattttctggaaatttacagtaactatatccaaaatcgtcatgaaaataaaaagtcttcaaatttttgaaaattttcaaatagtttatattaagtttttacatttgaaattttacagattttatctaaaatctatggaataatgtttaagaacctggtggggagagcttgagagcgcgattatatgctatcaaagccatttcttcagcagtattctggctacaaaactgggttggaatctgcaaattcacattataaaatcagaatcttcagtaaaagaaaacgaatacgaagactgaaaacgacgtcgattcaccttcccaagtaactgaatcaaggacatccgagagtaagggactacagtttcgagaactgtattggaagctccaggcaccgatagtaaatacccaatcgcctgattattaattaacattcactcaattcgattagttttagttacatatacggcggcgcgtgagaaattggagagagagagagagtggacctgtgaggctccgccggcgaggtagaggacgcacttagttggagtagcgtgaattgcatcgactaaaggtttgatacgagagtccgccatggattttgtggtggttgttttcttcgtttccgtacaacgatttctgtctttgtcttcttcttctccgatctctgatgattgattaagacttgtaaacgacgtcgttttattcatcagtgtaaaacgacagtgtcacgtgtttttgttccttctcctctcacgaattcacacgttcaatatataaaataagtgtattagatttgactttttttataaatattattacaggtgattctttgaatgcatcttttgtttcagcattttttactctaatacgctataactatttaacatatcgtacaaaattttgagaaatttgaaataatttacaatatatagaaaataatgtttaaatagtttattttacacgggtataaaataaaataatcacgcgtgtgacacattggttaaacacaatttttggtattttgaactttttcaaatttcttaaatttttacaggatgtcttaaataactaaaatttaatgaccatacaaaaaagttagactaaaaaattatttcgaatattaaaaaagataaaaatgtatcactgcatccttttaagaggttgcattatataattttccaattattattattgtttatgaaagacccaataatttcaatcaaagcaaaaacaaagacttgtgattggaaaattgaaaaatgaatttgaaatacaaatttgaatttgttttgtggaatttatattttgcaatttaattggttgtagtgggttgtttattgttatttgagttttaaaaaattggattagtgattagttagtgcttattgagatttttagaaacttatactaaaagaagtttaaagccaaaacgtgaaatatgcccggactgttgcgtaagcatgcctcgaccgtttagggattcaggaggttatttgttctcgaatgactgtaaggaaaattggttaacttccaaagtagtttactgacatgaagctcgaactaaagttttttgggataaaatttgttgaaatggccccctaattaaaaata

SEQ ID NO: 295314 - DNA, 2167 bp, Cannabis indica
aagatttgaccctttcgaactcttctgtttataactcacccgccacagaaccagaacttttaagagagtgttgcaagcttttaactacattttactacccgaaggcctactccctaggagtgaaagcacacaataatgctcacgggacacgtgtaaccactccaaaaaatgaaattgagcttggtccaacaaatgctgcaaggaggcatcacaaaaggcatcacaaaagtcagccagagtcaatactctaaccacgttttttttgggtataaaataaatgtctccgggtgattttgcgtggacaactgagcattaaagtaacctttctggataaatttcctacacacatcattgataccatattcgagttaaggtcagatgtcacaagatagtgcttttaggacacattacgacactcaccaacgcccctgccacttttcagcccataataaacaacattttgacccttatttaagaaaatttattcttatctttgttcctgatattccagttcatattatacatgaattagcccaaaaagagcatctttataatgtcctacaacatcaactacactccaataaaaaaatgttggagtatggacaaacaattgcatacctcagccataaaatttctagtgagggagtagaagctgctaggatatattagttgtctattagttatggattagctaagaaattaggaactaactgtaattacttagtttcctatttctctgctagttttgtatataaatacatgttattttattgaataatatatgcaattgattgaccattttcaacatggtatcgtgcaatttgattacggttgagaattcgaaatttaggttgattccaaaattagggtttgtgtttgaagtttggttctttctttattttaggttctttttcggaaaccctatttgaagtgtgttttagttctcaccgtccacacgaggactgcccagccatcaatcgtcaaaacccatgagtctggccaccagaaacatcgcgcgcgaggcttgcgccgcccctagtcgtggtatccttccccacgcgtcggtacatgtaggcacgagggaccgtgaatacggcaacagttcacttctgctccttgttcaaccatctcttgtcgtttatttccatagttcttttccgtttgtggtttagtatttctcacttagtgtttgggtgttctttctttattaacgatgtcatccacatacacaactaacaaaatgataccattttgtgttctataaaatatcaactgttagtatcatttaatactagagaaatctcatcccttaaatcttttatttatactcaattacacacaaatgatttaggggtgctcaagtatgtcttgggagttgaagtcactcgaagtaaataagacatttttctatttcaaaggatgtatgtacttaatttgctaactgacacaaaaaaattaggagcaaaaccttgtagtactccaacgaatccaattgtgcacggtagaaaatagtgaatggaattatattttattcaataaaatagctaagtatgtatatacaagactagggagactaaataggaaaccaggaggaaattggaaactatgtaaaatatatatattctaacactccccctcaagctgaagcataaatgttaatcatacctagcttgttacaaacataatcaacctgcaccccattcaaagtttttgtgaaaatattttttaattgttctccagtcttcacatatcttgtggagatcaggccttacttttaagacttggctatctatcattttaataaatatattgccttgtaaatttccttgtatccaatggacggcgggttattattagccatagactacaaatagtggccttagcatttagcgagattcatttagttttgtgtttgtgattttagagaagagaatctctgtagagtttccaagtcatcaaagtcatcgtcctccttagaaatagaataagttagcacaagtttctatcactctagacatccctcttggcttaagcgcccataaccagtaagattatgggcttttttcgaactataaccaggtcatagcccaacggcccaagttcatggtgaccatggaaaacattgacccatgcaaaaactcacaaaacactacaaaaaaaaaaaaaa

SEQ ID NO: 295315 - DNA, 5914 bp, Cannabis indica
ccacgtgtacaagtgtgtacacgtggacagtccaccgtggcacttaactgtgatttttggacgaaggtgtgcagagcaaaacggaaccagggtttaggtagtttagccgccaaaaattcagtttttgtggttaagtgttacaaaccgtaaagttcaggtagtttagccgccaatatccctaatataatatatgtttcgtctctataattctcaaattggttgtccctcatcttgggaaatcttcccctatttataggtgtttggggtagataattattctcttgggatcttatcctcgtaattgctcatgaaacatgaataattacatttcatatttataacacatggaataaatagataactgccataactatccttgtctttatctaaaaccagttatgttgactaaccttttatgactcgcagtatcgataatcgtcttttgatgtttactttgaagacagtttctgagcctaagtataatttctaaaatacttctcgcactcttctgtgatgttaggaccgattggatatatttacgcgagacgttaccatcctgtgtcgtttgtgattattctgaggtgaatcacattttgtgtatatcccttaatcttttaacatactcacgcgtatgtgggtcaatgagttgcatgctcttaaagaactcattatctacactttccaactaactgttgttctattgtttaccctgtgtatccaaagatggacattctgtatttgttattcaagatgaatctcccttaagtttttaaggagaggtttaaatatatctattgcttgtatattctgaggcgagtgattgaacacatttatttctttataatccgagctagttcattttcccgcttccttacacgcgtcgtaaccatattggccatcgaaatatgggtataacaatcagtataattagagataatattataattttaatatttattttagtctccatcattctaactttataaataataccaaataatacaaaagagagtaattatcatctcaatccatcctactccttatcatttctaaacactacatcgatcctacccttatttttttcttcctactaaatatagagttggtgcttaagttaagagctttttagtttatccatccatcctaccacttacaaatttttataatttgaattttatttttaatactataaattattttttaaaaaaaaaaaataccaatggtaataaatgattacaccatgcacacttttaaataaaattctgactaaaacactctctaagatgtgaaaacagataaaatatgttcagaataattctttaaaagtgtattaataaagtgtttggttgaatgtaatagactttgtaatataataaaagtccttattagagccattgtcatgttttccttttcatttttattattgtattgagattacaatgtaatgcttcttacattagatggtgtaattgctattttttttatcaagaaggaataagaattcattaatcaataactagatacaatcaagaacatacaaaataaaaacctcaaggctccaaaccagaaagcaaaccacaaaaaatgctccctaattacatttgtaacctgaataaataatctttctcaactctagacaaattcttatgctttacaatttataacctataattcacaatatttttaatttcattgactatgtgaatagttgttttagaaaatttctcaaatatacatttgtttctattaactcaaatgttgtagcaagtggcagcaaacactgctatatcaaccgcctggaataatttcaaagaaggttgagcaagccaactctgccagccaacaagatccataagccaggctctcttccccaaccatccaaaaattagatccaccacctgtcgagatagacaacaattgaaataaagatgatcatgtatttcaaactcagcatcataaactggacagtcaagagattctatctcaagatgaaatttgactaggttatctctagttaagagctgaagattcactgcttgccaaaggacaaattgttgcttaggcaaggttaacgaactccacacaactctatgataatatactagattttgagctaaggagttgttgtagagacgcctagccttgaaacaaccagcaaccactcctgaattgacatcaacttccaaaaatctatcgctcaagtgacaaagtttgcgccaataccagttagtgtcttgtttcaactcataagaccagaatataacatttcttaaatatataacattgatccatttcacccaaagaagataatggcccaaatatatatagcaaggttaacatgatttcatttggctccatctttaaaaccaatacctctataaacctttgcgagacacactttctcccatgaagctacatgaattttactccattcaaaccccaaagaaagcctctacaaagtttctctacctccttcataacactttgaggaagcatgaaaatgctcatccagtaattgtgaagccctaaaagaactgaatgaataagttgcactctgcccgcaaacaagagatgttcactagaccaagaatgcaacctctggcttatttttttaaggatcacaacacagtcatctgcctttcttttggttggtcttgaggggaattccaagtatttgagaggaaaagaaccttcacaagttgaggatattaagaatattatgcttctctttagagtctacaccaccaaaaaatatctgagacttcccaaatttatgtgtaaacctaaagagaaactaaattcatcaagaatgtttttgagaaccaaaaccaattgccttgtccctttactaaataacatcaagtcatcagcaaaacagagattaatgatccttaaacccttacacagaggatgaaatctaaataaagagccattagctgcaatctgaagtctccttgtcaaatattccattattagaacaaaaagttaaggcgataaaggatctccttgatgaagccccttttcgcccttgaaactaccttggattctaccattcaaaataatcgcgtaggaggtaaagcggatacaaatcatcaccaggttgataaatatttggggttgattaaaagcattcaacaaagcttcgagaaattcccagttgatcgtgtcacatgccttacttatattgcacaacgaggggcacaattttcctgttataattcttcaagagatcttgaagaatcattacattgtgagctatgaatctaccttgtataaaggctctccagttttggttgatcaagtaaggaagcaccttggcaagcctagaacataagagtttcaaaatgcacttgtagatagtagaacaacaagcaataggcctgaagtcaactgccctggcaagattatcaatcagaggaataagagagatcacagtagagtgcaatttgagaggcattttacctgaactgaaaaagtcagtgactgccttgcatatttagtgtctgggatgctgaacattgctttccttatttctttatgagcgaatggtttcaaaagcaacaattgtaggtctaagttaagactggaaccctagtcaaaataatcaaagcataagttgttagagcctgtgttcttagtgcccatactacctctgaagtgacttaaaaaatgatcaacaacatttgagaagttatcattaacaaccccttgatctatgacaaaagaagtaatcatgttatccatccttttctacttaagaaaagcacgaaaaaaagctgtgttatcatccccattttgaagccacttaattttactacgttgtcttaagaacttgttatacattttctcaaggctactaaagtttgttgctgcagctttttcttgttcttaataaacatgtccctcgggtaagcttaagccaattgcttaggtgccaaaaaattgtccttggccttttaaaaagactttctcacatctcatactatctcatagttaaatttcttgaggctgtgtttcactctcatgagcttgaggtaaacacttttcaatccctcagctgtaactggtttcctccagctagttaaaaccagttccttaaaatctgggtggtcaacccaaaaattaaagaaccaaaatggcttgattccaatcttcacagcagctttagaaaaatgatacaagaatagtgatcagagataatttcctaaccaaagtgagcaattatgttgggaaaaatgtcattccaatcttcaataaccaaagcataatctattttagagtagattttgctcaaatcatcttgattattagaccaagtgaatttcaaactagtgtacttaagagccttaacatgagattgtgcaagccattgtgaagaatcagctatgtcatttagggtaatcaggttcccccctgttctatcgttaagattaaaaactacattggagtccccaagtaaaagccaaggcttcacaggatgccttaagcttagaagatccaaccataatattttcctctctttaatggtgttgaaaccatagatgaaagtaatacggtatgcaacctcctgcccagatatttttatgtaacaatgaaccagttaattcgtttcagcaataactatcagtcttacaaagcttttcctccaaattatcagtaatcaaccttcaatagtaggactagaaaaataatcccaattagtaaatttagtctccatcatctccttgatcttattctctttcaactttgtttctaataaagccccaactccaatcttattaagtctacaaacatccaaaattatatcttatttatccttattgttcatacccctaacattccaactaactatgttgtacttatccatagatatcaagcaaaatacctgagcaccctgcttcttttgatagctgatctttttccttacaaccatcatagatttgtaatgcattaaaactattccatgtagatttccctgcatcttcaaaaccagaggtagcttttaagtgagcaaaattcctggcctggttcactatcttcttcggtatttgccaatcttgtttcatttgtggaacaacttcattcttatttttagaggacttcagaggcttctcctcagcctcctctgatttcttatctcttgcaacattctcaagattaccagctggtttatcatgatcattcttttttgacccaacttcctacagtctgccattatgtgtccataacctgagcaatttttttcatttcaccggctaccattcatagtcaattctttgttccatcaattgaccatattcgctaagatatggaattgttcttagaggagagtccgtaatgtccatctcaaccaagactctaacaaattgaactcaggtctaatccttagtatgttggtccactattattggtttcccaaccgtactaacgagggcactcaagcttttgttcccacagtattgaagtccaaggtcatggagatggatccataaagggacagatcgaacgaatttcactacatttagatcagaagaccaaggtcaaataattactggtttcctatcaaattgcaacactctcgattccaaaacttgatcccaggtagcttcatcattgaacttaaccataatcagccccatagccattctagcaatctgagctatgttggaatatattttactaggatctagatttactaacaagtatgtttcattaacaccctaatatgaatttctaaaacaatgaaataagcacatataaagtttaggaaatcttacattgggtgcagcggaataatatgtctccttccactcagatctctaacccttgtatcctgtctctcgcagagtatcaccaagatctaagcccgaatgtccttctcttcaatttggattcttcacaatcttccacacta

SEQ ID NO: 295316 - DNA, 3071 bp, Cannabis indica
ccgttaactctcgtgcgggtttcgagtcatattatcgacccgtttttccagccctaaatttgggtattagtgggcttatttcggaaaattttacaaaattaccattttttttctccatatattcatagtgtataaaatttttgggccctggactataccaggctcgccttagccaagactgggcctgtcactaatacgatcaatacattaggtacctccttcccaccaacccatagttttggaatgttggcaaatgtggattagtttccaaaaattttagtgtttgctcttaaggcccaattgtatttatacacttaaaagtgttttattattattatataaaaatctatataaattattatttttgataatttttttttacacttttacatacattgaaatgtcttatcatttctgtatatttcattttattcaattacctctaactattcaaatgcagtgtaattgtgtaaaagtatatcgatccaaccgaaaatcactaaagtaataacactatatagcaaagcatataccaaaatttaaaaaaaccttaataaaaattactcttaatgtcaagtactataaataaacaagtctcaccaaactttcactttcagtatatactttttaagaagtttcgaggatattatagaagctacctagcaagagtgagaattaagtttcttaattatatataaatataattaaccttattatttgtttctgcctacgtacgtacttgttgtgctgttaattaaattagaatattcaaattaacaatatatatatacttttcgaggaaaaccaatattattattattgttctatatatatatccattatctatataattaaaatatggattaattagtctaataattaattatagggtgttgcaattggtttctttcttctactttttttcaactctcatttttgttagtcttatctaaataatactggttgaaaaatgaaaaccctagccattttcttattctcgtttttatttgactagtatatacatatataaatatatatttatatatgatatcactcacttttaaaatacaaaaagaaaccttgagctaataaactaaccttaaaaattaccacgtactttaataaattctatatatcatattcatagttattacgttatttggtggatcgacaaaattaagagtaaatcacacgatttccattaattgtagttttgtctctaattacttcaattagttattcccataatataatataatataaactaaaataattagatgtacgtacgtaagtaaataacaaatcatattaattacagtattaatgtcaacgtgcatggattaagtgcaaacaaataattaataaaatacttgtgtatactaaaataattgttactttttgtgattttaattgtaatttttaagagaaatattgttttgatcattgttagttaattatagagttgatgtcattttagaacatttatgtttcgtaaaaattatcgattgacctatatattttgaatctgtattttttaaatagtactttgaacttaattttaatttttttttaaataactaatttaaagacattttttagcacactaagatgtaaaaaatgtacccaattttgttataatataactcggttattattaacttttattttaacaaaaaattagttcatataataccattttgttccattttgagaaatacttaatctaatttgtcatttaacaaaataaataatcgaattaataatttttacaaaatatgaaattgaaaataatatttattcttaattatatgtatgtaccccatataggtggcagagccggcataaaattctccagtttaacctaatgtatgtagaaaaatattaagtgtacactacacactattgagtaaataccaagtaagatattacattattgttattaatttcgtatataaactgatcagtgtagacaagtatatatatatatatatagggtttgaaaatgtacttatatattctccaactgctactattacaattagtatgaaaagtaataagatcgagtttggtatatatttggttaacacgatcattaatagttagagattattaattatcttggccggtcaatatatttgtgtgcctataggacatatataaggatctaattaaactataagtaccttaattaaggccgagcattgttattgggcaccaatgtgactagcacccttaagacgtgtcgttttgcgattgactagcgatactttttaaaattattatattaaattatatgagactcgatacttaattagaccaatagcgatattaacatgtaggagggtgtttgacaccattgatgccttttagtatttctcattaaagcctcttaaaacaattaaatttacggcataaatactacatgtataaatacttaagtttaactttcaattgtaaataaattttggaattctgtaggtatatattaagttttaagtaagtgtcaattcataattagtcaaagtcattaaatttttatttatttaaaaaaataatttaaatatatcaataagaaaataatacgtggataatgacttaacaatatttaaccattaggtagtctgtttcaaaaatataccttaagtattattaattaatgtcaaaaattaaatttagatatatatttacaactgaaatttaaacttaataaatatttatactgtactctttcttataattaggtggagttttaacaaaacatggttggaggttgtttcctataagatttttttggtatgactatttatatttatatattatatatgtgattaaatataatgagtggcgtgatcttatttgctcccttttatgactaattctgttgttgaatatttattattttatttaataaacatatagtgataggtcttcaattatttacttttaattttaattcatcatctttctttgtttgcttaaaaaaaaaaaaatttaaaaatctcatattacactactacaaaattgggctttagaggcggtttttaagggctttcagcgtcggtattggcgaa

SEQ ID NO: 295317 - DNA, 4817 bp, Cannabis indica
tagggtcatttgctatatttttttaaaatgagaacataaactaacatactcttatgatttgtggccatttactatcattttccatattaaaagggtattttttaacttacactcaatgacaatgggcctgttggactttattcggttcactcattaacagatcagtgctaccctagaaatattatcaacttcctgcgctatcctcgtcggagatctgagggaatgcattccgtttgactcattggccggataatcaattatttcactcacaacaggtacggtacttacggttttgaggctactaatgaggattaaattcaaagagacgattgaaactttttctgcttgtttgagttttctcaagtgattctatcttggtatagagttctacttcggcattctacatggatataatttagctattatccagttctcttttcttttccttttttcttctttttaagtataattaggtttgtcatatttagttaataatatttagttcgatgtttttgaaattgtgtatattattaccatttgaaacgttataatatgaatatgtgttagtaatcatatgagattttgttctaatctggatggttcccagaaatttagaaatgcagtgagcttagactgtaacaagtgaaagtgaaatcttggttagaattctctctaggagaactccatatggtttcccaaatgttgctttcatgatgaatggtaatattatttatttgttatcaagcgacaattatatttgcttccaagattatgaattgttgggcattttcttaaaactataaaaaataaaagatgtgaatttatagagcattgtaaagaattatctctacatcgatttattttatcaaacaacaaagtgatgattgttaatgtgttggtctatgtctggctgtgcgaattctgtgaataccacttgaagaactgcttcaaagaaagatacttttttaaaaaaattgtcattatatttggattgtattattattttgatcattagtggctaattagcctcaagatcaagagattcccaggttggaacctgggtctcaccccctcaacactagaccaacctagtggcttgtttgcttgtgttattatggatgctattggagccggtttactttttgttgctgtttttaggctcctcttttattcttactatgttgcttttgcctgtggtatttcacagaatggaaaatgcagagggcaaattgaatactgaaatgaacgacaaattgttcaatattttcaaggattttatgactaggtactttgatctaaccatatttattttctcaatgtttgtgcttttcaagtttgctgggagacttgaactttaatggtggagtttgtttgttacagcattcccatgcattttcatgtttgtccttaattatcaaatttgctgatttttcattgggaattcggcataattttgtataacaccatcttaatcaacgatcatcactttcctaatcgttgctgtaatctcataaggtgtttgtttagaattcaaatgatcttttttttaaaaaaataaattaaatcatggacgctgaagctttaagattttgaggaaacgactcataaaaaccatataatttttcacttagagtttgaattaaatttgttgcaaagagatagagttatgccattaaagcaaattcattaagcaaaaggaccaaaaataaaataaaaatggaatattgtgaagaagtatgatatgtcaaatatgctggttatgaattatgctatcgtgtatttgtgtcagccatgtctacttgaatttggaaaactgaaatattgtatttgagatacaaaacaactacttattggataacttgttcacattttttacataacctctttgtaggatcacagagtttgaggaactagtggatgttggaagcagattattaaaagactttcaacaagaactgggtaagattatgtctatcatgtatggatacttgttttacgatgaaattttttgccatgtttgagtaacagtccttttttttacgccgtctttgatagagtttcttcgacggcccccatttggcaggacatcagagttggttaaaaacataattaatattgatgaaacaaagaggttgcagtcataccttgaagctggatgcgtaaaaacatttgatggatttcaaaatattagcaagtgtaagtgcaaaactctttttgtccttataattcttggttgcttaacttaataatttatattcccattccaaacaatcccaactttttgcaaagggctgtaggacttcttgtacgaacaagaaaatatttgagaatagcaaagacaatcagtctcttgttttcttatcacggattggagtttttttgctataatcttgtttttggtgtggatttcttgtccacgtttatgttagtatattatacatgctctgtttcttttcctctcttctttcttcttcttcttcttctttttttttttttgtcaggctctcttttttcttctaaaaattaaaattgtaacacttacagatatttctccattttacatgatgtgctttttggggcttaatttgtctacaattctcttgaagtcatttccattttggtatctttactctgctttttgtttgtccttgtgttatcgctgctctaactaccttcggctgactatattgcgaaaatttgcatgcagaagtgcatagtctccatgttgagcttcacggctatacaagtgaaggtaacattttctttaacctttacagttactttaatactatctctatcaaaaagaactagtgtggatggtgataggcacaagagtagtaacttctctttttgtatctctgttccctgatgtttggtgttcatttcatatgtgtgcttgcaagtattagtttaagacattgtattgatcttttatataatggaaacaacaggggaaaacatacttattcagctagatgaactcatgaaggatgctatttgtgtattggaaactactggtggaaacttgcaacccaattgggataatactctggctttggctaatggggctgaagaagaagcgaccaaggataatgaggcaagtattttcttgcattcatccttttctaatgaatactttgttcttatttgtaactacctttcgaacgttaatattcttatgtctcattcaaatctccacgctttatggacaagtgggcagtttctatccattatatgtttatattatgtatgccaatatcgtttcctcgtgcttttttcttatcatgtattgattgcccttcctactcaataaatttgtggcttgaaccaaattttggatttggggctgaacaaattattttaatttcagggaattgcattgtctagaaaactcgaagacactgacttggctgtcctcatggcgataatcctcagcatgtttaagcaagaatactcaatgcaggttagtctaatcacctactttctttcttattatttcagtcatttgggagcaaaacattacatgtagaactattcaatgctaaggactgaagtgtcatccaacttgtgcaggaaaaaattatttcagctctaagcctgaaatcctcttcagaggaactagaaagttactccctaatgtggtctctacgcccttttatagaagatgatattatgcatcaagcatggagacgtattcgttagcttaaaacttgttttgcttcaagagcacttcctctttattttacaacttatgggacagctcaagtgagtaaatataaacaaacaaaatctactattacctctgtatatttgtttgtttttcttctttacaatacattgcaatccaaaccaaaaaagcatggtatgatttaccatttatacaaacaaacacaatatgtcacgaaccataagtgtcttaaagtaaaacttcaaaggaacactaacttcagattcagtattgttaaaaaagcagtccacacaagacacggttttaacacttgactagctactggattaacctccttaaaggccttgtaacagcccacctgagacccaaacattgccatgaccaaaaccattccgggccaacttagcccagcccagaacacaaatagatcccaaagcaggcttaagcccagctgagcccagtaatgataaacaacgtctgatcttctgtggaacccaccttcggcccaaactagccaagctgagacacccatcaaggagctggaagctacggaagtagagtgcaggacccaaaggggtgggaaccaaaacggcaccgttttagtccgataccctttaccggagaccaagtagatcaccaagagggttagagaaacggggatcataatcccaatggctagagacctaaggccgcgtttggccattgaacttctccgagtgtcgcgtttattgggtttcttggtatcaccgctgtcaatggcggttggggttgtagttcgctgtttgaggttttgtgaatccatatccactgagagggaaaacgacaatgattgtataatggagaaatttgtgggagggtttgtttcatatatagggtagaaagatattcgtttttttttttttttccgtttttgtgctaatctgtttggctagtaagaaaactaagtgacacgtgggtttatgagctggaagtagtggacgagggtgcgtacgacgcgtggcgtgcgattttgaaagctggtgcctggtctgggtggggagacacgtgtgtctcaatatctttatatattaaaagtgtctatctaacggcaattcttggtttaacgattaattaaacgttaacaaataaa

SEQ ID NO: 295318 - DNA, 3916 bp, Cannabis indica
ttcagagaaaaaactgagccttctcttctaaaccctagccgccacctatactctcttcttctctcttaaatttcgaaccacttagtgatagagtagtgcccacacacagcaagtgatacctcaatcatagtcactaaagaaggagagaaagacatccaggttcagatcttgataatactctgcgacagaaaagatacaagggttagagatctgaacggaaggagacataatattccgctgcacccaatgtaaaggtttctcatactttatatgtgtttattgcataatcgttttagaagttcatatttaaggtgttaatcaacatacttgtgagtagatctaagatcctggtaaaataatttccaacagtaccatcataccactatcgagcaactatcgggcctcattgtaccaatacgaaacccagtaaaaaaaacataagaacttctattttaccactttgaattatcaatttacaataaaagaaagcacacaaaataaaacttgctaattcaacacataattgtagcattactaacataaaataacatagtgaaaagaaattcgacgataaatttttaatctcaagaattgcatgactttctgttgtgccccttagcaccacacttgctacacttttgttgtaccactatcttttcaccattagaatgagtctgcttttgctttattcttccatccttttgcttcttcggtcgaccaacacatttcttcttaacaagcactccacctgtgatgttcttaatgtcttcggacaattcccaatcatcctcgtcattgactagtataattgttctctcatatgtgctcctccaatactttattatagtgcatagtgcgtacatgctaatatttcattcttgagctgaaacacatgcatgaggatagagaatcttcatgatttggaataggctgcaagtgcacgtttgtgtccgcaaggctactacaacacccctctcaactgatcctccagggtgaacattgaacgtgtaaggtccacacgtgtcaatgttcaggcaccaagatttctcaaactgcaatgacaagtcctgcttcatttctggtgataatctccgtacacttgtcaaaattttcttttcacatagcaaaccactcttgaacattgaacataaggaattcaatagaagtagtgatcgggaaggctcttgagtccttaattgtgttgttgaagctttcaacctagttgcttgtcattacattgtaacaatcccttacaaagtaagaacgagccacctttaaatccaatgccctcaagatatagtttaatggcaacatttcattgcttttatcatcttaaactctctatgaaactttgtttttgtatatgagtacgcacacatgtaaatatgattcatgaatacgtcagtcttgaacttgctggccacgtttagagtaatgtggtggtagcatacaccatggtgtgcatcaagaaacacaagcttccaatcatgaacaatgcactgatgcctatccaatacaaaggctaagttctcaacatcaccaatcaattctttcaattttctcatgaagttagtccaagagtcatatgattctcactatcaattatcacgaaagcaattaggaaaatgtggctatcagaatctaatgtcactacatacaacatgtgtccaccatatctagtcttcatgaatgagccatcaacgcatacaacaggtcgacaaaacttaaattcatgcctacaagaacccagcataagaaaaataatacttgaagtggccattctctggcataaaatccgtaatggtacgtggatttttcaattataacatatgcaagtaatcaggcaattttgaatatgaagcttcaagtgtaccccaaactaggtgtagtgcattctctcttcacctccaagcgttttcataactcattttgatcacataattgttatgcatatattttcttataccagaggccaaatgatctgagtcatcacttgcaaatttatccttaattaggtggacaattatcaaaggtgatgtttgacggttatctttactttgaacatcaagggagcaagtgtgtgaattttgaaatgtaatcacatcaaacatgtcataaaagtaagctcttcttcactcttaatctctacccttaatttaaattcttgcatgtaatgtatcaaatagcttcgatccgtttcttcattgcatacaagcgaacaaccatcttcaaatactttttgtctctaaaaaactttcctaaatgtaactccccacctggagtaccacccatagatgtataataactattatcctcaacgtcttctcttgtcaatatttcttcttgaatttaccgtaagttatcgaagaagagaatggatcactaaatcctctagcatcactagttcctctagcataattggtttctctagcattactggttccgtctaaatgactactactagtactaggtgtttggcaatcttctctatgggttttttttctacgtgttgtttgcctggatatttggtacgatagtggagtcaagtttaaagctacagtagagacctctatcttttggtcgtctcttacatcatcattgtcatcaaagaaagcttcagggtctagactatcaccaaactcatcatgcaagggtattcgtgttacaatgtcaactgccgacatcatagtatttaattcaggcaacacattgactaccaacagtacttggtgtaggagtaggatcgatacaaccattcttcttcaccaaagtcataaaaaggggaacagatttatctggcttcttcgaaagcattgacaaatataaacttagatgcttatcattacttataacttcaggccgacacatcaaccctttcatgtacttgtaattcacttctaattttaagtcatagtgcactttgtcaaccatcatctcatcgtacaaaagttcaaccagttgtgagtaggttatgtgcttatcaatctcgaatatcaaattttttgctccattaaaaactcaatctctaccctcatactctcaaacaccattacacatgatgaatgtaaacacaattgaccctatgatccataataaaaaagttaatagaaatgataatcaattattgaacaatatgtgtaatgtcagacaaatatcatacacaatgaggctgtaatcgtacttaaagaataatattcaacacaattctcatcgtaccaacatcgaataacaatcagacaaaatcaaacctaaccaatcaaacgaccattgaactataatcggaccctattgggacaaattcatgactaacatcctcaacaaataatttgacaacatcgaaccgaccattgaaccaacaatcgaactaatatcgaaccttcatcctgacctagacaattgaaactctatcatatatgcttcggaccccatcgagacatcatctctaacctcaaaattcaacaaactattagaacactatcggacccctatcaaacaccattgagctaaagcaaaaaaaacttagaaattagaaaaaaaaaacctaaattttcgaagaacaatcatttccacacaaacattagcaaaaaaagcaacaacctacaaatcaaacatctaaacaacattttaaaataactataacaaccaacaacaaaaagaaacaaaaaacatcacttacccattgattaaaaaaatgtctcactctaatgcaccttatatgtgagcttgaagtaattaaaatccttacttttaataagatgttagtgtgatttggttagggagaaagagagaaaatgagtttgagattgtgaagtgagtgaagagagaaagagaaagagaaaggaaagagaaaataattttatggcatgtttactaataagcaatgggaatcaatagtaagggagtcattcccttacat

SEQ ID NO: 295319 - DNA, 5532 bp, Cannabis indica
agaatcgataggaaagagaataaattttaatctttgacattgctgtgttcaattgattacaccgttgcagacgaaatcagtttctttttttttttcataaaaaatataagattagagatatgattttggatccttttctgttaaaacttcggtggaaacaattaacacatgagtttttgagctgcaggtagtattgatgagcggtatcgagacaaggtgagctttcatggttacaatagacctaaagagccaccaggcccttttattttttatttatttttaactgaagtttgcttttgtgtttttttgtttgtaattatttcagattcttagtgccaaagttccctcagtagatgagagaagtgagtggtggcaggtgttctaccgaggaaacgcatttccaaccttagctcgagttctgttacggggtacatttacatagtttgtgttcttactccattttgttataagcatcatgttcgagaaagtgaagtacgcaagtttgtgttttcatctttgttgtccatagatgtatcctttaattttcatgtacattgctattttggttgcagatgttacttccaattggctagcttgtttcccgatttcggcacgtaagcatgtctatgatgcatttttttgctaatggacttatgactgaggttgttcaagccttggtcccctgcttacagcccatcggaactgatggacttgatgttcaagctgtccgctcaaatactgaaaggtagatgttgacaagctcgtaacttttagctttaaagttttgtttcaacattgtatttgtttgcttggtccatgttgcgcatgagactagctctctaatgcatttttatcattacaatttaaaaatatacctgagtaggagtattgatcattgtaggtgaccctttgtttcatgtccatcagtcaacacatgggttacaaaatgaagaacaatcatgattttgtgttaaattgtaagtttagatgccattttcctcaagttgatttgctagtagaattttccaacgtcagagttcactaagttcagtttttattaatctgtaggtttctacagacatgttttccccatttttcaacaatgtgcaacagttatgctatagaactactaaaattaaatgtaacatagttttaatctgggtaacagaaaaaaaattctgaatcctacgagttctattgtatctctatctgtgttttcaagatattgtatttgaacgtcaccatttttttatggattagaaacaagactttcattaatgataaaataaaagttcataagtaatcaattccgagtcttttgctttccttttcaaactccacagattactcattctttgcttgctcgaaaataatggagtggttcagatggctaaggaatttggcgctgcttaccaaactgaggattcttttgatgaacatttcaaggcacgtgtatcaatggtggcacaaattgtttcatctttaccagacaaagcacaaatgggagctgctgtttcactctcatctcagtatcctttgcccaatcttgtttggttaatgttatgttcaagctgtgtgctttgacaagtttacgaggatcacaaacattaaaaagtattcaaaatggctgggtatcagaagttgagatggagttagctatatgatatattaattgcttgcatttttggagctccacattaagtgtttatcctttacagaactatagtatgttcttcaaacagattaccattcagcttctttctctggcagaagaaagaaattcaaatttagtaaacggaggagccgttttcaatggaagtgtcatggatggttatggtacctttacatttgttggtgaaacattttcccgcatttgtcgtcgtggatctataggtgtgtcaaactgaaagcttaagccgtatgagaataaatggattctttatttatcttcatttttgtcttttttgcaaaatttacacttctattatatgtttctcaagatatctccatccgaaagcttaggtgctcctttttccttgtatagtagcattgtcatttaatactgtggagagtacaaactgaatgtttaaaaatcttttttacagatgttcttgtaagtgaagttgtcccaagggttctaaggcatgttcaaagtctattgtcattaaatgatggttcactcgttgcggatgttattgaatcaaaccgtgcttctcagttttggttgaatatgatgttatcagtcaaagattcatatgctgtggaaagaatgtcggagcagcttttacgtgagattgcaaagaaacgggtgagtgatgttgaagcttattggattctgtggattttgtttcatcgaagtttttcacatcaggtttcattcaggtcagtggatgcatttcctttgtttccctctctttccaagcaagtgaggaattgcatagttattttagtattttgaaattaattttatacagtgccagtgccacagacaacttacaagtaaggcagttgttttttgctagccaatctttaatttttctttcttcttaggtccatgctcgttgacaaatttttactctggaaagtatttcctattagttgccttcgttggatccttcatttcgctcttcttgaacacccacctgatgtaaaaccgatttctgaaagccacaacaaccagaaattcttagaggcactgcatagtttagcatcagtgtggtccaagaaggagtttgtgcaatcggctacaacagagcaacagatttgtatcctttttattgctgtcttattgaattgtctataacaaataaacaagttgttggagcttcaacttagggagaattctttttaattgttttacaataagatcaacttctttggctcttctggttaatttgaaaagaacttgcattgcttctgtgtcgtttgcagttctgttaccccttaatgttataatttagatgtatctgcagctgttggcctttccttggaaaatatttctagggagcaactagatgagattaaggatgtgatgccttcaattcttcaaggagtgagctgtaatttttcactctatttctgtgccattcttgtgtgactggctgaccactgtcttacattctttttttttttggcttgcaggtaggctggagagtccaaaccatttggtgcggagaatggctagcagtgttgctttagcgttctctaaagttattgatccagaaaatcctttatatctagatgatagctgcataggagaaagcattgactgggagtttggattagtcgattctgagaaagaatgtttaacaaacaataagtgtatagaaaagggtgtcaatgttaaatcatgtatttcttcagtggaggaaaatgatgtaaaccacacagctgataaaaatatactgcaaaatgtaaagactaaaactaaggaagtatcggagtataagttggttgacccggatgagattattgatccagctactcttaattgtgattctggctctgacaaagatgatgatgataatgagagtgagatttctgatacctcaagtgactcatctttacaaccgtatgacttggtggatgatgatacagatttgaaaaagaactttacacagttggtcgatgtggttggagcactacgtaaatctgatgatgctgatggagtaagtcatccaactcgtttgtcaattttatctttttaatgaccatttgagccttttaatcagtcattcatttaagagatccgcctgttgatgccatttctgagatttctttagacaaaaccgggttaataccgttctacctataatttaataacgatatttttagttaaaactttaattatttgttagtcgtatgagacatgtcaagactattttcttctaaatggttcctataaattatgtatatatctttcacaggtggagaaggctcttgatgttgctgaaaaacttgtacgagcatcacctgatgaactcaagcatgtagcaagtgatcttgtcagaactcttgtacaggttcgttgctctgacttggctgtagaaggtgaggaggaaacggctgaaaacaagaggcaaagagcacttgttgctttggttgttatgtgtccattggagtctcttgacactttacacaaacttctgtattctcccaatgttgattttagtcaaagagtaatgatactcgatgtaatgaccaacgctgctctggagctgtctcatacaaaaactacaaaacccaaacatcagacgagaccccttatctcaaccatatcagagaaccaggcatggtttttgcctagtgacataggaccaccaggagcaggcacctggaaggagatttcagaaacaggaactttacttaactgggaaaatcgttacgagagagaacttcccccaaagcccggtcagataagaaaagggaagacacgcagatggagcttgggatcgtcaaacatacaagacaaccaatcagcatggtcccataacaagtttcctatgtatgcagcagcatttatgcttcctgccatgcaaggctttgacaagaaaaggcacggtgtagacttgcttaacagagatttcatcgtcctagggaaactcatctacatgctcggtgtttgtatgaaatgtgccgccatgcatccagaagcatctgcattggcttcccctcttctagatatgctacaatccaggtaattagcctaaagtaagcacttaaaacaatctttgtttttccactttgctatttgtcactaaataacttgatgcttgttcactctcccaggggaatttgccatcacaaggaggcgtacgtgaggaaggctgctctttttgcagcttcttgcgtactgtcatcacttcatccgtcctacattgcttcttctttgactgaaggaagtcttgaaatttccaaagggcttgattgggttcgcacatgggcccttcacgtggccgaatcagatacagatagagaatgctatatggtatgccattatatctcctttgatccctcataatcttaagtacttatatcttcaccttcatgatcacatgtatcttttgttatcagatggctatgacatgtctccaactccatgctgagatggctctccaagcttcacgggcaatggagtctattgaaagtacatccaaagtggaaaatattggtcttctctccagtttgtctaaggacactataaaaatcccttactccagtgtaaaatttcattaatttctttatctaatacttgaaatcaaaattactaatctcttttgtacagttaaaaatacatgttaactttcttttgaacaatacccaagtggccaagtgttatatgcacttatgttgttttctgaaaaatgaaaagacagaggagaacatggcccatagtagagtctataaatgcaaaccaaaaacttgaatagttcatatcttaattataagactacaccataacacaatgtttaaggtaagagtcaaattgctatcgttttattttgttattttattttttgtctattatgttgc

SEQ ID NO: 295320 - DNA, 4134 bp, Cannabis indica
atagtgtttagtctatttttatttcatgtcaagtcgtgttgatccgtttttaatctacgtctaattgttacgaccctaacctgtaaaatttatgttctagttttgccacccataatcaatagcttcgattagaatcaaattttaaatacaattagaataactcgacaaccaaatttaactaacaaatgttgtaataacatatttagcgaagtgtaaactcaaactcgaaccagatattctcaaactcaaagatgcgacattgattcacaatattcctcaaagtcaatgccttggcaaccttggcgacattttttttagaaaagcgaggtgacattgataacatagtgactttgcctctgtacatatatattatttcttattaagatattagcggcaaaaccacatgaattatataatttgttacacttaactatatatactattttttttaccgaatttttttccaaactcccgttctatttgggaaatttacaaaaatattgaaatttgggttaacttttacaaaaatgctcacacagaaatcttttcaacaaaatactgtatttttataaaacactagtagaacacaaaacagaacaactaaaaacaacagtggaacaactaataaacaacagtagaataacagtgaaaacttaacagagtacacagtataaaacttacacagtatttttgaaaaaaaattcactttataaaaataataaaataaaaaatttcagtatgtagtgtaattatccattctattttgctatttactattccatccaaaacttttttcttaaaagttttatataaataagggtgattttgggaagtaaaattgtgctccagcttgaacatggtcggctccaatgtctgctcacccattggaactactcagtactcactcaccaccaccaccatttccaagatatggttccgctactactcactcccacaacctcactaccctctcctttccaagacccgaccaacccatctccatttcctactcatttgaccaaccactcaattccacttcttatgcttctcttcttgactcctgtaaatgcccatatttggggaagcagattcattctcactctgtcaaaaatgggtttatggggcatgagtttgtggaaactaagcttctccagatgtatgggagagtcggttgtttggagcaagcatacttgttgttcgataaaatgccccaaagaaacttgtatgcttggactgcccttttgggcgtaaatgttgatctggggttcttcagagaagctctttcactctttctagaatttcaatttgaggatatggggttggatttttttgtgtttccagttttgtttaagattagtattggtcttggagcactggaatcaggtagacaactgcatgggattgtaatgaaatctcagtttgttgataacatttatgttggtaatgctttgattgatatgtatggaaagtgtggaagcttagacgatgccaagaaagttttagcaacaatgccagaaaaggatcgtgtttcatggaattctgttgttactgcttgtgctgccaatggtatggtgtttgaggctttggagtttttggatagaatggcttcggataagttaactcctaatcttgtttcgtggagcgcggttcttggaggcttttctcggaatggttatgatgatgaagtcatagaattgttgtttagaatgcaagcagtaggatttgagccaaatgcaagaacattggccagtgtccttccagcctgcgcaagactacaacggctaagtcttggcagagaaatccatggctatattactaggcatggatttatgtcaaacccttttcttgttaatggattggttgatatgtatagaaagtgtggtgatatgagaagcgctatggagatgtttttgaacttctcaatgaagagtagtgtctcttttaatacaatgatttccgggtattgtgagaatggtgatatctcaaatgccagggaattatttgataatatggaattgatgggtgttgagaaggatgtaacttcctggaactctataatttcagggtatgtcagtaactccttgtttgatgaagcattgtgtctgttccgagaatcgctacgggaagggatagaacctgattcttttacactaggcagtgttcttacagcttgtgctgatatgaaatttttgagacaagggaaagagatacattctcatgcccttattaggggtttgcaatcaaacacttttgtgggtggtgcccttatagaaatgtactgtagatgccatgaactactggctgcgcataggtgttttgatgaagttagggagagggatatcactacatggaacactttgatatcgggctattctcgctgcaatcaaatagaaaaaatcccaatatttcttcaaaggatgaaggaagatggctttaagccaaatttatacacttggaatggtataattgttggccatgttgaaaataatcatcttgatttagccatggaattgttctctgaaatgcaggctaatttgaagcctgacaaatacaccgtcggtattgttttatcagcttgttcgaggctggctactataaagcgcggtaagcaagttcacgcaaattctatcagatgtgggaatgattctgatgtttacataggagcagcacttgtagacatgtatgcaaaatgtggaagcttaaagtatgcatttttggcttataacaggatctcaaatcctaatttggtatcccacaatgccatgcttactgcttatgcaatgcatggttatggcgagaaaggaatcgccttatttcgcagggtgttagaagatggatttagaccagactctgtgacattcctatcggttctttcttcatgtgtccatgttggatcagttgagatgggttatgagttcttcgatttgatgagctctttcaatgttgaaccgacgcttaaacactatacatgtattgtcgatcttctaagtcgagcatgtaaacttaatgaagcttatgaatttactcaaagactgccaatggagcctgattcggttttgtggggtgctttgcttggaggctgtgttctgtgtggtaatgttgagttgggaaaagttgcagcacagaagctaatagagttggaaccagataataccggaaactatgttgtgttagctaacttatatgcctatgcaggaaggtggtatgatctagctaaaatgagagagttaataaaggatagaggaatgcaaaagagccctggatgtagttggattgaagatagagatgaaactcatgtttttcttgctagtgataaatctcacaatagagcaagagagatatatgatactttagaaatattgcatttgcacatgaaagtggattttacaactagtttgtgagtacttcaaacataatattgtgttatggtatatacttacattgattacaaatcaattattgcctcaattatcaggcagtttaaatgaatgcttaaaaataggactaagaagtaagaaaacaaagaatatttgtgaaattatcactgcaacatgcttcaaaatcttgatcaaatatgacaaagggcttgtttgacatgcttttggaagagcttttgaagtctcaagctacttataggtttgtttggataaaacatgaaaaaagcttctttaatttaaaagagcaatctagagaaacattgacttggaatctattttgttagtttaatgaatccttcttaatacttgttttacctttctttttatatatataaaaaagaaaatacattcctatcttaaagtttttacttataggcctacttttttgatagcaactcctataacagtaaaaatattacttctctttctttcacgtcagctgctcttgagaccacttccgacaagcaacttagatggcaatctactattagaacatctcctatagaagtcaacatctatagttgccaaaatacatatatcatcttaaatttttttattattattttatctctcatctacataagatttgacatatttttctagacaactccaaaatttacctaccgtattcccacatactactttttaattaaatttcataattatatataagagaattactctatatacttatttt

SEQ ID NO: 295321 - DNA, 4384 bp, Cannabis indica
aaaataatgaaaatgtcattccaataaaataatgtttcaatatttttaaatgtaataaagataaagtaggcacacgaagcttccctgttctggaatcctctagggttttcttctagtccttccagtttgcttatgttcatccgagtgatgccgtccatctttttctctttccattttccctccattacccccgtttcatcattacaccacatttattacttcctgtttttccctcaggctgaaggttgcatttaatgttgtatcagagaactcttggttctcctcctcattggcctcaaatcccacctttaataaccgtcactttcctcaggagatcaataataatcatgattttaggctaccatagattcgagctaaaggatactaggactaatccagcatctctctatcttccagcgttaactctctccagctattttctctactcttttttctatttaaaggtttttgttaaggtttgtttgtatagttttttacccaaaaacctgtgactaccactgttagcaccttttctcatgcaatctaccatgaataccaacccataaaccaataaccactctcttcaactcaatgctgaggaagcattaatccatgatttcgatcatgtttccatccacccagaaactcaaccagattcattctacatgtcgtcaagattttgacttcaaaaaccttcaaacttgattgggtctgtaacgctatgaaggatgcttggattgcccgttttcctttcgtcttcactaaatatcattccagtctgttcttggttagatttggttgtgaaggggacagaaggcgagttatggaaggccagccatggcattttgatcgctcccttatgttatttgccatctttgatggttttgataccattctccctagccaactcagatatatcgctctctggttgcagattcattatatcccttttggcaataggtaacatggcttagcccattttattgctgacaccgtttgggatctcattgaagtgcaccttccatctctctatgattccattactcctttcatgagatccggatccttcttgataccactaaacctctgtttcgtggtatgaacatccatttcagaaaacttccatcactgaattgctgaaattctaatatgaaagtatacaaaactactttaccattgtggtaagcttgactacacttttaacaagtgtgacaactttcttcattactgtgacactcatgcccatcccatccatcagttataaggatgttcttaaagccccaaccaaaaccttttacaaaaagagcatttttgagctgtccaactcttcaacttttgaagaaaccccttcactcaacaatgtctccagtcaaagcccttaaaatgcgattgtcaatttctggtccctagtattgccaacacttctttgctaaatactcctgatgctatgaatccttcctctacgatcccaaccaatgtctcttgttaagaatacaaatgttcaccaactcctgttgtctttgttttctgccctatcacttgtcccattaactccaaccccatcatgacttctactgtgatcacctctacctccaagggtaaatgccctatgtatctcgagggctccaaggacacccctgaggttcatcctgatgtacccatttgtcccagggctcgtgttgcttctatcaacatctctagatccaagaggtcttatacaagataatagccaagtgggcactttggtggggagcatcctgaagagggcccaatcctcaaactctgaatttgatgtggttccatccctttctgatactgctgaacaggcgggtgttgctcatggattggagagttcccgagcattccataatctctccctcctggtgcatcaacatcatcctcaaattctttttgtgatggagactaaacttcctgctaatagtagtattttgtttaaggctaggttatcttttgataaaacttttgaggtgcctaggcatggtttaggagggggcttgcttcctttttggaatgatgtagtcaatgttcgtgttttatcttactctttgtatcacattgactgtaatgttacatataataataagaactaccacttatcttgttactatggttcgccttatgtatatattaaaactgactcttggactcttttgaatcgattatttgatgttgcccctctttctccttggatcatcactggtgactttaataactacttgggctttaatgataagagtggtaccaccccccccccccccaactgctatgctcaatttctaaaactgtatcaccaaatatgacttgcatccccttctttttgttagcaatcgctttagttggaaacatggccgaactatggaatgacttgactggggtattgtcaataaggcctgggatggcctttttcctatggctaatcttactcatcttcctttctttagatccgatcatagagctattaaagttgagtataatcccaatccttatctttgtaagcgtgttaaccatttcttctttgagaaccactggctgatggaccctaattttcatcatctcatcaggaagagttggcttgaaacttcgaatcataacaaccatgatctttccttgcattctttccttaactagtagaataattgtgttaacaacctcaaaatctggagccaatccaaaaacactcttcatcacaatattaagaagttgcagaatcaaattgagtccatttacaacatgccctccttgtctcccaatgatattacctgtgtcaatcaccttcaatcatcccttgactccctcttattaaaaaatgaggttttttggaagcaaagagctagagttaatttgcttaatgctggggataagaatactagatattttcacaaccgagctagctccaggaaaagaaataatatcattaagtccataactcttgatgataactctgttgttaacacttttttttatgtatatttgtgctacttttgtcaacttctatagcaatcttttcacgacaaaagggatgaatatggattcggttaatactgctttgaatggtatcacacatcgtattacccctgaacaattttcttttcttgataaggattttgatttctccgaagtcaagactgctcttttccaactttctagggacaaagctcctgggcttgatggcctaaaccctctcttttattataaaaactagaacatttttggttcaagtttttgccatgatgttgcggatgttttaaacaatggtgtgagccttaattccataaatgagacttatcttgttcttatccccaaaaaaagtaatgccaccaaagttcatgacttcaggcctattagcttgtgctcaatgatttacaaggttgttaccaaaaccattgctaataggcttaaaattattcttaccaacctcatttctcataatcaaggtgctttcctcaataatcgaattatttttgataattttgattgccaatgaggttataaatgccataaatagtcgtaagaaaggcaacgttggttgggatgcccttaagcttgatatagagaaagccttcgataaagttaaatggggattcattgagcacattcttcttcattttggtttccctcaaaattttgtctccctcatcattaagtgcatctccacagtctctttcaagctttgcatcaacaatggtctttctccccccatctttccttcgagaggaatcagacaaggggatcccctatctccctatctttttctccttgttgctgaaggtttatcaggtatcattcgttccaaagagcaagctagcttatttaaacgtctctctatttgtcattttgctccctccattacccacctctttactgatgatagccttcttttcacccaggtcactcataggactagtcaatctatacatgacattttaattacctacaataaggccactagccaatctattaatttagctaagtcttcagttttattctctcccaatactaactctcaggacaaaaattcttttctctcttctcttggtttggaagataaacctttcattgacaattatttaggggtccctcagtgttgggttttgtgccctaaataaaactcatttcaatataattagacttacttactaataaaaatcagaaataacattttttatgttgcatggttcacatgatttatttcatgattatatgcatataatgtatgaattctatttaagtccagaacatatgaatttgttaatgattatagtgttgtcagcacagtggaatatactcttaattatatgttcgaaagtttattccctgatttgtcagttcactaaatttagactggcatgatataatcagcgat

SEQ ID NO: 295322 - DNA, 8726 bp, Cannabis indica
actgctgcgttctgacgctacagtttgtgagcgtcaggcaagtctgaatgctttgtccctcactcgcgtgtgagtctcactcgcccacatagccaaaaaagggaccacacatctccttgcgcatctggggggagtttttcaagtgtatttttgtaaataaaaaaaacccgaaaaatagtatatttgaaattaataaacaatataaatgtttatttttgtttatggtagtataaatgtatatttaagctaattttaacccaaaatagaaaaaacccctttaattaataaaaatataaattggaaaaaaaattaaaaaatttagtataattaaaaatatatattttatataaaataaaaattattaaaatagagtgtctttataaattttttagaatgtaaataaaattactcttattttattaactttatagagacaattgcaaactcaacagatgaaaatgtggcaaaagaaagggagtataacagatttggcccacacaataaaataatacattttttagttgtgtcttatacacttcttgttttgtttgtatggttattaattaaatagagattaatcaaccaaaagaaagagaaaagaagtagaaaaggaacaaaaaagaggtctcatcattcagcattaaaaaaatgtacatcaattaaggacttaattaatgttaattaatcaaattaagaagacaatagaatgacgtgatttgtatgctgctgccttcattaattaattaattgattaattaataataataaaagcaaaccaacgaatgtcctctcaaagtctccatctgcacagatagaagaaactttcaaaccagaaaattatagagagagagagagaagaacaattagaacaattctgtttcttaatgagaacttcttccttctaatttcataatttcatcgtctcttttttagcgttaatgtctatgtggggatggtttttgattctcatcataatggtgatggtagaggtattggtcctggtaggtgagagagagtaaatgctatgagagagagagagagagagagacgaacgtccgtacatgggtgcgtgactctgctgagagagagagagagaggggttcatttcattgttttaatttcatatcattagagacgatcgagtgagtggtggtactggctatagtagtagaagtattttgtctgttaaaaaaagaagaaataaatggatgaagagaaagaaagaaaatggacatgcacgtggttgagtgagttttcttacttggctagtggtcgtggctaaatgttgcgctgtgtttttttttttctttctccaaaaagcagtttatattaaatttgcttctcacggtctctgaccctgttaccttctctttgtagccaagccaacccaaaaggccaccatttttgttttctttttactatttctcattagcaattaaagcccacaccttccgactctatcacccaccatttttcttctttcttgctctaaagttcaatttttttttcttttttttggtattttaaccttgtttgagaaacacccagttgctaaaacaagtagatatgaattgggtatgtgctgaattttttttagtgttttttctccatttttttgttttttgagtgagacccatttggtgaaaaatgttgttaagtggtttcgatcgagttgttttggtcgttatattcgaaaatccaagaatcggaaacggcaacaatggcaatagttttgagctttagagtagaggcagaggttggatctactcttaatcgcattcaactgtcacaatgccaaacggataggtaggcatcttgttcatttttgctgcaaaaactttgttttcgagcatgagaaaagtccaccattttcgtttttctcatgctcttgttccgtgctgctttctttggttttttctcggaattcaatcggtttttgctgcaactgagaaagagattctgcttcaattcaaagggaatgtcacaaatgatccttacaatagcttgagctcgtgggttcttagtggcaatctttgccaagatttcagtggtgtgttctgtaacccagaggggtttgttgacaagatcgttctttggaacactagcttggatggaattctgccttcagctctgtcagggctaaaatatttgagggttcttacgttgtttggaaatctcttcaagggaaatatcccagaagaatatgttgatattcaaactttgtggaagatgaacttgagctccaatgctctatctggatcgatccctgagtttattggtgatttaccaaacattagacttttagatttgtcaaggaacggtttcactggacaaattccatcagccttgttcaagtactgttataagaccaagttcatttctttgtctcataacacactttctggtttggttcctgaatcattggccaaatgctccaaccttgagggctttgatttctcatttaacaatctaagtggtgacattcccttgcgactgtgtgatattccaaggctggattatgtgtcagttagaagcaatgctttatcaggaagtgttgaaaagttgctttcggcatgccagagcttaaaagtgttggatcttggcagcaacttgttcactggctcggctccttttggggttcttggattggtaaatctaactcgtttcaatgtatcatataatgggtttactgggaagattcctgatatgacaacttgtagtgacatattggagatttttgatgcttcaggcaatggtttagatggggaggttcctttgggcataacgaactgtagaaatctcaaggttctaaacctgggatttaacaagctgattgggagtataccaactgagcttgctgagctagagaggcttctggtgattcagttgggtaataactcaataactgggacgattcctaaggagttagctagcattcagctgcttcagattttggatttgcacaatctcaacctcattggtgaaatacctactgagataagcaactgcttatttcttcgagagctgtgagtttttaattctaaatctatactatgttacctaataaaattcatctcaattatgctttttccgacatactaaacttctaatatcctctgtttttttgcagggatgtttccggcaattccttagggggagaacttccaaccactctgtacaacatgactaacctggaaatccttgacctgcatcaaaaccagctcaatggaaccatcccatcaaccctgggaaacttgccaagattagatattcttgatttgtcaagaaattcgcttttggggccaatcccttcttctcttggaaatctaactactttaaccaaccttaacatctcttataataacctttcaggcaccattcctgcaaccattcagcattatggtgcctcagcgttttccaacaatccctttctttgtggtgcacctttggacaagtcttgctcggctaatggcaatagcacaaacacttccaagcaaaagaaaataaagttttgagtgtttctgcaattgttgctattgttgctgctgcagtcatactttctggtgtttgtctagtatgtattatgaacatcatggcccagaggaggaagaaagatgaggatgaggcaatggttgttgagagcaccccacttgcttcaactgactctaatgttattattggaaaacttgttcttttcagtaagagtttgccctcaaagtacgaagactgggaatctggcacgaaagctttacttgacaaggagtgtatgataggtggtggatcaattgggacagtctacaaaactacttttgagggaggagtatcaatagctgtgaaaaagctcgagactttgggaagaatcagaaaccaagatgaattcgagcaggaaataggacggctaggcaacctgttacatcccaatttagtagcctttcaaggctactactggtcctccacaatgcagctcattctatctgagttcctctcaaatgggaacttgtacgacaatctacacggtctccactatccaggaaccagcaatggaggtggcaatcgtgatctggattggaccaggaggtttaagattgctcttggaacagctagaggccttgcctaccttcaccatgattgtagaccttctattctccatctcaacattaagtctacaaacattctcttagatgaaaactacaatggaaagttgtctgattatggtttgggaaagttgcttcctattttggacaattatagcctaaccagattccacacttctgtaggatacgtagctccagagttggctcagagtttaagattgagcgaaaaatgcgatgtttatagttttggagtcattcttttggagcttgtaacaggtagaaaaccggttgagagtccaagggctaatgaggttgtggttctatgtgaatatgtaagggtattgttgggaagtggctcggcttcagattgctttgatagaagcttgaggggtattgtagagaatgagcttattcaggtcatgaagttggggcttatctgtacctctgatgttccttcaagaaggccaagcatggctgaggtcgttcaggttcttgagtctattagaaatggttcagaatcatagttaccaaaaccaattagacgggtaacttttgttttctcagtatttaaaccagtgaatcatttatggagcaaaaccccgcaactcctagataggaaacaaatagaaaattcttttgtattcaattgagattaccaaaagtcatttgttctttttctttttttctttcaatatttgtgattcttagtcttacaataaaaatcatttgtttattattgtatctcattcttaaacaaaaatgaaatggaatcaaagccttttatggtttcatgtgaacagagagattcactgcaatgaaatcaagagttccattaactatttaagttttttttttttttctgtaggaagttcatagtgctgttagttcttactttattactcgcttttgatttgtttcagttcacaatatcccccataccaaaccagttctctcccaattattgcaagagttgtttcttcaaaagaatttataatcaccctaaccatgtacacaatgaaccaacaaaaatttttaactatgagatttacagatcccagatattttacgaattcgtttcatgacaacaggaatatcttcttcggtcaaggtagtgaaacagaaacgaaaccatccaggctcaatacaatgacaagaagatccaggagttacattgaccttagctacactcaacagcctttcccagagctcaagctcacctttctcactgtatgaagagattaacctactcatatcggcccaacagtagaaacctccactgctcttagtgcattcaatacccacttgttccaaccctgcagcaaagttatggtacattcttctcagcctctctctgttgatcttcacaaacttctgaacaaattttgcatccgaaagcatggatataagcaactgttgtgatggagccgatatggatgagaacctagtcaacttcttagcagcagtcaagatatgctcattatgggagtagatgacaccaactctaaaacccggaagagagagatcttttgatagaccatacactacatgaaccctgtcacggtcgagatcttctgaatcaacaatttcggccatgcttataaactctgcacttccacaagtagaaccagcaaatatttcatttgatactatatgtatgttcttttctcttgcaaagtccaccaggctgtaaagtgtttccctgctaagaagactgccgacaggatttgaaggattcgaaattataatcccccgaacttttataccacgttttttcgtcctggttgaatgctaattccaaagcagttatgcttaggctgaagttgtctgtactacggcatggaacaggtattatctctacaccagttcgccattttacatctctgtctaaactgcaaaaacatgtttacaaactttagctttcttgtagtacaaatggtttacctgcatagacatttttgaatggagacaatggtgactagtgactaccctgggtaacatggtgttggaacaagaaatgcatttccactatctgctaagcaaaagcttagaatttctattgcaggggatgcaccagctgtcaatactatcttagaggggttgaaagaaactgaatttcccataacttgcgtcatgaaacctgccacagcctgtggaaattttaagtgttaataatgaaaagccaacgaaattgagaagataaaaattgaatgaaccaaataggataccttttttcattttaatcattacacaaaaaggagaaaaaaaaaggagcaaacagtaattgaactccaaatccagaacgatttgagatgaaatgcataccaaaaaccaattccatcatatcattagagacgaactcttaaccagagagaccagacctattgggcaaccacaaaattgtaacctgaagttataacggccttttattaaatgtttcatgtttgcaaatacactcgctttcccaccattctcaaataacaaaacatttgacttgaatagttgaattgaaccattaacaactaacactcaaaactaggcatacataaagagagatttcatgtcacataaagctctaatgacagaattaaaaacaaggcacaataatattcctgccacgaaacagagagaattccatgcattatccatgaaaaccggagaaagacaaaacaaagaaaaagaaatgacaagagaatataccactttcaaatccattaacccatcaaaaggttgataacttgcaatcctgctaatactcagctcagaaacacttcctcttccatgacccaatatagcttcccttgcgttctccacaagccaatcttgaaccaagtccaatgataactacacacaccaaaccaaaccaaagttataaaacaaacaacccatcaatcctcaacactcagatatcaaacccaacttctcaaaaagaaagaagaagaaaaatcccaccttgttttctgccaaaccaagctgaataacaccacccggattatccaacccgtcatacggatcatccgagaccttcctcgacccaacatagtagggtgaatcaccgcttttggaaatggaattggctcggcccgatacgtgaaccggtcctccgtaacccctgggggagagcagggaccgagaaaaggtccgtggcaagaaaggaaattcggccaattgccccatcgacgtcgacggagaagacccaggagacaaccgaccctccgaagacgacgaagaagaagacggaggaggtgggtcaggacgacgtctttgtttgaggtagagttgcaagaaatagtaaagagcacaaggaataagcgagccaagaacaaggccacctctaccttgaaccacaccctgaagaggaacgataactctcatggcggtccctccgccaccgccgccgccagaactggttttggggttggtgggttcgtgacgttcagtggaatgagtccgccgggaacgagttacggtcattatagaaccattgaggcaggaacggaaccagcagcggaaagggtcgggttatgtgagcaaatagggcaattgggtattgggtcgccggagaagactagtaaggatgagctagtaatatatgggtggagccgtggagctcaacaactatgagtgagtgactgacgattttgactttgattcggcttctgcttttcttttcacctttccttagtttgaggcgaaaattagttctagtcgttaagattttatttcttctcaaaaatacaaatgtcaaattgtaattaactcgatcaaatatttctattattttttcttttaaagacataatatttctattatttatttggaatgtttaaataaatagaagaaaagttaatattggtaaccaaattaggaacattcgtgtcactatgttaagatttttacacaaagaacttattacaacatctattatgttacaactgtcaaattgtacaaaatttaattaataattgattaatattatttaaggattttttcgttatgagaaatagaaagttaattgagaataagttttttttttctttttatagatattaaacaattaagtttttcacaaaaattttacctttttgaatttttaatacagttgtgattatggtgaagcatttacacgtgattgtattacatatataatttaagttattaataagttaatttgggtgtgacatacaaagtttgtccactcaacacaagcaattggttttttggcccattaacatcaaccgttggatttcaaactagtgtttaattagttaaaagaaactttgttcatattttgtattgttttcttctcctattgatttgaaaccactaggaatctcaaccaatgtgggatggaatctttgttaacctcataataattggtcatcaaatccatttgcctttgccactatcaaacaagtctttttatggagttttgtctcttcccatgtctaccacaaccacaagctagctatactaaagaagtttcaataaggcaagccaccaaatatcttacattttcaataatacccattttacccctcctctctcaatctctcattcccaccttatgttttattttagagtaatttgcggcaaaactccctcaactatcaatttacttgcaaaaaacacact

SEQ ID NO: 295323 - DNA, 11353 bp, Cannabis indica
tttcagatataagtttgtttatttttttttattttcgtaataatctggtaggtttttagtgtctaaattttttgtttcatttattatttcaccagaattaatgggtattttccgggtgttttggtgttgctgggcaggttctatgcgtgagggacgaagatgaagtcattggtattaattttctgtgtctacagtataaaagaaaagaaaaaacccaatccagtataaaagtaatttctgacgtatagcagtatttttgtaaagattaagctaaaaatcagtatttttgtaagttcccctaacagaatatatagatagagagataatctctaaccaagaacaagtctcatccacccctaatacaaatttagcaaggccatgggctgctttatttgttaaacgattaacatgcgaaacatttacatcaggaaaactgaatttcaattgaagtataattggcaattattgttgaagaacccaattaagactgaaaaaaagtgctttggcctccatttcattacacttaaaattttcagaaaaacttgtttagttaatagacaaattaattaaacaaagtcaatagacaaaatacctaggcattatgcatatattttatattatatatataataatagacaaaattataaaattatgattataatgtgatataattgaaaatataggaaaatccaataagtaactggacccagcccagatgtaccgcgcttctcttcaacggtggggttggcggagtagactggccgtttggttacatggataactctattccggacacgaataacgcacccagagctgggaaagaatcactatcaatggaggatcacaggagttggaaagagtaagcaaaagagatagcttacctcgcatattgacctctcttccggctttccaatcttcaccaaaattttgtttttattttcagagttcaggattctctcaagaacaaactaattgcagaagatgatttctcatggaaaataccgatgtctggacccagaagaagcttaagcatggaagaagaagaagaggttgagcttggagaggttttggagtatgtgggtggggttgatataagcttttctaagaaggattcatctgtagcttgtggcatccttgtagttttagacctccatagccttgaagtagtctatgaagatttctcagttgttaccctccatgtcccttatgttcctggcttccttgctttcagagaggtactgtttgttccacatataatattgctttggcatctgtttggttgataggaaaattgaaagaagagaaaaacgattttcattatgtattttttttctcttttggtggtgtcagcttgtacttaccattggaagcttagcacttagagaacaaaaagtatttgtggatgtgatgctgggaaaatttcatttagttggttcagtactttttctttttatgaattatctgggttgcttatgcttctttttcttttgtctattatttgatgatcttgtgaatgatatttgtgactaattgcttaatgcatttgactcttgtatttgatttaggccccagtgcttctccagcttttggagaaaatgaaaaactgtgcaaatcctttctatccacaggtagatttcataatataagttaccaactactactgctactactatcattgttattattaattgttagagtagcaattagcatggaccagagatactaatagaaaaagtaaaagattacaggttgttttgctttatttactggaagtcttaggctttatatgctataggtcttgtttttattgtattgattttgtctgaccacggttttcctccgccacaagtgaggctcggtcagtctaagacatatgacctgtgtctttcttttgtaaataaaagaaaagtaagttttaacagccttgttatggttttgatttattatttgtttgttaaatgatgcttactaagttggttacactttcctattactgtagttgctaatggtagatggaaatggagtactgcatcctcgaggtaattgttttagtagggacattaaatagctttaatatgtatcagagttaggaattattttttctgacattaagatttcattgtctaattttccagaacatctctttctcatattagtcgtaatattaatattatgactcatggattgactaagcatgctcttaggctagatgatgaactttcttggtcagaagaaactgttcttcttatttgtaactgtgttttgttgcaatctcaatcttattatgataaagtagtttctgaaaaaaaaaacatgcatagtgtagctaacaattacattgaatttagtaatgaatattaattctctctttctctctctgtgtctctctcaattaggttttggcttagcttgtcatttaggcgtggtggctaatattcctactattggtgtgggaaagaatgcaagtctcaactccatcaccctttaacacctccctataagattgttgaagctgcttgtttcggtttcataaatatttgtactatggttttattgttttgttcagctccagtttttttatttttcatgttttgattaacagaaaagaatttagctaccatcaagatctggatacctattttgttttctgctgctaatctgtagaatcaatgttacctaccactgttgcatgacacagtgaactaattcttaatgcttatgattttgggttaataacttaagtccttgactagttgtataatttgtcataacagctgcatcatgtggatggccttacactgtcaggagtgaaggaacttctcaaagcaagaaaaaatagttgcggagatttcattaatttgataggagactctggacatgtatggggagtggtaagagttttgagtaaatcttcttttctttaagaattatcaaaatcaccttgatgcgaaaatgctatgttgaaatctcttatggttggcatgagtactccaatggggttttcgagcttactgtttataaaatatgttgactgaggttgttagtgatttaactttcattagaatatctgagattttttttagatatggtcactgagacttgttttttttttttaggtttttgttcatatacatgtttatgtttctaagcaagctgataagactccctctgatccttttatttttttgaattttcgctttttttttttaaggcaattagatcgacagaaaatttgttgaagcctatatttatatcaattggtcaccgtatatcacttgaagctgccatcaaaatagtaaaaatgacttgcaagtatcgtgtgccagagcctatccgccaggtgatatactactctctaaaaactttgaatgtctgctttgataattgttttcggctctatcaaatttagttaattttctcatcagctaattttcaatcatgttgatctcaatatttctgccttgaactttgaactagaaaataatcattttttcttgtttagttgtattttaaactatttaaatttcattccaattgattaatagttaaaacagttatttaaatttattctattctatccctcttattattctcatcttcattcctattactctgttttgctagaaaaatttgattaactttcagttctgtttttaaatgaaaatgtaggctgatataagatcaagagactatcttcgaaaacatgagctatgaattgttcttggattggatgataaaattccgcgagcctggtagacttactctcttctttctgtttgatatgtacaagttactatatttgtgcaatggcttgacaaaataaaaccacgaaaacaaataaaagtataaaaatgaaagtctcggagaattaatatagcaatctcactcactctgttgttccttccttttagaaattagtgagagatccttgtatattatattttagttttcataatatgagtattgagttgtatctgtaatgtaatatctgttgtcttatagaaaaaaacatctatatgttttagaatttgaacttaatgtgaatgttaacaaattgaatagcataaatgttagctggctgatcaatttgttgtccaatacaaacatagctgcagcttttgaaagtccaaactttaaacccaagctaccagtactaattctctataaacaacatcaactgggaagggaaagaaaaaactagtaataatgataatactaatacaagctcaaaaggccaagaatcacaataccattgtagtcagagacaacaacaacatcatcaccatcatcatcaaaccatggggctttttaagatagccagctccagctcctgctcctgctcctgatccgatattagctggtgattctgcttggatcatgatccgaaatttgcagttttcaactgatgggtcttggtcagtgatggcagaaagatttgggaatctacaggcactatctagctggttgcttatctgatagtaactgttgaatgcataggaaatgtttcctcgagcatccaagttttcacaagaagaaccatatccaagactggtgcaatcaccattttcacaagcatagctcacactcggtgccaattgtggatcctgcaagttagcggatgaagacaaaacacaccattttttagccaggtaacgcacattggttgctggtactaacccgtttgaattggaacctagcttcagctggtacttgggtgatccatcgaaataaaaaataccccaatggcgttcgaagttccctggcagaatgctcttgtgatcttcatcaatgagactaaacaagtagacatccatgggtccaggtctcattggggttcctgtctcggcattgaacctagacatgaacccttggttgaaccgctgagcaagctctacagttgcacttttgtcaccatcagtaggccagccaatctcaccgatgattatggacaagtttccaaatccatttttctgcagagcccataccagtgtgtcatggtttgcatccaagacattctggtagatttttccattgtcgtttatggcagcggaatagccatcaaagaatgcgaaatcaacagggaaattgggatcgttgtggaggctgataaaaggatagatgtttacagtaaaggaacctccattgtcgcttaagaacttaacgatggccaccatgagatcttttatgtctgttctgaagtcaccgtcggaaggtttctcactcgagctgccatatacatcagcgtttaaagggatagtgactttaacttggctgctcaaaccagctttaataagggctgattgaatgttttgaagagcaggataagttgtttggaggaaacttccattgtaggttgacaagaatggttcattcccaactgcaacataccttgcaaaaaatgatgtatgattttgaataagtactttacaaacaagaattaatttcagacagaaaaacaaaaacatgaaactccaagctgaactttgtaacaggtctacctcattcatgtatatatatattattatttacacatcacatgattgaaatagaaggaaattctatgagtttttacctaatgtccacaccgtttgagacgtgactggagacatttttagctacccaattctcagctgttttgacagtactagccatgctactaagcatgtcgtttgggatacccaccatgacttgaatcccagaattttttaaagcattcaatattgctgaatctgcatcaaagagcttagccttttggattccattatcctttagcaacttcaccactgttgcaggaggcaaacgatgagtcgcctgagttccccaattgactccaattcccaccactgagttcactaacaaagaaaccatgagaagcccacctagaaaatcgactgcttttacaaaccccatgagcctcttttttcccaaaacacagttgttgtttggtttggggtgaaagaaaagaaagtgaaaatgtttttcttttttttttctttttcttgttcttttttgttgagtttgaagctagtatttagagattatagctttgaagaaacaaaataatttggagagtgaaattaagaagatgaaagaaaaattggcttcttttttagttttgggtatgaaacaaaatgctgatttagcagaagagctctaaaccagtatcagaaactgatgaaactcaaaacaagataacccagtttctgaattggaaaattaaagttaaagaaaagactaaattaaaagaagaacttgaacttgatttcagaaaatgaagctgcaacaaagagatttgactcagcttctaatgtaaccgtatgaagtgaaaaatactcacttggatcattcattcaagattcaagaaaacaccaagaactaagcaaataaagaaaaagggtaccggagttagtaaaagaaataagagagggaggtagatacataaaactcttaaaaaagttaaaagagttaacagaaaacaagcatgaaaatcataaaggcaaatgaattgatcaaagattaaaagcaacaaaccagaaatagaaattcttgctataaataagtatacatgtgattccaagttatgtacatgttgagaagatttgccatgaaagtgaaaaaagaaagaaaatagaaaagaagaagggtctaagagtttgattgagtatgatcaaaaaggtcaaggtagagagagaaagagagagatggacatgcaggaagaaggtgtcgagttttgaatgatcatgatttgatttcaagcttagtcatatctcataatataagttatatacaattatttctttaaattgattttaatttgagtatctagtggtttgattggttgacaagtttttataaaaaagctatacaacagtaaagtacacaaattccttaaacaaacattttaaaggataaagaaacaagggaaaaaacaagaaattaaaggaaagaatgtttctttgttggaatttttgtggagtccccatgcattgaatttggggtatttaaaaacaaaatatttatgtaaaaataagaaatttattaaaaaaaatatatgagattaatacaaattttgtttgtcaaaatactaattttattttcaaataaaagtatattgtaagtaaatagtttttattttttaaaaaaatatccagccaaatgatatttttctttgaattttgagcttattttatttgggcgttttagttactattgagtcaaaataataaaaaaaagaatatttactaaaaaaaaaagagagagaaagaaaaatatgctctctatataaaaaagaaatagaatgatttcatgtatctaatccgtgaaaccataaatttcgaaaataacttgtataaacatttgagtgaaattttgcaaataattgatgtaatttttttgaaagggtaattgatgtaaatttagaaacaacacaaacatgtgatctcctattttttttttctatacaatatgatattcttactatcattatgatatatatattttatacaatatgatataatcatgtgatctcttgtgtaattgacgtaattttttatacaatatgatattattactattttgtactgtgctatttgtcccaaattcagcaccaaaaagactaagtggtcattttttattggactatatgaaaacacaaattacatataatgaaaacaattaccctatataacatattatatatgctgcatatgtggtttggttgctcaatcaattccagacaaaatattttatttattttataatttaaagagtaactttagacatacacttacacacttgtacacacaacaatatattaaatgataagtcatatttttgaatgggaggcaccgcatcacattagatttaattatgtggctaagattaagttaattacacattattatgtgttaaaagtatatataatttaagtgtgtctcattgctcatatttaataaattataaatgattgtgtgatacacttaatttatacacactatttacacaccactaatgtgtaattaatttcaattacacaatcaaaattgatatggttccaagtatatatgataaaaaatatacatcattgtgtctaaaatgtgtatgtgtctccactctctaacagtattattattaatatttatattttatttatttgagtctagcattattattaaattactgtaactaatattatgtactgtaggcagtaaaaaaagcattgcaaaaaatgaagtctaactacttaagtttactacattatcctaaagaacatatatggaccaggaaatttcccggaatatttctttcttgtgttgacatggatgtatatattttttattttaaatttgttacatgtcacaattaataattaatggtctatacatacattacaataaatgtaaatttacagtcccacactctccaataaaaaaaaattgcggctgtacaatttctttagtttgatcttggttttgtaatgttagcagcaaaatatcaaattttaaagggacaaaaaatattatataaactagaagaaaaaaaaaatcaaatttttgtaactcaaaacttggactgagttattaaaacagaactttaaattattcatgttaaaaattaagagcattattgttcatgaactgaaaacacacaacgatacatcttttttttttttaaaaaaagaaagaaattgaaagtaattcaaaccttatagatgaacaagtggtgttatgaatcgatgtgattaattgttggggtccaatgatcccattggatcctcacataactgatgtagttgggtctatacaatacagctcagctgatcacaaagtcatatatatccaaaaaccaagtaaaaatgctgccgactataaattccttccttaaaaaaatatgatacatttgacctcacttacctacgtttctaccaattaatgatattatattattatgctcatacattacataccactcattttaattttttttttttaatgtaacgtaatttcggtcaacattgaatttatcaaacatgttaatatatttttccttttaagaaaagaaaaaagaaaaaaaaaatcacatgtttatatatcaaaattttgagaggctaaaaaaagaaaagaaaaagggaccaagttcattagtaaaatttgtgaactgcgaagtgaaccacgtaaagaagctagctacaagttactttaattatttttttctttatcggaaagacttctgcaaaatgaaaatgtatcaattatttattggtttctaaattaaatatattttattgagaaattttagaagtaaatggatgtactaatttttaacattttgatagttataaatttaatattttcatacggcaatctattatattataaagttattttttaaaaattaaaataatttattacgctcatatttttattttattttttatatctactttaaaaagtacacagtatatataaatcattcaaacaaaaaatgttgaatgagaaaaagggcagtgtattcttaaaagtaataattataattataaaaaaatcttgagcagtgtatactgtgtacaatgcaattgcattaacggtccaagacaaatgaagttgaagcgaagtaaaggtatggccttaaggaaagggtatatatggtatggccttaagcaactttaggcataatagaacaaaaaattcacgacattccactattttatttaactttttggcacaatatcagcagcctaataaagaaggttaatttagagcatgatttttatatacaaaggaaaccccacaaaatattcccattgcaaactttataccaatcatatgttcattcattttaatattatttattattacaaaactattcatctgacagacaacagtgattgtgaaagagctaatatcgctatatttggcttccgtattatttttttattagctgagtatgatgatatatatcattcttggaaatatccaatattttatatatgtttattaagttatttcatattagtttgtgttagtttcagcttatcctaatgattcgccgcatgttcctagcctattgaattctaatcctttcgaattgcttacatatcaagacttaaatatattggattggttagttatgatagttagtactgttatgcctagttgttatgtctagtgctcacttataaaactaacaatttagatgtgttgttaggtgttggttagagctggttttgtgagtagagatagaaaagaggagtgagatttgtggtgagtttgagtgattgagagagaaagttcttttaattgtggtggctgcattgagcagcggagatcaagaagccatttctaaggcttgctcttagtttgtaattcatccgaaatatcatcaatggttaggaactgatccctgcagattcaatgagtttattagaacaaggatattagattcccaaggaaacttggaagaagtttaaccctctttaattgattgtgttcatttactattttatgttcttattatatttgatgatttgttctagacattgtgtgcaaagaaactcggttaagtagcattgtacaggttattacttgggattggaagttaggatcgagttcctaacagtggtatcagagcttaggttagagcaagattaatctcaagagtgtgatcaagattcatgaccaaggctatgtttggtaggaaggatggatagattagaaaaggatgggaaggggaggggaaggagagaatatttactccacttaatgttgtttggtattaggtatgaagtgggaaggatggagagagagttaagtagtaaaagtacaatattatcctttggaatatcaacatatattacgttttaagagataattttgtaatttacacattttgttttgtctttctctttaatcctcccaaaattgcagggatttaattttagaagtttaaagggagaatgtctccctccatctctcctctccttccctctctccttcttgccaaacaagtgattcaacaactctttccatcattttccctccactcctctccatctacccatctctccttcctaccaaacatagtgcaagagtttgccaagtagagtgtatctgagacaaaaattttatgggttcaaaatggatgaaaacaagtctctccatgacaatttgaatgagttctataagctagcttctgatttgaacatcttggaagtgaagatcgaggaagaagataaagcaatttatctattgaattcattacctggtcaatattaccaattcaaggtgtttatcgagatttttggaaaactaattatagaaattgaaaaaccatatttttgcaaatgtcaattata

SEQ ID NO: 295324 - DNA, 3061 bp, Cannabis indica
gtgctactagaacaggcaaaataattttaaattctagaattatgtaacgctgtgtgaagcttaatggttaagatgagaaactgatttgagtctaataaaaccagtttggcatgaaagtagctttatagaagttgatgaaaattaatacacaaggatttttcccattgcgggtttttgtggtagagagagagtagacctctctagttttaaagtgctgatctttctgttttatcctatcaaatttccttctaaaccaatagctcttgtccatgttattctttgcgcttgcatgaaaatatagtatgtatgcacgcaaggtttgttttgattgattatgctagatagttttctgttgttattactctgaaacaaattgatgatgatttagaatttaagtagtgtgtgctaaacattgtaacttcgtattgtttatcatcatttaaaattattaatgaataaccattaaagaataaaattagttacaaatttcataagtatagttcaatttttgttggagttgattcatctgcttaacaaaatgttaaagataccaatgctttctatgatcacattattaacacccacacccaccacccacccacaaaaagcatctactctttacattagcctaactattattatctatgtgctgtaggtgattggattgaataacgttccaatttctggggatgaatttgaggttgttgaatccctagatattgcaagagaaagggcagagtcttctgctgtgtcattgcgggaccaacgtatatccgctaaggccggggatgggaaagtaaccctttcttccttagcttctgctgtggctgcaggaaaggtgtctgggatagatttgcaccagctgaacattgtcatgaaggttgatgttcaggtatgtgtatcctgttattttatttatatggaaacctgccaagttagctccttgatcttgggagctttgactgtaagttatacattatcgtctacaactttatttcaatactgtctcatcaaggacataatcattcagatactttctctgaaagaaagcattgcttttaatatttaaagagcatgaataagtttagaactctctaaagttcttcaaaatttccccattcttttcaactggaggttttaactttaagtttatggcaccaaaaaagaaaaaacaatactctgactttaccgtgaaatataatcgatggagatacttccaccatcaaagatatattatatttatgacatttggtgaatgctactaaattttaaatgttgaattattatggctttcttaacttcttggatactaaactggtcttatcacagaaaccattaaatatttagaactccattattgtaatgaaattaaggttagttttaaaatttaaatttgagtgcattttgttgatttatctcgcctaaatatgatctatactattgtagctgtacttctggaaacaaattgattttatgcgaaagtatagccttttttcttttatggaaggctttagttatgaataatcataagtcaaagttcttgtgagagtaacattaggtgcctgttgtacttgtactagaaactccacatgggtgtaatacataattacagtttattttgttgaaaatttattatttctcgagctgcaattaaaatcttctctttgattatgaccagggatcaattgaggctgtaaaacaagccctgcaagctctaccgcaagataatgtcaccttgaagtttctcttagaagcaacgggaaatgtaagtaacagtgatgttgatcttgcagttgccagtgacgccattatcttgggctttaatgtcaaagtaccagcttccgtgaaaagtttggcagagaacaaaggtgttgaaattcgggtatatcgagttatatatgaacttattgatgatatgcgcaaagcaatggaaggactcttggatcctgttgaggttagttcatgagttatcaaatttgttatattttttatttaattttcaagtggagactgataagatgacaggttaatctaatgtatgctacttgacagcaaattatttcccttataatgcaatcaatggtcctgggatttaacatccttattcatgtaaatcatatatgtcacacataccgtgttcttatatatgcttggatgggtatacataataataatatatcgtgaatcagcatggattttcatttttctaagttcaagagtcacatggtgataacataggttattgctagatctcatgactccaagtccttttattttataaactcatactgcttcaccttgattgctcttaactttctataatatgcacaagtctcttatcactggttatctgtttataggaacaagtaccaattggctcagctgaagtccgagcagtattcagcagtggcagtggtcgtgtagctggatgcatgataaatgatggtaaagttgttacaggctgtggcatccgtgtcctccgaaggggcaaggtagtccatgagggcgttcttgattcgttgaggcgtgttaaggagattgtgaaagaggtatgtcatattatttataaatctaacctcctagtttcttatgcatttacttgtctagcggtattgcatcaattgaagttgtacactcatttctatagagttttttctttcaaattccaatacttggtatctctttacttcttgctctcttctgggcgtgtaccaaagtttttgcaatggtttctaattttctgttgggggacaggtaaatgccggtcttgagtgtggaattggtatggaagacttttgatgattggggaggagggagacgactattgaagccttcaacaccgttgaaaaagaggcgtacccttgaagaggcgtccgcatcaatatcagaagcattggaaggaatgaaatattagaaagcatgcagttctaactttttggctgctgtgattttcttgaagaatatcaatttttgattatcattgacagacagacgtggcagtgctctccaacacgcgatcccctaattatgaaatcccttctctcccacttcacacctcgga

SEQ ID NO: 295325 - DNA, 5183 bp, Cannabis indica
ttttttttttattaaatgtagtcctttttttagtttatcccaaaatatttatttgtttaacctcaatatgtggtttttatttaggctccaaggaggaattgttgcagaatattgccatcaaagaagacaggcagtatgataattgatgttggagtttgcaatgaagatgaagttgtggaattacggtgaaagatatttaaatgtagaagtagagagcatgcttctatttttcttttttaaattatttttttttctctcttcagagtttttctttcttttatatatatctagtgtaccacacgtcctaagatttgattacacaaccatagattcgaaaaaaatctttttaccaaagtgaacctccaaagtttattagagaagcgctagagggcacagaatgaggagttcgattatgcaattatacccactagatggagtttatcccttcactttctattcaatccatatcaaagttttaaaatgaccctaataatgagtattaacatataataatcaaattcgatcactagaaacatcagtttgattaattaacggcaaataatacatgttgtggagtgctcaattatcctcaaaagatccgtccctatataaagtggaattcaatgtgaccaaaggcactaatatatgaggcttaaagattgaggtttgacaggtacgtagcaccattattttcaataaaaaaaaaaataacatgaaattggaaaatccaaaaaggtaaaaactaaaaagtgttagattcgagttgtttggtctattattcttcaattaattgctggcttatctagttgagtttgaattggaagacccaataataaaggacagctgccgaagatgagtattgagtatcactgaacttttaatttcggcaacagttaattaagacatgataaaaacaataaattactgtggtttggttattaatcccctgccaaaacaagacaagcattgtccatactccattactaacatatgaaacgacattggaaagggtagcgtttgaggtgttagttggttcaattaaaaggaggttatgccgtattgggtgagttaagtgacttcgtcaacacgtgtttagcttagacaattcttcatcagacgtcgtcgttcccagcctgtaatattcgtacgtgtggaccccaactcgctccagtgtcgactcaataactcatacatttctcctttattccaatccaaacccccaaaaaaacaagacgaaattccccaacacactctctatctctctaatggagtttcggtacagaaacttcgtcatctctctactcctcctgtcactctcgttcccaccttctttctcctactcgcggttctctccggtcgacaaccacctcgtaaactgcggctccgtagagaccaccaccgtcgacaatcgtctattttccagcgactggtctaaccgaaatttaccattctgcccctcggatcggtctgttgctctcagaaatgaaaattctttcgccggttcctccccactgtacgacacagctagggttttcgagaagccttcggagtacaaattcgagatcagagagaaagggatccacatggtacgtctccattttcaaaaactcaattcctcaaaattcgatttcggtagcgctcaatttcacgttcttgttgataaatacgtcgttttgagcaactttaatggcggtaattcagctgaaacccctttgatcaaggaatacctcattcgtgttgattccgaaaaacttctaattaggttttttcccactgattcttcaaaattcgcgtttgtgaacgcgatcgaggtgatttctgctcccaaggacctcgtccctaatacttccttgtccctaaactctaatgaaaacgtgaatttcgatagctggtctaaccaagctctcgaagtcgtttacagagtcaacgttggaggtcctaaggtgacaccatataacgacactctttggagaacatgggttgtcgatgatgagtatctggagtcgagttccggaacggagagggtgtatttcggtggccgaatcaagtaccggactggatttgcaagccgcgaaattggaccggataacgtgtacaagagcgcaagattgatccgcagcaccaacggttcgatcccgaaccttaacatgacatgggttttcccggtggccggagaaggatacaattaccttgtccgatttcatttctgtgatattgctagtatctcacttgagcttctcttcttcaatgtttatgtaaatgggaaactagcattggagaacttggatttatcaagtgccacaaacgaaatgctggcctctccgtactatgcagacatagttgttgctggttcagatatttctggtgctttgaatgtgagtgttggaccttcgaaggacagcatgccgtatgtcattgatggtatccttaatggggttgagatcttgaagttgagtaactcaatgggcagttttgatggtcttgattctgctgatgttgttttgagtctttggccaggcagaactggtcttttgatacctttagttgctgctgtgttattggttatgagtttatctattgttttgcgtagaaagattattgagacaaaggagtctcttgggtggtcgaaattgcctgtgaatgtctcagaatttgatgccaaacttggcgtttgagccagcaaaagaaggctgttcgtcgtgaaaacgttgtgagagaacgtgccagagaaaaatagcttacctcagggagcaagacgattgttgttttttttttttttaatttagttcgaacttgaagtacctattacctaatagtgtttactcgatgggagttttaattttgttttatatttctaattttatactagaaaatatcgtcaactttgtaatgatttttgtgcaaaaaaatgcaaatgtataagctttcgtctatgtacatatttttcttaagaagtatttgattttgctttgccgtattgggaattttcatttctctaaccatagaagttccactagtcatcttatactggtaaagttcgaggtgattgtctttatgtaattgcttctaatttggatcgataccatttgctaccaaaagtttgtgtgttgcactatgtagaaacttaaccaaggcaaaatacgaagacaaatttcagtgaaagagtaacaaaggatttgcaattatagcatattagcattaacccatcattggttaatacaagaaaatcaagactctgtaaactaaaatttgacagtttaaagcataacaaacaacaaatcagacattaacaatcttaaataaccaaaacgactaacttataatactaactataacgattaatacaatgaaacgaaaacgaagacacctatagcagtcttattccggagtatagtgttgtgaatttaattgttatatttggaagtgttaggtgtgaaaaaatcgatccaaaccaataaaaattgaaccgaattaattataattgaccgttaaaacattaaatatctaattgtattagatcagatgttgaatggagtgtctaaaatttaaaacattgaactaattaatattttcatttagtttaaaagtatgcaattctattaaaaaaatcaactaaaacattaggatgtaattctgttagaacatctcttcttgttggaaacaaaatcagtattagaattagaaaaatgagccaaccaaaccattgcctgattcttggattgtttgacaaaataattaaaataaaatcagatgaaaagattatagcatcacaattaactccttagtttgggcatacacaactattgtggaaagtacataactataccactaacaaccccttcaattgcagagaacaaagaaaatgaacggcgattcgatggcgagctatcgaagaacaaaaagacaaactaacaacgaaaaaaataaaacaaaatcatgtcacaaagaaaacactagtcacaataacctaaacaaaagatactcaaaaattatattgagctaatcaaagcaatcgttcaggatagtttttcttttaggctatggacaatttagttcttgtattagctaccgaatatgagtatattgtctataaatattttactcatattagctggtatgttaattatttgtttaatctctgttttatatattgtaaattgtaaatacagagtctttgtgtaaaggggagtgtttgactcaacatctgtttttatatctttgtatttgtattgagtagtcaatcaagtctacaagtagaaaaataaagcggaagaaggtttttcaagactttagtggaaggactttggttcaagtcttgcctcgagaggaaacaagaactcttcaagttgatcgaagggagttcgaatatacttaaagttttagcaagattcatttgttaagagggtgtctatttatgtataatttaaaagctttttatttttgagattttactcataaatcttatccttgcacgtggctccgtaaacttgtaataatctgcaaagattgttgatattgcgtataaaaacttagtacatttttattttttttgcacttttgatcttcattgatttttcgttctgtagttacaatcttaatttgtaattacaaaatatttattttaatctcaactttattattccatatttcaaataaattagtaattataaaattcgaaattcaataacaaaaagtaatatattataattttggtagatgaaatggattaaaaagtgaaaaatacgaacaatactattttttctttctttaaggttgggaatataaatgtgaaaaaattgaaggtgaggaccaaaatgtgaaagtatatgttaatattttatttgcacttaacaaattataattagacacttcattttattattttttattttgtgtaaaatttatattttttttaatttatactaattttctcttcctcctcacatcctatcgatcaatatcctaaaaaaaaaagtatttataaaataaaatatataaaatagtgttagaataaaaaataaaatacatgaaaacatcataaaatagaattttaaaaaaaaaattaacacaaaaaaattatgaaagaattttttttaaaaaaatatattaatagtaaattttaaaaattaattgaaatatataaaatacttttattaacatcataataacactaatatattatt

SEQ ID NO: 295326 - DNA, 2725 bp, Cannabis indica
aaagccaaggtatcacaattgagaacttaccccctcccgtgtcagttaaggggattcatagcttcttaagacatgatgggttctatcaaaggttcattaaatacttttcaagaatctccaagcctctgtctgatctgcttgtgaatggagtgccttttgagttcggaaagaagtgtttggaagccttttaaattcttaaggagaagctgatttttacgcccatagtcattgcaccgaattgggaatttttatttgagttgatgtatgatgcaagtgactatgatgttggagcggtattgggtcaacgagttgacaaggtttttcgtatcatctactatgcttgtaggacctttaatgatgctcagttgaattatgctactactgagaatgagatgttggccatagtgtttccttgtgataagttcagtatctgcttaggaataaggtagttgtgtatactaaccattcagccataattaaaataccttatgactaagaaggatgcgaaggaaaggctaattcgatgggtccttcttctccaagattttgatttagagattcaagacaagaagggtacaaaagacttggtatatcatttactgagactagagttacaagagagttcaaatatggagaaaatccaaataaatgatgagttccctgatgagaaattgtgtttacttcaaggaaatgttatggtcccatggttcgctgattatgtcaattaccttgctgaaatatcactcctccagacatgtctagacaacaagtcaagaaattcttttctgaggtgaaacattattattgggaagagcctatcatttacaagcattgcgccaataatcagaaggtgtgtgcctgaggaggagatggattctatccttactcattgtcatagtctacagtgtgggggtcattttagtggaatcgaactgttgccaaggttttacaaaatggtttcttttggccaactctcttcaaagatgcttatgaatttgtcaaggcatgtgatcattgtcaaagaattggtaacatttcaagaataaataagatgcctttgactggtattgtagaagtggaactgtttgatgtgcggggaataaattttatgctggggttgtttccatcatctttacatcttgctcgttgtggactatgttttaaaatgggtggaagcagtgacaactccttcgaatgatggtatgactgttcttaattttttacaaaagaataccatcacttggttcgaaactccacgagttattattagtgatgaagggagtcatttctacaacaaatagttcgaagccttgctggcacagtatggggttaggcatagaactgctttgccttatcatccacaaagtaatgggcaagcaaaaatttctaatcgggaagtgacgatgattcttgagaaaacaattcaacgctcaaggaaaaattggtccaaaaaactaaatgatgatttatgggcatataggacagctttcaagactcctataggcatgtcgccatataggttggtcttcagaaaggcatgtcatttgccgatgaaattagagcattaagcttattaggcaatgaagacattgaacatggacttggccgctgcaggagagaaaaggcttttgcaactcaatgagatggaaatttagaaacaaagcatatgaaaatactaggatctacaaacaaaggaccaagaagtgccatgacaaggaccttgttaggaaggaatttcaacccggacaacaagtatttctctttaactcagggttgaaattatttttaggcaagtaaaaatcaaggtggtctggtccttttatagtagttaaagtattcccatatggagcagtggaaatcaaaggtaaaaaatcagagactttcaaagtcactagtcatcggtcaaagctctacttgggaggtcagattgaccaagccaagtctaccatcctcttggcgcctctttgaagaggaacttagcgtctggctatatgacaataacgacaacgctcttgggaggcacccagagttttttacagttattttaattcagttcaagacatttgcggttttatttacttttagtattttattttgttatttaaatttgaataagtatttttcatataattttagaaccgcgcaaagtgtgaaaagtcttaaaaaattgtggcctatactacagtggtcgcgaccagatcatatcctcattatgaccaattatcatcgtgactaggaagctttatggtcgtgacgagagaggtcggcaagaagggatgaaattccctcatttcagtggtcacgaccatgatttatctgatcgcgacaaggatcccgagtgtcctatataagacccacttcggccaaaacataacaaatccctaattcttcactacaaccctaattacttaccctactacacccgaaaataccaaatttcttcccaaaaccttaattttcttcatgttttcatcattccatccaacatcatcactcccaaacaccttttctctcattaatctcgattttcactcaaaaatcataccctaaatcaaccaatctcccccaaatccaaaaattccactattaatttgttggattttgtgccctaaattatatttattatcataataaacatactagattaataacgtaatattataaatattaataatactaatcaaatgtttaataaacatatgcattgtttataaaatataaataa

SEQ ID NO: 295327 - DNA, 5375 bp, Cannabis indica
ttttttttttctcttttttaaatactctttgtgtcatggtatgttttttttttttaaataaaatgcgtaaatatattaaagccaaatagagttagacctgatgttcgttacataataaattattaagtatgaaggacggatggatcataccagttacattattagtaaaagctcacttaaccacattatgggtcgtgaaattataaagtctagatataaacgaaaaattacaactaatcaatagagaattttacattgaagcacatacttactaataccccaaatggaagaagtttccttcaacgtgttgatcactgtctcagaattactctctattatcacaaacaaatgcttccaaagggtcgctgattccaagactaacaaacaggccgctgattccaaagggtcaaagaagttgaggatgttgctagccacccacaaaatcgattccttgtgatctctagccaaagctaccacgcacattaagttattactaactttaatgtcacagttgatcttgacccaatcgtttggtgagagaaaccaaacaagagacgcaaccatcaccggcgaaggaaatatacaagaactaaaatctacgtaacatatagaaatagaatcaatacaatgcttaatgttacatataaaattattatgaatcttatcgtttcagattttctaatggtgttgaaagatggctttaaatattttgtgttcctaaaggagtaacctttaataagagactctaaagagagtaccctctttctgcaaaaatgtttactcatttggatagaaataactaagtaataattttttatttataaaaatgtttttttgtttctagtactaaattgggttgcaacatgttctacccacatttccatttagtttttctcttgttggattttcttttgttagtttattactcaaagagagaggaaataataagaaaatacattcttttcaaaataaaaatgttttattctctgagtctcatggatatatttactgagcatattgaacccctatgattttattatctgaggagagaattcgtaaaagaaagagtttatgggcatcaaataatcttgcaaaataatgaagttaacttgtatttataggctcatagatgggtcgtagatctcaacaacgttattgttaatatttttttaatcaattttttattttttaattaaaaaagtaaaaatttattcaaaatatatgttctataaaattatttttactttcaatttaaaaaataagaatcaaaataaatttttttaaaaaatcactttcaaaattttttttaaataatttctttaattatagtctatttgtattttctttcattaatattttagactcgaaccctggtcgaactttgacatgtatcgaattgtgcctccactttctagattcttccaaaactatagagatttttgaattcaattcaatgactttaatccaattttgttcaattttactaacgatgtttaacgtgaatagaagttctggaggtatgatttagtacatgtcaaagtttagaggtacaattcggtatatgaacaatcgttatgttaggagttcgtaagtaaaattgaacggaattagacgaggctccttaaatttgacaatctcaatcttttgaggggaacttttaacaaaagtttgaaagatacgatttgatatatctaaaaattcgaaaagaaaaaaaaaaatctaattaacattatatttgtaataagttaagtattttatttgtttaaacgtttaatttttttatttaattttccttattgtaacaatgacatggatggattggtgagactagattaattttttaaataaagaaaaaataaaatcattagtaaaacaaatgttaaaaagtagagcaataatatacacacataaattacatataaatttaacacttacttttgtgataaaaagaagatcaaccaattttattcatttaagatagcctcacttttgttgaaaaaaatacacttattaaaaataacttgtcatataaacatgtattaagtttgtgtataattaaagtgtgcatatatccatatctcattatcctaaagagtaatataacaattaaagagtctagtgacaaatatcttctacgcaccacctattaacatgttctttgttttctttttttaaaatttattagatgttaaaattagttccttgtactctcatcaagtgctttatctctatcaatattttaagccttaagctattatacatctttccaagttcctaaaaagctttctcttacatatatatttaatttttaatagagcttattttttttttttttttggtctctatttatcatcgtagtagagtttaatcaccgaattcgggacaagcttatatttcttggtttcaataacctcccaagagtagccttaatcttaatctgcctttagagagtgaagtgaaccgagggcgatataattctttcttcctttctctcttgagcaacgaggggcgggctagtccccgaatccctctattggtcacatttgagactttcaatattccaggggaacaactattacgcttgtaagattcccatgacttattgatacaccaatattcagtcggtgatcaggtagcataaaatgctagtacttaatgttcatttatgcatataagaagtattttagttgtgaagtgagacacaacttttaataactttacaatatcaccactatacagagtaatacctgattttggaagatgccaaagctattatttacagtaattatcaacaccaaaactttaaagttgataaatagcagcagctactctctgttttcaagttcgatcgcaatctcattacggcgttgaaaggggagtgtaaatggcggattatactgcaaatggcatttaaaatatgtctaaattgtaaaaatgaaaaacgaaaaaaagcatgaagaacttttctgtgcatatttcattcatagttcttacctgagaaacttctactgaagcgtcctccttcacttgaaattgtctgtcattctttagagcttcacgtaatttggattcacgtcgtttaacttcttcatcagtaacaaaacctgatttgacacgaagaagagcgtaaactgtttaagtgcctaagcattacataatacatgaagaaaatactattggatttataaggaagcagaacaacagattccaaacatcacaccaaaaattccatgaagtaagagagttcacagattaagacagggacaaacctgaaaaagcaacaactgcaacgattttcctcggaacctccttgatcttcacagatgggttgtttggcaatggcacgtctgcaccatactttgaaggcaagacaaaagacatttgccacttatcttcatctcccccctataaaaaaatgtaggcaaacaagatcatgacagaagcataataaaaaaatatgaaattgaaaacaaccactgtcaaaggtaagtgttcttttcaatgctcaaagaaggataaccaagactcacctttagaacaaacaatgaagtgtgactaatccattaatgagaaaaatggaaacgttacatcacttccaaagcatatctttgttaataaggtttgatctcaaagactcgtaatgatatacaacaaagtgcatttgtgagtatcttcaatcatctaatttatactattatcactgaaataaacaacaaaccaatgcagaaaccttaccctctttgttataacaggagttgtcatttccattttctccccattaggctgagctttacttgtaataactggtgtggtcatctccatctgctccctttttgtattctatagaagagcaacagcaacaagttgactattaaaaacctaaatgttgaaattaaacaccctatgctacttgaggcaatcgcgggtggatcttcaagtggttgggtgtgtgagattataaggtttcggtttaaacctaactcgatattttggaacattggaaacatgtctaactcaattgataattcacaaggaaagtaaaaagagtaaaaattaccttaccaaacaggtactcggctaagacattgaaggattgagatgctccattgagatcaaaaccagtttttccaggcatcgtcgtctctgctacaaaataaggctgttttcatttgaaagaacaaaaaaagaaaaatcatttagaaatagggaaaggaaaaataacagagacatcacaaggtatttcaagccaaattcaatacctcaacttcccttatctcatactggtctgttctactcaaaaccctaaaattcaatgtctcaatatccggaactgcaccaaaaacacaaagtaatcgagcatgaaataccgataacatagctcaataaatcgtaccacaaccaaatttttgcagaaatacctgtcatcagagcttcctcaagagtgcgcgactcgaatcttttcgggaacacgtattttgctgtttcagtagccaactccgccaaaactgtccaaaaaaaaaaaaaatagagaatcgaaggaaattagagtgagaacggttatggtttcgataagattaagcaaagttttgattggtgtagctattgaacatttacgtcgctgagaagtggcagaggtttgagaagcgagagccagtacgagagacactcgagcttccaaagctgacatggaccttcttcttggctggatttgcgtggctctgttggcagccatggagattgtggtgcgtgggttaaagaagcttagagatgaggaaatggttgggaatatggatgagattccataggcggccatggcaaatatttcctttttcctcttggctttggctttttgaaattctgttatgaagataaatacttccttttcttttattcaatttttaccgggaactaactccgctaattttaatttataactaacaaatgaaatgtcctttgcaagggaaacgacacctagtttaacatttcaaaggtcaatctgaagatgctattggtatcaaagaagcattgagttggatgtaatcgagactcattgtctcatagtggtacaagcgattaagagctctattcaaatggttgttttgttggtttttgttaaacgatcttctaacaaaactgttcatgattcttgttatagttcaggtcgtgtttatagaacattttgctcctttgagttttattctatctattcaaaataatcaaggctcacctaaacattttgaagtccttgtacaaaagtttaaaattaggcattttataaataatttaaaaaagattgttattaattttttaaaagatacatctaaactttgagttataaattttttagaccttttcttcaaaaaaaaaaaaagaaa

SEQ ID NO: 295328 - DNA, 5169 bp, Cannabis indica
atttatgtttaattagaaaaaaattatgaatatcaccattttttttgctttttattttttctgtactttttttacaagaaaaaaaaaggacataattatataaaaaatacataataatttattaattatttaaataaattatttttcctaattatatacttttcggaaactttttttaagtaaaaatagtttaaatacatatttataattatattaataaatatatttttacgcttcttttaaaatttatatctgctgctctccatcttcttttaaagccgtatattcctatttctggttaaattgaaactttagaatttaagctcacttcacttttatatcaataatcatgctgctagacaaaaacttgtcgatggaaaaagaaaaaaaaatacctttttccaaagcaaacaggtacacaaaatataaatatatattcttatgaaaacataaaacaatactcataccactgaagtcatcttcgaaaacataataacatattcatttccatacactctccaacataaacctagctagaaaaacaaatctaggaagcgatcatagtagaatttcaatctaaacgacaagaactggtccaacaaaggacacaagaaagagcacaaaagttggactagataaggcatagaatccaggagcagcattcccttgtgatgtcccaattgttgtattctgttctgcgcctgactgaggtggatgtgcagtttctaaaactttgatgatcatcttctggcctctctcacagtgcccagaaaccccactaatgaagtagaacaatcccggcctgtcgaaatggaaagcactgtctccattgttggagaagtaaactggatgagaagaataacacttttcatactcctcttcagtcacagccaacaccgagtctttatcgtactcaaaatctataaacacattaataaaaataaaaataaaatgaataacgtaagacttggaacttgtaacactaaagtgacacatactttgtactgtattaattgagattacttacgtagagtgtcaccaacaatgaacctattctttgatgcccaattgttgaagatttgagagtctatttttggtattttggtagttttccaaccatattcatcgccaacagacaaaatcagtacaggttatggagatgaacttgaatgtggagaggactacaaagaatagtagtagtttggaggaagccatattttttaaggaagtattttgtttttggactttgttatagggagctcctttaatttacacactcagtgctcaattgcgaaaatgaagaatttgaagaaacttggaagtttttaacttaatgaaaggagggaatttttttgaatctttgttgctaaaatcttgggagaggatattatgagtaaaaattggaggtagtgggctttgttgttgagggtaaccgttcgaaagcttatctttgacttggtaaataattaaaaaaatatatgtaatgaaataaataaaaaaaaatgccaattgaaggttagatgatcgctctgctctcttcatataaatgtaaaaaaatctatttaattattatttttttagctgcaatgaacgaaattcaaacatttaagataacatagaaaccaatttaaaagtaaaaaatatttaaattttcaaatatacggaagcacttagttaaaaaaaagtacacatataagataacatagcaaccaatgtatgcacatttaggaaccaaaatttcataatgcttgtacattattgcatcgtacactatacaacacatagatctactacattgatttgaggaccctttaacttgagcgggaaatgatattgtacttctctatcaagacaaatgaaaacttttatttaccttattaagctttcagaatcaatataccattgcactccatagacacataacaagcattccttgaacacaaaataaatgccaaaacccaccaacactacatcttaaaattccggaagatctcactgaaaagaaatcatcagtagtgttcctgtccctgtcaacacttgtgcttaccttttcatttgaaactcttttgtaagtgtttgattcttggttacatggtctaactccataaggagcatagctagatgtactggaagtcaacctgtaacaaagatttgggttgttccaagctccaaaacgccttcccatttttctataaaacccttctgaaaatccaagctcacctgtcaaattgtttcctccaaggtaaagtgtactaatacaaggcagagatgccaaccttggtgggacatttcctgagagattgttgtagttaagccccaaaaatctaagcctcttcatttctgccaatgattctggaatgtcccctgtcaaacttgtgttggaaagatccaaaatttccaagttcagtaactttctccattcaatatttctcttaaggtcacccccaactgggttattggatatcaccatctcattcaaggacaccatttctccaagtgactcaggtaacccacctgaaaacttgttacttccaaggtccaacagtgtgagattcttgagcttaccaatctctctaggcaagataccatttaatatattattgctcaaatcaagctttaaaagtgatctcagaaatccaagactcgaaggcaatgaaccagaaaggtcattcctacttgtatcgagtattaagagctcagacaactgtccaaaacttgaaggaatctgtcccaaaaaatggttacctgaaaggacaagtttcctcaagttagccaagtttccaatttccattggtaactcaccagttaacccattttcaagcagcactagagattggagtttggtgagttttcctatggtggttgggaccgttccaatgagacctggatttaatctgaattctaaggactctaagctgtgagtgaacttctcccatcttaaagttgagattgtgactgggtttagattttgtgagatgaagcaactaaagattgagagggcctttaggtgcttgaggttgaataagtggtttgaaatttttgcattgactgaacattttagagagttgtcataaattggcccaatgtttaaatcagaaatgtaccacaacccatcataaagatcacagtaaactccctgtatgtcatacaacaaatatagcttcagaacaaaagttttcaaatctaacaaaatatggctatataatcatatcaattgaccaaaaaaagaacagcatcaacatattgcataaggtaatagtcaattaagttaaagccaaaaagaaacaatacataaatagagcaatatttgtcttttttcttcttttgtgttcatttaaataatatttttttttacatataggaagttacaaacaatattacctgtattggagtccatccacaagggtctggatagagatctgaaccgttccaccatttgcccacaaagctttgaatagcagaataaagagcttcctgctctgttttctccattggtgccagggatgaagaagttgagtctgttcctatttcatcttcacacacaacaaacactatgctactgctaaagtagagaagaaatagaagaagaagaacgctttgaattgttactaaaagcttcttcatgtgaacacaatctgtagtagtagtataatacacaagaaggaagagaggttagtttgagtaagtcttagaataatactgctgtacctggcatataaatcatgactatataaggaaaacaaactaagtagtactcagagaaacaaaaaaatagaaaattagaaaggaaaaaaaaaggctcaattggaaattgttccctattccctccctatgttgttaattactctacaaaaagtaaatctaaaaagactcagaagtaaataccagaacggcagaagatctaaagaagcctatgtatgcatgcagccaagtaccgatcagaacacttctcgaggcttaaaagtaaccaaagtaataactaaacataataaaccagttttctttttcttttctttcttaaatgacatgaattttgtgcgtatctctttctaaacttgtccaacaatgaaagatgaatttaattgactcaatgtgtgaggcacacttctcacaaaaaaaaaaaaaaaatagtacgtctaacatgtgaaattattattatttatttattaataataagacctattacctacgtgtagtactaaatacaactaactagtgtcaattattttcattattattagagttagctatgattgtaggcaaatgttaaaaataaaactgtattgatggctcaattgccagttgggcaatgccattggtattaagaaaagctaaagaaagttcaaaagctagaagaggattagggttagatcatggcaatcatcacgactctgttggctattatttaactttattcattgatttcattaaagacagtttaaagaggctgcagccagccagcccacccaaaaatgccaaaaataagagaggaagagagagagagaaggggtcagagttatagggttggtaggggacccattttgggaacgcatatagttggattgcagagaaaactagaaactagaaaagatggtagattgtttgttgtaatggtaatttttatataaaaatacatgcaggcagtggcagagagggaatgccataccattcaactgtcatcttctatttttattgttgtatatatgcatatgttagtaccatactactgactgcgtccttttcacaaacgcgtcatctctaatctattattcacacacacaaacaaactgtcttcaatcggaactgggtttccgtactaattaatttaaattaaactcagctgaatttacatttaattaattcaatgtacaacaggctgaaaagataccgtgtataattggacggacgattaattgttaaatatatcttttagggaaattcttttaaagactcactagtgtgtccaatatcaaacaattaattggtgacagctattaaataaaggatttttgtggtaaggcttactgtagagaattaaaacttagtaaaattggagtgcacctatacaacctttaaattaggggtaagttgaaaaataaccactcctattaatcaattaatcaaatttacctctaattttatatttaattgaaacatacctctttttat

SEQ ID NO: 295329 - DNA, 2153 bp, Cannabis indica
tccatgtgactctcttatgtcagggtattttgggtacaatacatatagaaagaggtatgtttcaaataaatataaaattagaggcaaatttggttaattgattaataaaagagacatttttcaacttaccctttgaaaatgagtgttatgggattcgaaccatgacattatataatttatcatagactccaatcaactaagttatgaatatttattgtttataatacatttaatttacttaaataaaaatttaataaaattttttattttttaatttgagttcccgaaaagtgtgggccttaagcacgggcctagctcgcctatgcctaaatcggccctggatatatatgtatatatacaccaccattttgataggattatttacaccacatactgaaaatttttaattttttttactttagggtaaattttttttcaaaaatactgtgtaagttttatactgtgtactatgttaagctttcactgttctacggttattttttagttgttctactattatttttagttgatctgttttgtgttctattgttgttttataaaaacacaatatttttgaaaaattttcgtatgatagtatttttataaaaattaatccaaattcaagtatttttgtaagtttctcttttgataacatgattaaccacccaatatgaaaagagtatacaacgcaaatttatgacaacaagccccaacaattctcatatatatcctcatcatggcttggaagcaagaccagccttgagcttttgaatggtagcaacatcagtcatgaaagagacagccaaagcctcatcgtcaatatcattagcaaacaaagccttaggaactgaagatgtccctgcgttagcacttccaaacgccgaaagagcagcagcaaatgtgttggaatcggcattgtattgaaagtgcaccaaaccctttgggaacacaaaaatgtctccagcttcaatagtttgtgtgtagagcttattagttgtgtccacaaagcctacttctagagatccttggatgagtaagaggagctcggccgagcgaggatgaacgtggggcgggttagctgtcccccccgggtactgcaggacggcatagctaatgctttggccgttgagcgccgcgaattcgctcatgcttactttggtgacattaaaggttgaagctgttgatatagttcttagaccagtgtaagtgaagaatgagcctgttatatttgatgcactcaagtttggaggtattacaaagtctgtaaggatatctggatctccagccattgtaaatttgataatggaaaataatgaagaaattagtagtgagaaaagtttgagagagtttgttggggccatttttgattatcttaatataattgatgttttgatttgctgatatggataggcttttatatgtggtttttgtgtttaattggtttgtacttttagtttggttaccaaatatatgaggttaattaactatataaatggatattactatgttgttcttgttgtacagttgttttgagtttgatattttgttgtttacattaaggtaacatgcagtttagtaatattttttggttttaattatgatttcgtctaggatgtaaggtttgatatatattctcatggtaatataacatcacgatttatatgaggtacaaactttaaaaataaataaattaattaacaaataaacttttgtgtttcattagaggaaacaagtactacttattgcataagaaatactaaaagatatcagtagtgtcaaacactttcttatgtattaatatcgctattggtataattaagtatcgggtctcatatagtttaatataataattttagggaatatcactcgtcaatcgcaagacgacacgtcctaagggtgctaggctggtgccaataataatactcttttgcatttgtggatcatgaattttttttaccggaagtgaaaaaaaaaaaatagaaaagattagtgtaaaaatctatacaaaatgagccagaaaggaccaatcatattacaagcggatcctctatccaacttttttgtactaattcctgcctactcaataaatttgggaaatttgattttttatgcttagaaaatcaaaaaatttgatttataaaccaataattaaa

SEQ ID NO: 295330 - DNA, 5445 bp, Cannabis indica
tcagtccatatatatatatatatatatatctctagaattggtatatactgtaatttatgtcatttaaacctttgtgactgactgactgactaataacggaataaattccatttttgcttgcaagtacagactttgttgagttcttactcttgaattcttgaattattattgttgcaaaaaaattttaaattatacaaatagatgcaaatattatttaggaatttttacatcacttactaaagatttaattttttttttcttttctaagtgaagtttttttgaaaaatacggttaaatttgtactgttgttcgttatttttagttgttgtactgttagtgtaataataaaattttgcccaaaattcatttgtaaaaactccagttatattatgctcattttttttttttttaataatttactatcagttatgtaccacttatttaataattttaagctatattttaaatttaatttattaatattaatatataaatattaactttaaacatatacatattgtcataatttatcattaaattactatttatacatgtattttttatttatataattaaattggactaaattcatctgtattattaaattggactattcacattactttacttactttactgttatatcaacaaaattatttaaaaaataagcaaaatgcaactcacatttgtaatgatttttatacctcaaagtaacagcaaaatgttttgggaacaaaattcttaaaagggtccggataactcttatttattctataaaatataggagagagtactattattaagatccaatagttgaaacataacttgagatgtcatttactatccaaacattatgtgcagcttggtatggggagtgcactggagaccctatgtggacaagcatttggggctggacaagttcatatgcttgggatttacatgcaacgatcatggataatattatttagttttttgcattttactcactccaatctacatttttgccggaccaattctcaaactgctcggccaaaacgatgaaatagcagatttggctggacagttctccattcagataattcctcagttgttctctctggccttcaatttcccagcacagaaattccttcaatcccagtccaagttcgacgtcctcgcatggatttcatttctggccttaatcgctcacattggcctcctctggctcttcatttacgtcctatcattgggaacaatgggtgcagccatagcttttaatatcactagatggggcctttgcttggctcaaattgtttatattatgcgttggtgtaatgagggttggactgggttttcctggttggcctttaaggatctatgggcctttcttaagctttcctttgcctctgctttgatgctttgcttagagatttggtacataatgagtatttaccttctcactggaagtttagacaatgcagttattgctgttggctcactctctatttggtaagaactaagaactagatcttaataatgtcacctttacaaaaaaaaaatatatatatatcttaataatgtgaccttgtttcagcctcaatcttaacgggtgggaaggaattttattcgttggagtaaatgctgcaataaggtaagtttcacgagtatctctctctctcttcaaattttacattttattttaaaataaggatgctccataaagcatgtgatgggttagtaattgtttcttgactaattaggatttttgctttctaaactttgacatttaccaaatcatatctcgtgaacttttaaagtcattaaaaatactcgctgaactattgagattgttggatttaaggatttttttttccaattttagtaaaaaagttgaatgaaagttagggacataatttagtacatgtcaaagttcgaggggcatgattcggtagataacaaagtttgggagcatggtttagtacgtaaacaatcactgaaatagtaaaattgaatgaaattagacaaaaattcaagaggcataatttggtacatatcaaaaatcacgggcaaaaatcctaatccttgtttctttttaatggatggattggtaatttagtactcattgttatcattttagtcattggtgtaatttaatttagtaatgagttgtaaatattatacttatttacactgtttgaagtgctctttaatttttctctagcagctagttatgtcatggaaattaattcatttaaattgtcattgtgtacagtgtacgtgtctccaatgagcttggtaggaaacgtccaagagcagccaaatactcagtatacgtgaccttgtttcaagctttactaataggactcttcttcatgatcgttgtcttggtagccagacaatacctggctttaatttacacaaacgacgccgctttgaggaaatcagtctcccatcttgcttacctcctcggcttcacaatgcttctcaacagtgtccagcaagtaatttcaggtagtattaatttgggacatttttatttttacacttcataacagttctttttcgcatttttataaaattttacgtagaaactcctattgcaactagcgctgcaacttaaattgcaacaaaaaattgtatagaaacccctattgcaactagcactacaactactttgaaaacccacatgtaaatttgaaaaataaaaaagttaaaaaaacagtatatgggataattccccagtacactttgagtctgtgattgtccatccatcgattttttttcgttgatttaagcattaatgtagtgctaattttccactgcatctgcaggagtggccattggaggtggatggcaatccacagtagcctatgtaaacttgggtagttactacatttttggcctgcctcttggatatgttctgggtcactatgcagggtttggagttatggtatgttataaatatccactttaaactatttacaattaataaaataaaaatgaaaaatctacattcatttcgaatattgttaattttatttaactctgtattcatggatgaattatgaaattataaatgaagggactttggggtggaatgataatcggaattgcactacagaccttaattctgtcaatcatactatacaggaccaactggacaaaggaggttagtactcacacctttacaacttgtacttagaaagaccaatgtaatgttagtaggagtgttttttttccccaatttatatatgaaaacctttaaataaattcgaaaaatgaaataatagtaatatacatttaaaaagtacttcgagagagctatgttctttatcctttcttccttttaatttagctgttattcaacgttatatcttttgtcatcatggttctacttgcaatttataaggttcaataacttccaagtcttaaaatacagaatatggagaaagtatgaaataagataagaagtaattctgagtttgtatagataaaagtaggttaattaagatttttaccccttaaactttaacatttattaaattatgtcccttgtacttttctggccgttaaaaattccccctgaactattgagattgttagatttaaggacttttgtctaatttcatttaattttactatttcagtaattgtttatgtactaaactatgctctccagactttgatatttaccaaatcatgtctatcgaactttgacatgtactaaattatgccccctgaacttgcatccatgttagacttttttttcaaaaattggacaaaaatccttaaattcaacaacctcaatagttcagggatatttttaacgaccttaaaagtttaaggaacatgatttgctacatataaaaattcaaaattctggagacaaaaatcataattagccataaaagtatataggttgtgttaattaattgattataaattctaattttgacaggtggaacaatcgactgaacgcgtgagagagtggggaggtgaagacacaaacgataaggctactcaagatcaaatatgatttatttcttagttttttacatttaacttttaactttttttttcttccctaaattgaattagtgatcacattttcgttcaaattgtaatctgaatgattttttcctttaataagtaattttggccattgaacttatacagtgttattagtttacaaagcaaaaatactaattattatttttttagtaagataagttggaaatttaaattttttgtcccttcaatcatccttgtctcctatcttagtattaatttaattgtctactaatttccacctggtcattgtgtttggtttgcgttctttgtgggaattgttttcattcccaatgggcggtttggtagagatgttctcaaatggatgttagagatttgttggggttgggctacacggtggcgatctggtgggggttcaagttcatatttggctggtctctcgttcgccatggcaatgttctatgggtctggggtgcttcttgacttggtggtagtagtggttgttgcgtcctagagtttgaagtgttggtgcttggttctcccattaattttcttgtgtgcttttatttctttgttttaattttcagtagctgttttatgctttcaataatgattgttccacaccatcccactgtatcagtgggagtagtagtctttattttgagcgaagttcctctactcaatgctcaagttttgggagatttcgagattgttattaaccccacatcttatggattgatcttatattaggttcgtccttaacatgcttggtttattcctttttattctagtttgagtaagtaggttatcattattcaatttttattggaagatttttttattaatagtcattaataagtgtaatttgtcacatgttcattcgacgtttgaaatctagcattcttcgcatgccaatttacagttggcggcttatggatcatttagttgaaggtattaggattttctttcttattattgtagacggtttagcctatttttgttgattttatactccatgagcaatattttcagttaataaattttgtctgatttacctattaatggataatcatatttttttgaaaaatatataagtatataaaatcgtccacctacaatgttatgatgataaattatcaattaatgtaaaaccaagagaagattataaataacaagattaagtgcatgtttaacatcataactaacaaactgttttttatttttaaaaatagaaagctaatttttttagaaaaaaattcaaaaaaagttacaaagaataagaattttgagaaccacaaatgttaatttctattttatgaaataattgatttgttgtcaatattttttgttcactatatctcacattatttttcaactcattttctctctcaccactttatctccccttactttttctctcattactctctctctctc

SEQ ID NO: 295331 - DNA, 5251 bp, Cannabis indica
gatccacgtgtcccatttcgactggtccacgtattttgggcgaattcaggggcaacagaagtcaagagggcctcgtaaacaccactgttggacgctattaatagcattcagccataaaacttgtccaagccacctgctgattccttcaaaaacttttctcgagaaaatacattcaataaggaggtggttatgcaattctttgtcagagtcacaaacagggcaaagctcaaaggggagacgcaagaatttgcttaataagtcccgattaaggagttgaaggctacaaacctgccaaaagaggaatttatgttttcgagtaataagtttattccaaataagtccattatacttcactacttgagccttaataagggaggtagaaatatttggctcgaaacttaccacccttttcagcttgaatcaaaattgcctcattagtacgcattaaagtttcaaaagttttttgaagtaccaactcatgtcttgcttgatgggaatgctccatatactatgcttcttaagatatattgagtttatccacttcacccataggctatcttgtttgctagctatggcccaaaggaacttggccatcaaagccttgttccacttttttccttcttgaaacccaactcccccaaactttttgggaagacaaaccttctcccacgaagctagatggagcttgctccaattccctttggttctccataaaaaatcccggtagttattatcaatggcagctgttattttacttggaagagtaaagatactcatccaaagatttccaacttcgagtaagacagagtgtatcagttaaggacgacctacaaatgaaagtttcctactagcccactagttgaggttcttgtttatcttaaccagaatcactcctcaatctgtggtcttccattttgtaggtcagagattcacccctaagtatttaagtagaaatgagccttcttccattttgactaactcaagaatctgagcttgagcttcatctttaaccccaccaaagtaaatataagattttgacttgttgcagtgacacctgtagcttggcaaaatttcaaaaaggcttcatttaagagactaaccgatttgagattacctttgcaaaagatgataaagtcatcaacaaaacacaagttagtaagctttaggtatttacataaggggtgaaacccaaaccccttcttttctgtgaactggctatgagtctggtaagatactccattgtcaacacaaaaaggagaggggacataggattcccttgtcgaagacctgtctctcatttgaacttaccatgtatattgtcattcataaggaggttgaaactagttcccttcatataggtcattatccagctaatgaaacgagaaggaaaataaaggagcttcagcaaatcttctacaaaatgccaatcaacagtaacataagccttacttagatcaatcttcataatacatctcgttgagatgtttttccttgagtaacctttgaggagatcttgaaaaatcataatgatgtgagcaagaagtctgtttttcacaaaagccccttggttactttgaacaagagtaggaagcactttcaagagccttgtacaaattattttcgaaatacatttgtagactatattacagcaggcaatcagcttgtagtcacttgctgatttcgggtctgccacctttggtatgagtgatatcactgtttcattcaagctcttaggcaagcaaccgtttgaaagaagtcaataacttccctaaaaatatcatctccaattttcctccaaaggtctttgaagaaacacgatccaaagccatctaatctagggcttttagaggagtgtatgctaaaaattgctttcttcacatcactcttactaaaaggcatgattagattcacttgttgctctagattgaaacaagtatcttgttttattctctatttatctattatgatggtagcacaacttctacttcccataaattgttcaaaatgagagaaaaaatgttttgtcaccttgtcaaaatcatcttcaattttatctcccttagagaacgtaattattttgttttcaagcttcctctttctcatggcagtatggaagtaacttgagattttgtcgttgaacttgacccaagttatcctgctctactaagttacaaaattagaataacttttcagaagcaggtgtagctgctgcaactggtttgaagcagcttgctgtgagtgtaattcagtaggattcaaggttgcttcaccttgaattctgttgtagctctctttggcagcatgatatttcattgcaatatctcccacctcgcacctactgaaattttttaaagcatgttttacacgaaatagtcggtgcactactccctcaagctccgtgctccttactgggttacaccagatcctcataattatttgcttatagttaggataatcaacccaatagttgcaaaatctaagggcttatatcccacattattatgctcatgactacggattatacagaaactatgattagaagcgttataccatttaaaataagcatcagttttaggaaaaatatccattcatttctcattcataacgaccctatcaagcttggaaaaaatatggttagcaaccttgtgcttgtttaaccaagtgaagaaggctcctgaacacttactcctcaacttggcctaaggctagccaattttacgcatcctcaatgtttttggcttggatttgtctccccccatttctatcttggaaagagaacatagcattaaaatttcctaagatgatccaaggaaagttcgcctcaccaatatttgttaatttctcccaaagcttcttcctttcctccttagagttgttgccatatactacagtagctaagaacaactctttttgaccacacaccttgatcttacaataaacaagttgcacattctctaaaattatctccacttgaacaaacttagattgccacaaaaccaaaattctacctgaaatgacattactataatagtaatcccaattgtaaaaattattctcaaacatctcttgtacattttcatgtttcacctttgtctcaaataaggctccaaacccaactttattcaacctacaaacatcgagaatagctttttgcttttctcttttattcatgcccctctcattccaccctaacatattacaaacttccatcaagagcatgggtgtgagtgggagccattacctctttaatggcctcttgtaagaccgcatatccattgctgctacaagttttgttgggaagtacccctgcctcagccacattagaagctctcagccctttcttcctaggggttatctaatcgctagcagttgctttatcaagaccaccatcttgcctatcagccaaatgaacattctgcattttatctttgtttccctgatcgaaggccacaacaccatcttccacttcaacttccctgttgacccctttttgctcaagatgatctaggtcagcagtaggtatagtattatccgttcccttgtcaattgttacctctttccctactttgcttttcctcttccaattgacccctttctctttgttacaattcaccacaatatggcctaattgagcatacaccgaacatttagatgggagccattcatactccactgcttgctccaccaagtatttcctctcattgataagggaaatgattttaggagactcatccaaaatctcaacatccacaagaactcgagcaaatttcaccaccgatctatttaacataactttttcaaccataatgggtttgccaatcttgctcactaaggcgctgagattattcttatcccaatatcgtaaccccaaactgttaagtcgaatccaaactggcactgattataccattcgggcagagtccatgtctattgtccatggctggagaacaaccggttttttgtcaaaatgaatcactcccatttcaaggattaagtaccgagtagcttcatctctaaaattcaccaatgtgaaccttgaatgcattctagcaactttctcaactcccaattttccccagacccttttaacaaagcctttaaacaccttgaaactcccaatttttccagtaagaagcttcaacctccacctctgcaatgtcaatttttgcaaccagttgatctccaactttaagggctttagtaaaggataatcgggttgagggagtaagtacctggttcgatttgaatttgctccacaaatccatagcactagcctgaaaatctgctttatcgacctcctctgcccaactgcttgagatcgaagtgctttgtttctcctcctcgcaatgagctcctcctcttcacatggttcatggaactcttcttcctggttattctcagtgccttcctcttagatcaaatggaggtccgtctcctgattaagcgtcaccaaactcgtgggaatcttttttcggataacccttttcttcttcgccatggaagagctcaaggaaacaacgcatgccttcttgcctcaatattataaattactcatataaagaattaaaaaaaaaaaaagataaatgtctcatatagctatattttttttaaaaaaaaaaattaatttttaaaatattaaataaatgatgcttccaaaaatatagaggctaaagtaacacttctactgtaaatgtattttggatattttttattgttattttttttttaactattttcttgttgtttattactatactataaaagttaatacattttttaccatttactattttatttgaacaatataattttattatatttattttttcattcttttaatactatcctataagatggagaaaaaaaatattttatcatcttgaatctgcttatttattgataaatattattttattttatttttttgtcctttgttttggattgaaactttttgttttccctaatatgaaaacaaacttattctatatttgataaatacttcatactataggaattaaatatgtgattcaaatttatttattttatatcattttaagtctagtgctaccatattaaagttgttccaaaagttttttttttctttcttttttgggctattttcaaaaatatgggaaaaattattaagattatataaatatggcataaaaagtaaatgtcactaaatatggcattatctaaccaatcaaactaaaaatatgagtctctttttttaaaaaaaaaaaccatataa

SEQ ID NO: 295332 - DNA, 1327 bp, Cannabis indica
aaattaaaggttattcttgaatagagtattcttaaacagaggttctgctgtaatttgtacattgtgcatactagtttgcaccttgtacatcgaagtacaaatataaaaaatgggtcaaatataattttatattttgaagtaaatttaatttaaaatatacactatattcatgagagatgatctaatacttttttatttattgactttggcttgtacaagacaagatccatatttttggttagggtctaacaccattttattaggattgaacgtgtaaaagtcattgaaagtctttgatgataatataagatatatttagtgatatgacagatctatatagatgtgaaattgctttagatttagatttagtcaacaagctcacttaaaatatataaccacactcaatatttgaaccaaaaaccaaatacaatcaaatagaaattatcttttttaagaagccaaagcttgagctgttgtaaaggctatttgaaccttgtttccagtccaaaaaagttggaaacttaccatgtagatgagcatgtagtgttccatttgatacccatttagattttaaagaatctatccatatattaatttaagtaattgaaattggtaatagactttgttactgatttattatatatttctttaccggctttcttacttaaatacatttatcgttgatttacttgtgttttggaaagtcatacatgtgatggttcttggtctattgactctatttttcatgtttaattattattattattatcattattattatattgtatgacctataacacaattgaaaaaattgacagagaaaattatggtctacaaaaatagattcttgttcatggttaattgaatttatatcattcataaaacattaatttataatattaatgtgatactaccctcaattcttaaagagtgatgagaatgtgttgaattctgcagtagaattttacttgctagaccctttattgaaccaaagatgttagtaagatattgtagtgaaattacttcactatgatgctgctgttatgatgactaacagcaaccaagcaccaataaaacaaacacaaatgacagttgaactataaaactagaaaaatgtgaacaaaagatgagaaaacttaactcgattcaatgacaaaatgaatgatctttattactttgaatcaacacattacaatctgatattacaactcaaacatctaaggtggattactccaattacataaatctcacattaggatacacatgtgatcaggcccggccttgggcataagcgggctaggcctatgcctagggcccacctagccca

SEQ ID NO: 295333 - DNA, 4681 bp, Cannabis indica
agagagagatagatctaaagtgatgaatgaatctcatctcatcaactccaaaccaacccaactcccaacccatctcatcttttaatctttattagttttgcttttgcttttatcacttgttgagagagagagagagaaaagagatccagctacaaaggaaggaaggaattatatggtcccattgtcccacctaaggaatccacctaaaaagcaacaatagacaccacaatatactatttctatatactatatactattacaatttacaacaatagaataattcattcattcaatacttgtacttatacacgtatcatcatcaacatcataattattatcattattaaactcccaaaagaagacacactcatttattccattgactcatatatgtatatatgtatgtatggtatgtatgttgtatggtatattttcatatataacaatttacttactattattattagtggtgtataatatatatgaaaatggaacacaagattaattccactcacacttgtcacacatcacattataaacttttttaattaataattatgattggtaggctttgatttgatatatatctataaaaatctatataaattactaattaataaattttcaaactttatcccctaataatctaatcaatccaaacctactttgagattcaaaatctaatcattctcatttacatatctaactatttataaaaaaaaaagtaaagactaaagggtagtgtagtgttttgtgtgcaaattaaaacacaagaaaagaaaaaagaaaaacataacctttggctgatcaaacggtctgttgttatcgatatttacatgcaaaactttagctttttcttttcataaagttaaagatacatttacatatatctataatacaaaaaactatagaaaacacttaactttggatgctctatataataatatacctataagctcttcaaagttcaaaacttttatttataagagtaacagaactctcttccttccttctccttcttcttctcataaattttctatgaaacaaacacaaaacaacaacaatgaacattcttcttcttcttcttaatcttcttctcttgtctctttgttgttgttcttattcataccaactctctctaagacaacaagcttcaatcttggtatcactaaaacaatcattcaaactatccaattcttatttggatagttggaacttatcaaacacttcttcactttgtttctggccaggaatccaatgtgatgacactaaaaaatctgtcctttcaatcaacatatcaagttccaacatctcaacaactctttccccactcataactctaatcccaactcttcaaaacctctctgtctcagataacaacttcacaggcccttttcccttctcaaaaattcaccatctccctaaccttaaacatctcaacatatcaaacaaccagttcagtggtgaactcaactgggatttctctcaattacaaaaccttgttgttttggatgcttataacaacaacttcaatggctcacttccttatggagtagtcactcaccttccaaacttaacatacttgaactttggagggaactacttttcaggctccattcctagaagttatggcaacatgggcaagctaaagtttctatctttagctggaaatgatctcagtggctccattcccagtgagcttgggaaccttacaagcttagaacagcttttgttgggttactataatgagtttgaaggtgggataccaagtgagcttggtaagctgatcaatctctttcatttggaccttgctagttgtggtttggaaggttcaataccacctgagttggggaaccttgtaaagttggatactttgtttcttcaaaccaatcaactaagtggttctgttccttctcagcttggaaatttaagaaatttgaagtctttagatctttccaacaatggtttgacaggagagatttcagttgagttagtttcaggactaagtgagctgacccttttgaaccttttcatcaacaagtttcatggggagattcctaaagcaattgctgagttgcccaagttggaaattctcaagctttggcagaacaatttcactggtgctatccctcctaagcttggtcaaaatggtaagttgactgaggttgacttatcaaccaacaaactcactggtactgttcctaagtctttgtgttttggaagaaagcttaagattttgattttgctcaacaacttcttgtttggtcctttgcctaatgatcttggtcaatgtgagactttagtgagagtaagaatgggacagaattatttgacaggtactttaccaaatgggtttctttacttgcctaagctttcactattggagctacagaacaattatttgagtggacaactagagacacccaaaaaaaacaaggtactttcttcatcaaaactctcactccttaatctctcaaacaaccgtttatcaggttcaattcccacttctctaattggaaacttgttctcaagtttacaatatgtgttactaagtggaaacagattcagtggtgaaatcccatctgaaattggtcacttgaaaaacacactcttgaaattagacattagtaagaacaaactcactggccaaatcccacaaaccatatcaaattgtgcattgttaacttacttagatttgagccaaaaccaactcacaggtccaatcccacctcagctttctcaaattcacatccttaattacctaaacctctcatggaacaacctaagccaaggccttcctaaagaaattggctccttaaaaagcttaacttcagcagatttctcacacaacaacttgtctggtccaatcccagaaactggtcaatacctcttctttaacacaacatcattcataggcaacccaaacctattcaccaacaaccactcaatgtcctcatcatcagatcacaacaacaacaaccaaaacaacactttggggtctcataacagcagcaacaacaacaacagtgttcctccaaaattcaagctcatatttgctttaggcctattgctgtgttcctttgtgtttgccacttttgcaatcatgaagacaagaaaatcaagaagaggaagagataaagatcatcaccatcatcattatccatggaagctgacagcatttcagaaagtgaactttggaagctcagacatcttggaatgtgtcaaagagaacaatgtgatagggaaaggtggagctggtgttgtgtacaaaggaacattgccaagtggtgagattgttgcagttaagaaattaggagtgttgggatcatgtcatcatgacaatggattagcagctgagattcagacacttggcaagatcagacacagaaacattgttagattacttgctttctgttccaacagagagactaatcttttggtttatgagtacatggagaatgggagcttaggtgaggttcttcatgggaaacaagggaaatttctcaagtgggaaactagacttaaaatagccattgaagcagccaaaggacttagttacttgcaccatgattgctcaccattgattctccatagggatgtcaaatcaaacaacattttgcttaattctgattatgaggcacacgtggcagattttggacttgccaagtttctgagacctgacaacaatgggaatggaacttctgagtgcatgtctgccattgctggctcttatggctacattgctccaggtaccttaaaattaaaaatctcatctttatttcatcgtcatcatcatccgttactcattactcattttagtttagtacggaaaactatgctattgctataccatatttcattcatttcttattattttttcacacttttcataacacatagaacatttacaatataatacatatatatatatatatatatatggagtgattttttatgctgagagtatgcattctgtggtcttcatatataatcattggatcaagattaagttgatctaacggttgaaagtcaaaacacatcaaaccgagcctaaaatacattccacaccctaatcaaattacataaaaatatcacataatgcattgccttttcttttatataaaaaagaaacaaaattatataataaggtgagtttcacttagatcaagagcatgtggtgaacagaaatgcttattcaattatttgacccaagtcagagagaaaaaaaaaaagattgaccatattataattatgttagattggtgtagaatgttagatactttactttgaaccaaagtgaaaaaagaaagaaaagcatgtggtagattccaatattggtaaaaataaaaagaataaaaaagatatataggctccactcactcactcacaaacacaaaagatatcaatgttgcttttactatatatattggggtatgagcttaatttgcttttgcatgtcttgaaagttgaaaccaacacatcaattcatcatcttcttttgcaacaccctataaagaaagaaagtaatttgatttgagttaatagagaaataagggtcttaggtgactagtattcttataaggtataatatccgttattagtatatcgggtttcatttattttattttaataataattatagaaaatcgttaactaattatgttaagtttttttttttttt

SEQ ID NO: 295334 - DNA, 1568 bp, Cannabis indica
ctcctccatttccaagagctcaaactcctcttcggtaacgaacaaagcctattttcatcttcttcttcttcgtcttcttcttgttgagatttttgggttcagaaatgttatcagttattttggatttggtttagcttttatggctttggctttggtaataatctggacacgtgtcgccatttccgatactttggtttacgtataactacccaattaaattatgccacgtcattttatttcatgttaccatgtttgcaagtcttgttcgaatcttttctaagactttttctttttctttttctgttttttatttttcttttggagtgtgagaaaaagctttcaaggcaaggaccttcttcaataagtattgtaattttatttcattatttcaattttgttttggcaaaactcacttctattctattctatgctatatgccaaaatttattttaaaatagtctaggcaacaccacctaagaacaaatcatttaatttacatatggggtcatgatttataaatatagttatagtatgagagttctaaagctacttgaatttaatttattagaattaaatatataaatattaactctatgaattcataataatattttcataatttattattaaattattatttgtgtatttttttttcttttctgaacgcttaaattacgttaaattaatattatgttaatgctacatcaacaaattttcttaaaaaataattataatgtaactagagtgacatattcacaatcatttttataattaaagaataatttttgcaacaaacaataaggataaaaactctaaaagagtaataatttggaaggcaaatcttatttattctttagtaattagaaccacactttatattccttagaaaagaatatggtatttttattttatccatagtccctttttttcttggtaattatgtcaatatcactaaaagatactttttctcttgcatcttgtagtgcattgaaattgaaagattccacatgataaataaataagcccatacccattttagagcctcatctacatctatcacaaaatcaaacgaaacacaagtactcggccactcaaccattatcgataatgcaatattaattggagaatttcataaataatacttaaaattttacccaattttaaaatttagcttcctaataattttatactaatatatgtctactttatttcaccctccctatactacccctttcaattaaaaaatcacaactctttatctcccttccttttctctttgtatgctcggcgtcactatcgaaatcctcccttccttcaacctcagtggcgatgaaaccctcaaaaccccaaaaatccaaacaaaacccagaggcctgggacccggacctccatagcactcgagcgtcgacaaaacccagaggccccgaacttctgtctccgccttcatctacaagcatcgtccataccaagaaggcgacctcgtctacgagcccgactaaaagcccaccaaactatacctttgtcttcgtgcttgtttgtttgtttgttttatttatatatattttttt

SEQ ID NO: 295335 - DNA, 1909 bp, Cannabis indica
gactacacagttgaagagagcttaaatggatggattggtactacctatatcaacaaggtgtctcttgtttttcgatagcccatcacgaaagaactccaaggttaagcgtgcttcatcttggataatttcaggatgggtgacctcctgggaagttttcctaggaagcgtgcgagtgaggacaaaacacgttggaaacactcgtgttggtctgtaaggtcaatcatcactccatgaagcaaccatagtgacgtactcatgtataagggccatttattccgtaggtgtaagggcccaatggagacaagaagtggggacgttacacatgccatgctaggggttgtttgtgcttagtttggtacaaatccaaagtttctaccaaactgatgatgaatgtgttttattgtagttttgaggcttgacttctaatgggtcaaatctacctgaaattattcatattggtattttggcttgcatgatatttttaatttgatttgattagaatatttttttgctttggagcacttgaaaatgtgttaaaatgagcatgttatgattcttacaaaatttttggttaaactatttttctggaatcctggttaagcattacttttgtaaaaataattaggaacatgtaaactgacttgaaaatcttgagaaatttatagtagacgtttaatatgttatatgttcctcacagtttgttgcagttttttatgcaatgttagtgcaaaattttgtctttggacaacaatattctttaattgtaaaattagtttggtacaattatacttgtcctaataatttaaaaatttacaaagagtaacttttgggtgtgttgacctcaaaatttgatcaaccgataacggagtcatatagacctgatgtttgccatgtgttacacaattagaatgagaaagtaaaggacacacaaatttgttataagggttcggccccttttgatagggggtgatgatctactcctcttttttttgttattgataccaagagttaataccattcagatcactataggtgggatctgatatagcaccctcaaggatacaaagtaagaatcaaggttgacaaatctcaagtgttgagaaagcttgtataggcgtgtgagacagagtgaggaagagagtaatcagacttgggcttagagcttggagacttagaatcaaacttagagactttttgacttaggttttctaggttagagttaaagcctttatataggaaagcttaaaccctaatttacaatataaaccctacgatgtttatatataaaattagttaattacaaaagaccaaaatacccttaaacatagatattgttcagctactttattgggcttttagggcccaattcgcaacccaattagcaatccatgtgtagaattctacaagaaattttgccaggccttctcttggccagccaaacacctacagggagcaggctggccggcaatggtattgtctagagactagctggtcatcttctatgaggaagctggtctgtcacttgatgtctatttgagtgttggggtccacgtttgttgaggtgctgacttggccttcttgttggtcagttgtattgccacgtcacactgattttgtccatgtaagatttgccacgtatggtgggcaaaaattcggataacatttaccccccaagtacctgtgcgaacgactatacagagagggacttaccaattaaattggtgcggttggaacttgaaattccgtattttaatattcccagtttaattatttaattaagtgattaattaaatatggaataatgaaactggtactgaaagcagattttccgtagttacagaatacaactatgtaactccagagaaatccagaaaaataaacaatgcataaaagtaaaaacacacaagat

SEQ ID NO: 295336 - DNA, 6535 bp, Cannabis indica
tgtgaaattaaccctttaataaagccaatttttatcttttttattccatttgattctaaacctaaccctaaagttaccatataaatagaatatgatagctattattcaaagggagctctcagctccctctctcaccctttgcttccctctccctctctcactctttactcccttttcttccaagggagccccccactccctctctcaccctttgctccccagacttccaagggatatttttttccctctctcctcctttgctccccattctgccatgggagctccccattttgtctctcacccttagctccatgctcccacaggtaccaagggagctcccctctcccttggtctctcttcgagctcctttgctacttacttctcccaatacttagccaaactactgtgttacttctctcttgacacttagccaaaataccaagtgttactcccactcccaatacttagccaaattatcaagtgttgttccctctgcgaacacttagcctaattaccaagtgtttctccctcattataagtataggtggtgatggaaagaataacaaatagatgtacgaccaagggcaagtctgttaaagctagcacgcctctgacaaagcctgaagagatgaggtggtagtacaacagatacgacaaacacatgtagtgaaaacactatttgtcttactctaggtacaagctcacatctgaccatcactcctccactatccatctaacacgctaactctcatggtacaaaaggaaacttgtccccaaatcaagtcataagcatccataacatgaaccaatagaataagtgatggagacaaagctcgccaaacttattctacaagaactcttgaaagaattctcgtaaactaggaccaagtgttgacctccaaaatttgctaaatataaatgttggagacaacatgatcaaatggaggaaagatatcaaaatgaaattaagtaaaagtgtatgggcaagaaaatggaaggccaacaagtaaggtgagacaccacacgagaggaacaactagcacgaggaaaggccaaggcactggttgagctccccttgcgaggagcccctgtctcctcctctctcttcccttgctcaccgttcttccaagggagctccctgctgtcctctcacatttttctccctggacttctaaaggagctcctcgctcactccctcacccttttcccccctttcttccaagggagctcccagttccctctcaaacattttgctctttggacttccaagggagctcctcgctgcctctctcaccctttgctcctcgttttgccatgagagctcctcgctccctctctcacccttagctccctgctcccatcactctccacatgtagcaagggagctccccgctcccttggtctcttttcaagctcctttacttccttctcccaacactaagtcaaaataccaagtgttgttccctcttccaaaacttagccaatatactatgtgttactcccactcccaacactcagccaaattataaagtgttgctccctctcccaacacttagccaaatttccaagtgttactcccttcatatatgtataggtggtgatggaaagaataaaaaagggatgacgactaagggcgagtccgttaatgttagtaggcctccaacaaagcctgaagagaggaggtggctatgcaacggatacaaaaagcacaagtagtggagacactatttgtcttactctacatacaagctaatattttaccaatactcctccactatccatctaacacgctgacccttatggtacaaaaagaattttgtcccccaactttttgaaccactagtattttggagccattagagctccctataaatacctctcttccattgaagaagggggggatagtcatttgtaacaaaggttagagattcaatacaacaccatttttctccattaacgttatgagtttcttttaagctttttatcttcatccatttgcattggattttctaactatactttagttgacgagttcttactgctaatactttacattaactaattactttcatataactaacgacttgtatattttttgattaagttcttgacacttgcgttagtttaattattgttactatataaatttataattaaatttagatgattagctttatcggtacttggattagtttaattattgttgctatacaaattttgaaaattagtgcaagggaaaaaatgacagaaaacttacatcttttaccaattttgcaacaaattgtcggggaaaaaccgtcgcttaaaaatacaaatttttaaattttacttgatggctctactatagcggacggttgaaaatcgtcgccaataccactaaagttgacggctttcaacggttgggacttctttttgccaactgtttatgttcactgtcatttattttacccaattttatgatggtcaaataggcaacaatattaaggactaacgggaatacatttgccgtctgttttaaactatcaggaaattattagaaaattaatccaaattttgtagtagtaataatgaagtgtcataaatataataaatatgggtatgaaagcatataattaatgtacttatctacaattatacttgtcacattctaattaatatctaggatactattaccttctagtaatcataatcataaagcacttctattcgttaaatcatatggctcataataataataaaaaaaaaaactgtgagatgccatttttgtattgtagaagtgctctttgctaacccattcctcatagctaggtcaatggtcatcggtttctccactttgggattcatacatacgtcagaataaaccaaccagaaaaaaaaatcatgatctaccaccaaaagatttaaaacaataataataatttagttaatatactcacatcacagatcataactttttccatagggtcatcatctcttttactctctaatttgttcgatgattaaatttttaaaagttattgaaaaatacctatattgtactcttggaatcaccgcagatcatataataagatgatcccaccaaaagaaaaatctgctaaattactggtttaaatttctccgtattcatatccaaaaaaaatgcacacacacatatatagcctattactacaaacatcctaataaaagcacttcgtgagataaagcaagttcctatttggtgcaccttatctactcattttcctctctttaatcatcatcacctattttattagtactctcttaatggtcccttttccatatctgtgatacatatgaatatatatatatatatataaatttataaatatatacttttgtgtcttatcttttaggcaggcttcaccatatatacatatatatatatatatgcctatccttttcacttgtagataaaccattttgttttaatttatattctctcttcatagaaagcatgtgtttatatttgtataataaatttaattttctttttcaatgctaaaagacttattattcgaagatattgtcacataatgcagttgaatcattacttttgattaaaatataaacaatttggatttaattatgtcaataagaaaatgtatgggctaagaaaatttatattgtactaattaatcattcgcctaaactctaatttaatttcctctcataattaactttagctaaaacatcagtgatattttattaagtttggcttttttttttctctttttctgctaaagatttattataaaaaatcttactttaatgcaacaaaattttttggctaaaaataaaaaaattataattaaatattaattattatttttatgttattattaaaaagtcattagttaaaaatacttatcagacaaataacaattgattgactaaaattaaattaattatatgtatctaaatattattatatagtgacaaataactttttattcagactaaaaatgatatttagtcatgttattactaaaatttatatttttagctgtgatttttaagatcggtttatttatctataaatttttctataaatatctcttaaaaaaatcctactagttgaatttaactgaaatagaatattggaatagtaataacgcatataaattatggatataacacttttatcttttcccctaaaaaaacacatttatcttcaatcgccaaaaataatcttaaaacgttagtgatgaagtaagcacaaatatttttctccctctataaatgccagaaaaatattctatctttattagtctaatataaaaattaattaattctttgatgatgtaaacacacttttcatacgcacacttatttgaactttctttttaaagctatatctcctcctttgtatacaaatttaaaaatagtggtatatataaatcatactatgataggattagaaattgtaagacaaaaatgagatattgcaaacctagcatacaaaaaaaaatggtgattctgttttttggagaatttacaaaaatactataaaattggagaaagtttataaaaataatgtgacacgaaattttactgtaccgacttcaccaaaatattgtatttaaagtttaaaattataaaaatacttgtggtatagttcctccaaataaaaaggtctctgtaaatgtcattcctagaaagttgttcactcacgaaagccagtcccaaaaagagtcttgtcgaatgatagtcgagtttggaagggtgttcccgaatttctatcatgtcgactctaggctcagtcttcaggatagctagccttccttaggaaaggactttcagttggctagttgtccctcctggaatggtagattcagatagtcgactcaagcaggctcaatcctatccagaagcatcatcagcaagtgtccttggtccgtgactccggaagctcatatatgtttctgaaggctctggtactttaattgacatagagacttcgcttaaaaaagatttagttaagttagttattgtctaactaacttaacaatctcgtttcttatagccatcgactttagggtcttgatcctaaggctataaataccaccttgacttgttatcttgatatacgagatttagaactctattaagaggagattgagagtttgagagagaaaagattgagaggtagagagaggtgcaaagaaaagagagagattgggttttgatattgtaagaagactcttctgttgatgaagaatattcttcggtgttagtatgagatttgaaacacttagtgagaactcaacaaagaatctcatctcaactacattgtacctattcttgctcaatcaataatgaggattttggtggtgttccagaactagagtagacccaagatcacattgatctatcggacttgaacatgtatatatcttggtggttatttcttattttctgcatttattgttttgatttttgatactctatttgtccctttttttcatccatttattgtttatgatttgttaaccttgtcattgctaattgtttaattgtaaagcttacttgttttgattctgtactataagtcgtaatttcccaacaaattagagcttagtaatcgatcaagaacacagaatcaagattctttccactgcatttcttaatgaagctttgaatttcaatggcgagattcgaattggaaaagtttgatggaactggagactttgcgctatggagagaaagtctttaagaaatcctagtacaccaaaaagtcttcaaagttcttggagatgagaagttattggcagaaaagaaaccagatgaaaaggaagaaatagagcagatggcatattacacaatcatcatgtatctatcaaacagtgttcgaacgaaacccaacgtagagaagatagctaaaggagtttggaatacaataaagaattatacttgaaaccatcagttgctagcaagattaaattgctagaaaggttatacgattttagaatgatttcttccctttctttatatgagaatattgatagatttaatgagattattgtaggtttggctaacataaatcacaaggttaatgaagaaagtcaggccatcattctgtgaagatcgcttccaactgcatattaagaagtcaagacacccatcaagtatggcagagatgtgattgtcttggaagatgttcttaccgcacataagtcaaaaaaatttgaattaaaattggagaaggaatgcaagaaagaagaagtgtatttggcaagaggaagatcaaccaagaaagtgagttcaaagactaaacaccatcactttcaatcatctaagtccagagagaaggacacaaggaagtgttacttctgtggaaagtctggacacttgtaaagattttgcaagaagtacaaggagcaacaagaattcaacaaatctcaatgaacagggagtggattctatattctgaatgcacttatcacatgtgtccaagtcaagagttgttgggttttatgccctaaataaaactcatttcattataatcagatttacttat

SEQ ID NO: 295337 - DNA, 2672 bp, Cannabis indica
  modified_base (2599)..(2599): a, c, t, g, unknown or other
ggtaataatccttctttttctctctacaatctacattggtctttttttttatcaatagtttcaatttttttttgtattagaactttttagtttgatgagttaatgaatttcagtctggaggtcccttctatcctgtgtatactggtagaagagacagtgttgctgcatactcaaacctcgcaagggatgtgcttccttctccccatgataatatctccttgcttctacacaccttcgcttctcggggattcgacgaaaaggaaaccgtcagtctcttcggtattactcatctttttccttttgtttttaaacgttttgtgatactaaatttgtatgaagatctttacatagttcaggtactgctgtatgttatccatttagtttgaacattatggggtgacctttttctcaagattttagagtacagtttgtggtagtttgaatgcggtctttcccaccctttttctttcttgctttttttcccctttatcttttcttctgttgggagtttagttgaaaataaataagtgaaagcattaacgcaatcaagatacaatttattctttgaaaaagtaggtctcaatgactcaactaaagaaattgattattttaaattaaaattgtgttatcttttggttatagtgttatcctattcaactatatctacgttctactatagttaaagctaaagcacaaagtttcttctgtgtgatctttagctgctcacagcattggagtgatacggtgcaaattcttcaaagatcgtctctatgactttaatcggagtcatgagcccgatccatccatggaccccgaattggtacctcttttgaggacaaaatgccataagcgtcgttcagtatcttctcctgaatcacagccttcttcctgtgatttctcaactgaggaggagccaggaattcttatgaaccatgagggatcagcttttggtatccaatactatcacagcatcttgcaaggcagaggaatcctctatactgatcagcagctgatggcagccgaagcaactggaaactgggttagagcatatgctgcagatgcctttttattccgccgagactttgctttgacaatgatgaagctttcagacctccgtgtcttgacagctccaacgggtcagatccggttcagttgttcaaaagtagcataaaggagaggaagagattggggactgtaaatgattttggcattgtttaaaatgttaaattttatgttcagtttgctcttgctatgctgtagttttaccataccgaatagcaactgcagacatcctaatcactagggatagttcaaacaaatattgtaaaagccataattttttcaatgaaattgatagtagtgacatacaatgctggtcttaatgcagagcaacgtagttggataaaaaaacaaaaaacagtagaaagtgagatttattaccagactatggaaacacatgctgtctgaattgaaagaaaactattttaataaaaaagaagcatcattaagccaaaaataaataaataaagaagaagaagaagaagaagcatcgattctcatcaaaaaggtggaacaaactttaaattcctcagaatttttattattattattttcaatggtgacaagactggttcaagcacatataaataaaaggttaagaaataaaggccaacaatcactgaatgtaaaacaaaaatccaacaaacttacacacaaaatggagaagaatgacaaaatagtgaggagaacaaaacagatccatgtacacaaggaaaaaacaaacttacaaacatggccaactacaacctaaatgagccgagtctccgctttgagctggtgacctttgttgaggcttgtgggacagagaagtccgagtacatatccaggaaaaacttgtcaacaatgtcaaggtaaaccgggcttttaaggcgggaatagtagtgaagtgcctcttctatatccaaggcttgttccatatcagctgcatctaccatctccaattccttcatcttttgagccaaaacatgtcctcctctgtttgtcttctttgagttggactcttttcctttcccaagataagagcttccaatcttctttttcttctcctttattcccaattcctgtttggtcttaacaggactcttctgtgagaactttgtgaggcttccactacaggcattattatcttcttccttcatttgctcttgtaatgtggttgcaacattattatccttcttactcatcatctcatctaaataatgagactcccattcctcataaaaatcagaatagatttgatctgtcttacagcttttcatcttgctgctgccacaagaaaaagcgttaaaagaaagagattttggtagcttttgataacctccaaagaagaatgatttgaagttctgaatggttttcttgaccaagcttttgcttctatggatggtttcttctaacagcatttgtggctcagttttgatagctaaaaagctttgttcctttttgtgtttttcagtcttcaagaagggacaaagctctaagctgcttatcttttttgttcttcaatcttcactcagtgtcgtttccaatatgcagaaaaagngagagattgagacagttcaagtttcataagcttacctcacgacaaaggcagtggaaactgtagagaaaaatct

SEQ ID NO: 295338 - DNA, 923 bp, Cannabis indica
atatagattataaggtcctattaatgcatgtaagaaccaatattttgttggttagtttagtattatatattattagtgtaattaagtatcaactactatctaattcaaattaaattactttgaaaacaagtatgtagaacttagtatttattttcactggtgtgatctttaactagctcttgtaattgtaactctatgatggttaatcaatataaataatcagctagcttattaagaagtgctgagctctttcacacagatttcattcttcatttttcactcttaaacttttattcacaattcacattgcttacctttaaagtgccaactgtccaacatacttacatgaatgctcatgagtggtaaagaaggcttatggctttggaagggtgccaaactatggtcctattacaccatgagcattttgatgtaaattttgttccagttgtatcatttattgttgtataaatatattgacactttgacaaccaaaaccagtgttgtagatgtagaaattaaactcacacaccaaacaaaatatgtatactattttttttttttttgacagtatatatactatctttaattgggtggactatcttgtttgttgtttttctaattcaattatcttggttttaaataactgatgtctgagaaaaagaaaactattccaatcactattgatgaattaattgagtcaaatatattttaattaaataactactaaaagttgaatgcttttacaatgtatatctaaaaggggttcatcgatgcacccatgtctattttagcatatgagaaaatttttagtttaattttttttttattatcgtttacgttgttatgtaagatatcttgcaaaattttgagagatttgaaaaaatttaacacgctgaaaacagggttcaaacagtctgttgcac

SEQ ID NO: 295339 - DNA, 4357 bp, Cannabis indica
ttaaaaaaaaaatgttgaatcttatttttatttggaggggttacgatttgatagttgccaaagtttaaggagaaaatttattaatttacaaaaccaattcaatatttaaacgaaataatgagacataatctaacagaaggactaaatttctgtaattataaaagtttatagaaaatttttagtaagctgtatattttaaaggttaggatcaaataatgtcgaaagttaaaaaggaaaaaatgctaattattcttgtttttatgttgtgccaatgcattatatggctatattaatgaaccttaaaaaagagtacttaattagacggttgaatcaattactttgcaaaatggttcgaatatcttaagagttatacattaaagattgcttggttggagagaagaaatcatggaatggttgggctcaatcctgcacaattgacccgcttcatgccagctagtatctaacttacttaatgcactcacaagcgttcgcatagctgacctagcttcgtgttaagggcacatcgtaaagaactttatctattctggtgcaaagtttggttgtcatacagaagcaggatcttctatcagctaaagagtttctccaactagcttgtgcattggcaagtacttaaagctgcctccagttctgttatggtatacaatacattcatttttctcttttgatttcatttaggatttgtcaattaatgtcttcttttccataccatttaattaaggagtaataagatatctgatgggtccaaggaatggagtaataagctgagggaagccttacattacagtacattgattcacaagtgaaataaatgtggattgttattgtatattgtgtgcagagcttttcttccaaatgcatttgtttgcaaaagtatagagggaaggaccaaactcatcttccagggctagtgtggtggtgttgcagaagacacttgagtaatgtatatctgtctttgatatagcttatcaactctaatataatccttttctcatcgtgttgcttgtaaattgtatcaaagtctaggaagttttcacatacaacaacatatatgagaatcgtttaagatgtgatgactcagtttaactaataacttagttatattatattaacatatctagtcgtgttttacataaacttttgcttaactcaactcatcatcaatggtataagtagactgagaaaatgaatatgaagatagcttaataagctagtatctagtatctaccaatggctaaaggacctggagctggagtgttggagctcgtctgagggatcccaatcccgagtagaggaacgaatcttggacagtgtcatgagaacctcagtgattgcagggcgagaattaaggtctcgagccacacatgccttagccaactgagccatggtgaaggccaagtccaaggggtactcgcgcttcaatgcagcatccatgaactctcgaagcttctccctcacgttgtctccatccaacacatttcttatcacccattcggaaaccaactcctcccctttctcaccaccaccaccatcgcctgcagctgcaactgctctgccggataagatctctaatagaacgaccccatatgcgaaaacatcaagctttgaagtgactaagccgctctcaatgtactcgggtgccatgtagccctgtgttccaaccacatgtctggtcaagtggggttggttgtgttcctcctcatcattctccaccactcttgctaacccaaagtttgtaactttagctttcatggtctcatccaagacgatgttgctggtcttcaagttcttgtggatgtaaggagggttggcaaagttgtgtaagtagttgatagcatcagccacatcgtaagcaatctccactctttgcttccaagatagtgtattattgttgttgttgttgtgttgttgcagccaatcgctgagagagccattttgggcgtactcgtacaccaggtagctgttacctccgctcacacacagacccgacagcctgattatattcaagtggttaatgcgcttcaatatgttgatctcgccggagacgtcccctttcatcactttaatggcagcctcgtcaccgttgaagcttcccctgtaaacggaccctctgatcttgttcttttcactgaaaaagtcggtagctttttgcagctcttcaagcttgtaaatggttaaggaatccgccgccgaacgcagtgccccttgatttgaaacagtcgaccaagaagaggaagatgttcccggaacagtagagtaggaattggagcaaaccttcatagacggcggcaacgatgacgaaagctcctttggcttttgagtgttgctgtggtggcggcggcgacgttggatgaagaagaagaagaaggcgatggctgcaaagaagagtaaagcagctccaatggcagcacccacaacaatccatttgtttgaagaattgtgatttggagctattggaggttgcgccggaggtggaggtggaggcggtggtgaggctggttctgttagggaaggctcggtggtcagagggacgataaggggcgtaaatgggtatatgttatctgaggaagagaggcggtttgcatcgagcaaagactctgcttttacgccgaagcgagctgcaatggtggaatagctatcgtgccatgtgacgagataaagaagaaggtactttacagcagaggaggtctgggaacgagttgggcaagcacacctaagagggatctggagagtgagaccaacggagaggttaaagattccgactgagttctgggctataagagattgacaggtggtgagaccctggtaggtattgttggcaacgctaaagtaagtctcagagcgtaacttgagtatataggaggcgttatgttggtagtaagaggaatcatctccggcggtgcaagagcaattaacggggacgatgacgaggttgttggtggggatggtgtcgacatcggagatgttgttggctttggcgatgtggacggtgtctgagccgagaaggaaggcgatggaggatggagagttgtagggagggatggatcggaaggtgaggtaagagaggcaggtaggggagacgccgttgcagacgaagccgtcggtggtgttgaagtggttgtaacaatcgagttgtttgttgtttacgtagctttgctgggcttggttccattggatttggatttggaaaactacccatatcgtaaaaatcttcaatttcatcatgattttctccggcaatgtggcctcagtcagtctcacggcttataatccatcttctccggcaatgttaatgtaatgatataagtaaacacagagttttgactcccatcccaattcacgcgtctttgtttgactcccaaccccatttgcacgacacgcctgacgccttccaccatcaatatcttagtctaaaccacatgctttgacttctttccatctcttcttcttaatttattattattaaataatttgtgacttaattacataaataatacttattagttcttgacactaataatacgcattaaaaatatttttttaaattatataatacttggtactaattatattaaaaaggttatgataccgaagtaagtgttagatatcacatgtgttttttagcaactttatgagatttatgttatatttttaaaattttaataagtacctggccatggtaatgtgacctctatagaagttttaaatattaaatttaattatatatttgcaattgagagataaacttaaacatttgtgctgtaaattattttttttatttttattaagaatacaagatcatgcatttaaattgtattcaaactgagttacaaataggaggaggagcttcttccaaaaaaaagctcattatctagtcatagacatgctaagttaatttatgagacataattctgatttacataaaaaagagataccctaaaaattaatgcaacaactgtttaatgtgagaaaatatgtgatgctaaaaccaaccacaatgaatttcttgggtggtgtttgacactaatgacttaaaacgaagaatttgttgggtggtgtttgctttgcaaaaataaattggaatagaattagaattaggaatagtaaaatagtaatggaaaataattattttgtttggttacaactttgaaatggaaacaaaataactttggaattgactattttaaataaagattattatggtggcgtttggtaacacttttttaatgagttttttgtttttaaaagtagaaaagtgaaaatatttttcaaaaacatgttctataaaactgtttttacttttcaattttataattagaaatcaaaattttaaaaacaa

SEQ ID NO: 295340 - DNA, 6896 bp, Cannabis indica
tcttacccaacttagtttcttatacaggaggataaagcgggaacaacagaagcagcatcattagaacaagctgtaatttctgtggatagatctcctcagtctgcattgagtaatggtatcacccagactgcgggagatgactctttgactgattctagctccctgaagaagcaagaggatgatcagcaaatcgagagtaccaaggatttggatgcaccaaacaatgttgacactgatacttcgaacactgagaaggcagcagatacagaagagaagctagagcagagcaataagaaagttgggagagatactagttcgtctgcaaaatctactccttcagaaagtcctcatgttttgaacgagaaggaaagtgctgataatgagaagaaaagtgcagaaaatgagaagaaaaatgcagataacgagaagaaaagtgcagatcgtgaaaagaaaagttcagaaaacgagaagaaaagtgcagataatgagaagagaagttcagaaaatgataagaaaagtgcagataatgaggagaaaagtgcagaaaatgagaatcaaaatgcagaaagtgagaacctaagtgcagaaaatgagaaggaaagtacagacaataggaaggaaagtgcagacaatgcaaaggaaagtgctgacaatgagaaggaaacagagaaacttccagaccaggaagaacagagtgaggatcttcgcgattcaccacatcagggtccagttgatgagactgcagtgctttcagaaaatgataaggtgtctgatgttaagctttcatcacccaaggcattggagagtgaatctgccaatgttgctactacatctccaagtgtgaaacttactgatgaaagtcgttccaaaaagtctgggcgacagaagaagaaggataattcagataaggaagctgctccatctgccgatgatacctccaaaaaggtagctgatgggacaagtgattctgaggtaaagacaaacaggcgttccgggaaaaaggtgccagctgctacttctaatgagaataaagctttagcagaggctaatgtatccaagaaggaaagtggaaatacaagtgactcagagacaaagcctttgaggcagttagctaagaaagtagatggaggcagtaaaaaggaagaaggatcctcagcaaagcatgcggaggataagaagaagagggttcggggaaaagctctttctgagaaggatggaaaaaaagcttctattaaagatgatagcaaagtacgttattattagctttagacactttgcatctgttctaagtgatgatgctatttctgttttattatattatttattttgtatttctaacaatataattcataacttgcttttgctgtaatgaattgtgtaggatactattgcttcaccaaagtcattggggaaatcaacaaaagatgaacagaagattgaggagaccacgaagacaaattctaagagaaaacgtactccaggcaaagcaaaggtatgtttagtacttttatattttattattctgtattaatttctgatatcataaacaaagaactagtattatagtattaggtttcaaatgcagacttcagaatgccatgtatttgtccatcgagacttgtaggttttccaacatcttttttgttgtttggtccctatcaggagtccggcaataaaggttatgatgaggattgggttggtatgaaggttagagtttggtggccggatgatcaattgtaagtattggtgatataatgtattgctaaggaattctcagtttcaacaactttgtttccacatacatttgtggtttttctaaacacttaaatttgaaatttcttgtctaaatcaacaattgttttattattatttaataaaagatacaaatattcattgtatgtgattaataggcttattcctgttacaacctcaaatctgcccagacaagggattttcttattatcatttctttttttaaataatgtacaggtactataagggttatattgcatcttttgatcccgtagcaaagaagcataaggtgagatgcgtgtattaaattattcctgaggttgtttttttttgatgtgtgttactctttagttgctgaagcaacttgattaaatttttataggttatgtattatgatggtgatgaggaagtattaaatctcaaggaagaaaagtggaatttcatcgaaggtgattctgtgtccaatgaggtaagtgacttcctgttttgtatatcctattcttatagtatccttgctgttaagatccatgaagcttcattctctttccaggaaggtaaagctgaacaagcaagtcctgatgcttccaatgaaatgtaagttgttattaatgtagtttttcagctctgattttaccattattactgttatctgtgtatgttcctccgcggtcgcttcaaatcgccacaatgttccctcttttcttatgaaaatgcttttaaaagtcaagagacattgtgattagaagagttattaaactgttatgatctgaaattgacgtttagcatttgtacagttgttgcatttgataataagattgcctatactattactttttaaggcttgatttttttgacattcagatagttagctacattaaacaacataactgtggaaaatacatccagatcgttgtaaaggaaccccatttccaaaacaaagacgtgttagaattttcctgttcaggcttgattgttgctttggtttactctttgttgaatgtcaattagaattttcctccagtcattctgaatttataattttcactaagtgtttgagattgcaacgatagacagacacatgctgtttaggatggtttatatttcgttgccttgcatttaacttttaattgactacactctatttagaattagaaaattgatgaaattaccatctcaatctcaagcctgaagattgtccttgtcaaaaaggagagatgatcttcaatcaataaccatagtgtctcttcctatcacatgtctcatctttaaaagcttgtcaagtctttattttcgagaatattcttcttaactagtttttgccatcatttccttcagctgtctttacttgtttatgctctaagaggcttcaagcttaatattacaatttaatttcaattaaaatgtttattttaatagggaaattttactgatattcccttggattatataattttcctcattgatttcttttgtcaacataagcagtcccctaaagaagaaagtgaagacaaatgcggatgagccttctaaacgtaaaaagatcgagtcttcacccaaaaagtaggtgtatatgttacccagtttttctttgatttcgtttattttgttgctaacatccttcattatattgtccaggggtggaggtgcttcatccagcaaatccaaggtcacgccaaaatctggacgtggcaataaagctgatggcaaatccaaagatgattccaaatctgttggcaagtcggatgcggtgggtggtggcaaatctaaggatcatacaccaaaaagtgctagtaccaaatcagccaatgttgcatcaaaatcatcaaccaagtctaagaatcatgattctcagacaccaaagactaccaaatccaaggacgaaagcagcacgccgtccaccaagtccaagcaagaaattcagaaatctggaaagtcaaagttggcgacacccaaaacagctactgtttccaaggagaaaaccagtcaaagtggtgggaagtccagtgccaatggtactgggaaagtgaagtctggttcatcgaagataaaagaggttgatgatgatggtaaggagagctcctctgattcaggtaaaccagcagagattactaaaggcaagtccccgaatccttccaaggctcaggaaggtgaggccaagacaggtaagaagcgacgaagaagtggcacgaaaggttaaacattttcttctgttcatttcctcttaaaaaaaggggttgtttagctctgcaaattgatagtagacacgttggagctgccgttgttaattcacagttagtcggtagtttatgtagttgtaggattgaggtggagttcatttgcgttcatgtttttttttatatatataaattattattttagatgggattaatgtttatttggggaggaaggcagcagaatctcttatgggttggcttggttcttgttataaaacctgaatgcgttatataagataatgtcagaatcagagtgatcttcagatgactgccaagattcactaaccttattgatgatgagttaccattaatgtggacataatgtagtgatttatgtttattatttagtagcagtagaagatcatcatcatgatgccatggaagatgaagtgaaggtttttaccttatttctaagtcgtgtaaagggtttagaattaaacttagctctatgattgattaattattgtgagtagtgtttttttgctttgagataaactaggggtttcaactagacaagacaatgtaaaaatataaaaaaagaggtgactttgatttgatgtttgaattttaataagttcatgtatttttattcgaaagggcactaagggggtgttggtatatgaagtgttcaaaataatctgttaattagaataataaagtggagaacatgattaattggattatatttttttggataaataaaggaatataataaaatgttgtgaaaagttacaatttatggtattaagattgtgaatttttacaattcacttttatttggaagcatttaagattactccaatagaagttaatcttattatcaagaataaggaaacttctaccaaatatgctcatgtaaaaggtttatatcataccaaaccgtccctaatagtcttcaagatcatacggatacaatattgttgtatagaaaactcttcatgcacaataaaaaaagtcagattatttgtttcattaaaatgtttaatttttgaacatttattgagtgatttgtcagacactacaaatgttaaagaactttttattgaaaacactgaagctgtacatcttatggatggaatgacaaccattgagtatgataaattaaaggatgcgagattttattttgaatattagaatgttcaatccaagttgaaaaattataatatttctcttcctcactctcactttatttatcgtgctcttcatgcgcatcctgcctttttttagctttatcaagataatctataacatttataataaagcatgaagcgttaatgacctaatttcttagtttatagttaaggaaagtaatttgtaaaagaagaataaatcctcactatgtttctcaactcaaacccgacaaatgataaattatgaaaagaagcaagcacaacaaggggctaaaggatatcaagaagtcaagtgagagggagttaaaacttaaagtgtgcagttatgttggagttgacgctacttatgttagcacatttattcttgaattacagtttttagttaagattgccttgatcaataccttttatgttcctacttttaagaggactttactttcgcttctgtttttagttaaacaagaatattcttttccaatcataatgttgagattatgtttgactcccgaattattggaaattgtttttattctaatagtatttacaagttgtcattggctcccttagtttcctctttaaatgttgtgaataatgtgggtaagagatcttatattaaaaaaatatccttattgttatagcacaaaagattgggtcatatttccaaagaaagagttgattgattacttcgagctaaaattctttctcatcttgatgattctggttgggatacttctgctgattgtattcgtggaaaattagctaaaataagaaagaagactgttatccgtagtctatctttattagaaattatccacactgaaattcgtggactttattccactacgttatgcaaaactaagtatttataattctcatagataattttttcaatatggattcacctacttgattaaagaaaaatctgatgctcttgataaacttaaaatctttcgaaatgaggttaagaaacaattaggaagagtcatcaaaattttcattcagatcatggaggagaatattatggtcgttatatagcatctggacaacatatggggccttttgttgagtagttacaagaaaatggtataactgctcaatacactatgcctagttcacttgagcaaaatgacattgcgaaaatgaaaatcacaatctcatggacatggttagaagcataatgagtagctcaaatatgctagagttcatatggggtgaagcactcacgaaaatctagtttgaatcatcttcatgtataaagttgtcccacttaagtaaggatttatgatcctaatttaaaaaagttagatccaagaacagttcgttgttattttattgattatccaatgcactcaaaaggctatcatttttagaatttggtgatgatgagggcctattattgatgaggggcctattgttgaagaatgtctcattgttgatgagggttctgttataggagaaattccagttgtggaagatgtcattcaaaatgatgattaacaaatagaggctactccagaagtacttcctctaaggagatcttagagacaaaagaagtcaacaaggtgtgatgataattttatttaccttggagaatgagaatatgataattttatttacattggagaatgataatatgatgaagtacttataatgaatcacttaatagtccacattcttcaaaatatatagatagaagctattgtgatgagattgagtcaatgaaaataaatgatgtatgtgagttagttctattacctgatggttttaaaccaataggttg

SEQ ID NO: 295341 - DNA, 1434 bp, Cannabis indica
acttctgtttctttattgatgttgaataaaatagattacattgaaatggaattttatttagggcataaaacctaacagaagacccgctaccagttactaccctaagaaaaatgacttaagaagagaaagaaaagaggaaagagaagaaaaatcacgaagcaaaagatgccatgaaaaatgacacatgcgcaaactactcaattcaagtatgtaaaagcaacatgggaaaaaattctttgccaagtaaattgattaggaatagcaaacagtcaaggaaaggagaatacctttgtaaatggtgtcttcaataaggatcaaacttgaatactcgagctcttaatacaagatcttaaagaatatccactacaaggatccaaatgaatttatgaaagaataaaaatttaataggaaggtatttatagggaaaagaggcaaagttccaagcctttgaatcaagtggcgattgatgaaagagatcattccatatgcccacattgggattcacgcatatcatgattggtcatatctcacttacaacgcggtaccaagattccttatggcatatgtatccctcaaaatgcatgtctcacttttgcaatatgtgcttccaaaacatccagatatgaacatcctttggaatgtaagagtccacgagtacacttaaaaaatatacttgtagacttgggaagcaactgttgacctcaaaaattgactaactattaatatcgggatcatgccagaataaggggaaggtgagaagggaggaggcacaagaacgaaagagactcgcgagacaaaggccttgctgaattttggcctgcggcaccccataaatgagaagagggtctcactaaccctcgtgtcgcgtcacccatcagcaggagagagggtcttgcagacccttgtgtcgtgacgcccgccaacgagagagggtctcactgaccctcttgtcgcgtcgcccatcagtaagagaaagggtccaccctcgtgctgggacgcccgccaacgagagagagggtctcgctgacccttgtgctgcgccgcccctgttgcctcttcgcgttgcgccactcaagcaaagggaggaagtcctcgcttttccttagaacacttgcgatttcatctcttgtttaatcactaccatacttatacttaatttctctatttagtaactaattcaaggttttcggtcctcagttgacaagtttcagtcgtcaacgatatcataagggaattatttagtagtatttcacggacaaaatactagttattttataaaaggaaaatttcattaattgaccctaataaaataccccatttcaaaatttataccctccactaatttatacaaattaattccattattttccaaaactacccaaaatacccttttattttaattttccctccttaactcttactcttctcactctc

SEQ ID NO: 295342 - DNA, 3227 bp, Cannabis indica
caaatttaaaaaaaaaaacaaaaaattacttacctttttgaaaaaaaaaaattcaacaaattcaaatgaatattttcataattttgattttttcttttaattatctctaagctttctgataattacttgggagataagataagatggctgctcctcaatttccaaaagttcaaaaacaaggggagaagaaagaagctctcagagttgataatagctttagattggaacccaatcattattccaccaccaacctggtatttttctttcttttcttttatttccttttcagtattattgcataagctgttaatttatttatacccagataagcaagaggcttaatttagcaggtaagattagtaaattcatacatgcatgcttgaaaaatttcaaaaaaagcaatcacatatttattgatatgaatggataaatacaaggagtggcttgatttgattctttgaatagatgggtctttcttttttttaactgttttattgattatgtgaattaaatatatatttgtattgagtttgattttgatttgtgtcttatgtctttatgatatttccaaggaaggaagtccttctgaatcttctataacagcctccatgatggaagaaaaccatgcctataatcattctcaggctgcttatccaagcacaacctcttatggttactactatccaggttttggtccagctctcacataaagtaattttattttacatgactagtcgtttcatatttatctttccatgtttacagtagttttttagcaggttacaatggctctcttggagatttttacaaccaaggatactacattgctgggaatgcaatggagcaacaataccctgtaagccttttcagctgtttttcaattgctaatgctcaaaagttctacatcaggttccatactttttgttccttatgcatgatttatctgtagtcccttaacctaattcttgaaataaaaccttaagatggtcctctattaaattggggatagtgattggatttcatctctcatttatggtggcagagaattctaccaatatgtgcttagcctttacaatactgttatgagtttattaatatcattcaatgttagtactactagttaaatcttatatttgtttttctaccctgatcaggttgtgcaagcagatagtggatcctttgtttacatgatgcccgggctctatcctggatatgatccttatacaccttacatgcctgttagtactatcactgttgatgggcaatatgttgggcaagaggtctacccaccaagtcccatgtttcagtctcccgttccttcacctgaatatggtacaactcatcacggggatccactgcaggcaccctacctttggagttcatctcttgttggtgatggaacttatgaaaatggttatgttggattgttggaaattccagctgccaaaactgatttctctgttccagttgttccgagggcccaaccaccgaagtcttctaaacttgcaggctcagtcaatctttctcctgatgttttatcaggtcaaaccaagaagctaaaaccactgaacaaggtatatttgtatatctctctttacttgtaacactgactcactgagtcctctcattatccaaattttctgatatttctaaaaatatttcaggcctcatctcataccccaagttttcagtcagatttacctgcccaaggttactatacagttgcaaaatttcctgtgtatggtcaagggaagaatggtttgctctactcaaacaactcagttaatttgaaaccaaatgttaagggatggggaggcagtgaaaagttaaaagcaagaagcaaggttaacggtgttagtcacgttactttactcaatgacaagaataatgatacagttaatgcgaagagtgcattgaggtttggaggtaatgcttctcaatccttggctactgatgaggttggaaatggtgtcagcataacctcttcaataaggagagatgaatataacattcctgagttttcgaccaaatatgatcatgcctacttctttgtaattaaatcgtacagtgaagatgatattcataaaagcattaagtacaatgtttgggctagcacacccaatgggaataagaggttgaatgatgcatatcaagaagcacaagagaggatgacagagaaaggcagcaagtgtcctgtgttccttttcttttcggtatgttttataactttgtcatgacattgatgcttgtctaacttttactccctaagatcagtgactgaagcctctagttccaacctttattttattatgtggttcaggtaaatgctagtggccagttctgtggggtagctgaaatgactggaccggtggatttcaataagagtatggatttctggcaacagagcaagtggagtggttattttccggtcaagtggcatatcattaaagatgttccaaatgcgcaattacgacacataatacttgagaataatgagaacaagcccgtaacgaatagtagagatactcaagaggtgtgcttccattattagttattttatagtaaaatatatatatatatatatatgtatgcatattgttttcaatgaatgtggtactctgatccactgagcttacattttgcttatctttctattctttacaggtgaaattccatcaaggtatcgaaatcttaaatattctcaaaaattatgctttaaacacttccatattagacgactttgaattttacgaaaaccgtcagaaaattatgcaagagaaaagggtcaggcaatctgtgcctaatcatgatttgcaggtatgttatattctttctgccattttttgttttttattttagtattttctgataattgattataaacactcccaattatattctcactcaggagcaaaaaatgctttgctaatttataagctttttcctgtaactatttgtgtggttgtggattaaggaataatatgttatcaggatcctaacatttggaaagtgattctcatttcttttaattttaactacacaaatcattaggaataaagctggttcctaaatacaaatagcatagtgggaattgttccaccattgaaattttgaaatgtggatcaactttattctctacataaaataaggtagagaataaatagtgtcctttaaattttttgattaggggtgttcactggaccacatctaatatttttaggtctatc

SEQ ID NO: 295343 - DNA, 1843 bp, Cannabis indica
aaataaaataaaataaaattcttgtggcttttaatttcctattccctagggtcttccttcctatctaaatatattcatatataccattttaatagtatatgaaaaaaaacaaatatataagtattattctctctctctctctctctctctcactatgaatcttcctagttccttaccatcccctcctcctcctgggttgacccaccacacccacatccccatatctccaacaccttattttgaaaaagaaaaaaaaaaacacacaattatttaaattaaaattaaaactaaaattaaaaatgttactgctatacgtacatacaagtcatacgcatataatttatattattaaaaactaatggtcttaaaaaaggtctatgtttatttgctatatatattcggtcttcaaactcaccccaaatagctaacaacaacaacaacaacactctctctctctctgtatgagtcttcttcattccatttctatcttttcttcttaaccaaggacatagtcaaaacttcatccccatttactctctctccttaattattatttcctctctttacaaaacaatttctccatcgggactaaacgatatggatggaataacaagcagttgtagtactacagacgagagcaccaccagtacaacggaatccgcatctctatcggctgccaacgccgccgcaattccaccctcggcgcctaagccgctggagaagttgtgtcgattggggagtggtgccagcgtggttttagacactgggtcatcggagagcggcgtggaagccgagtcgaggaagcttccgtcgtcgaagtacaaaggagtggtcccacagcctaacggtcgttggggggcccagatttacgagaagcaccagcgcgtgtggctcggcacgttcaacgaagaggacgaagccgccagggcctacgacgtggccgcccagaggttccgcggccgcgacgcagtgaccaacttcaagcccttatcgtccgacacggacgagatcgaagcttcttttctgagctcgcattccaaggcggagatcgttgacatgctccgcaagcacacctacaatgacgaactggaacagagcaaacgcaacttcggggccagtggatccccccacaacaaccgcatgatgatgatgaaacatctgctaatgaagtcatccgggttcggatccgggttggacgacccgcttctcatgaagcaacatgtgcgtgagcaatgttcgagaaggccgttacgcccagtgacgtgggaaagttgaacaggttagtgatacccaaacagcacgcggagaagcatttccctctccagagctccaacacctccaaaggggtcctgttgaatttcgaggacggaggtggtaaggtttggaggttccgatactcttactggaacagcagtcaaagttatgtgttgaccaaaggttggagccggttcgtcaaggaaaagggtctcaaagccggtgacattgttactttccaacgctccactagtaatgggcctgataagcagctttacattgattggaaggctagagataatgggcccatcgttggcccaggcccagtccaacaacccaagctgcagcaacatcagtcgccgccggtccagatgttacggctgtttggggtcaacatttttaagacacctgggagtggtgtcgtcgttgaagctgggattggtggtggttgtaatgggaaaagaataagagacttggaattgttggaattagagtgtactaagaagccaagaataataggagccttgtaatagtaattattaaagaaaaaaaaaagaagaaaaaaaaaagtttttctcttttttttttt

SEQ ID NO: 295344 - DNA, 4683 bp, Cannabis indica
tgttatccaaatttttgcactctaacttggcatcatatgatggtgacatgtggaatcaactttgagtatctgctcagaaagtacagtccgaacaggatgcctcatcggcatgcctggagcaaaatgattagcaatccgcgcagagcgatcaacacttagtgaattcagctttcgcatcatgagtcatgaaagaaatccctataacttggggatcagatcacagagatatggcaagctgtccaaatcccacgatcagtgtattctgcatttatcatgcaatctttctgcttatatccattgtaacgagaagggaaatacttcctctctaagttcaaggccctataaatagtgatgcatactcactgggcaaggggtccagagattttaccctagagatgttatccaaatattcatattcagagatattgttgtaagagttataagtaaaggaacctttctccttgttcttgagtcaatacaaataatgaggattaggctataaaattcttgtgtctttacattgctttactatatatcaattgctacaaatcatttatcgtttactaaataagactcactgttgttggctaaaagcgaggtcaacaaatagtaacttgaaacctgaggtggtgtctaccatttggtcgatctggggtagcgggaaacaatcctttaggcaagctatgcagactcaccatgtcccatttggtttaggtactagaaccgagttttccaaccactctgggtagtacacgtcccagataaagatgttggataacaacttatccacttccttctttagggcgtcagcctttaccgggtctagtgggcatctttttcgttgtactggaggcatatccggttgatgttcaagacatgggtgatcacgtggggacttatcctggtcatatcctcgtggcaccaagcaaagacatccgtagctgcctttatagtgtctatgattgtgctccgctcctctagttctagattttcccctagacggataaccttagatgggtcgaggttgcacactctcacttcctcgacatcctccatgggctataacatcacttcagacctaatacgggggtccaactcgtcctattcttttaccaacactagcccgaactcccgtaccatcaggactgacaaatgtattgcagcattgtaacactgtcttggttctccttagttccccctcactgttcctactccagcctcccgggtagcgaatttaagatacaagtgtcgaatggaggtaattgctccaaaattgactaaggtcggcttgccgaggatgacgttataggcagtggggcagtccaccaccacgaaggtgcagtacttgaagatgctttgtgggggtgtcaggacacaaggtaactgggagtctcacctttctcattgggttgagggtcatcccgttgaatcttgtgagttgtgaacaactgggagaaaggtccctgtgagtgagtaacttcccatacctcctcgtcatgttttagggcccaagcgtaatgctttagctgattcctagtggttccccaatatgaggtcctctagagatcatagccactcttccattaggccgaggtggtagttcgagcgtctggtgaaggggcatccatcgagaggtacctgaccctcaggcgcaacctcgtttcctctctgaggcacagccttgtggtttgggctggattcaaatgtggcagcctatttttgatcccctcatacaagtggcccaatcagattaagctttcaatttcatccttcagatttttgcattcgtttttggtatgaccgatatcattgtgatactcaccttttgttggcgcccctccaggagctatccatgtacaagggggaagccttccagtaatgcgtattttgtcgggtggaaaaatatatacgttcttgagaatctgtgagctcggtgtattgcgtgtattggggagtataccccctccattgcctcttgtcctcagtctgtgtgctacctttagaagacctcttgctctgggtgctttgctaggatcctccaattcttgtggccggtgcagatttggatggaagctgaacgcgcaccccagaggggaggcttatgggcgccccaaagtgtgatagtgtcggggttaaggtgagattctgattgtatctggagtagcggagaactttattctacttgttcggggagcagcagggggttgaaccccgtaaagttgtgctcctggtgcatatcccgacactcccatcaggttataccctccgtaagccactatttgagcctcctccaagttaatgtatttctggactctcttctgaaagtcttggaggctagtcgctccttctgttgcaattcgttttagaaaggggttcctgtccggctccaggcttggagtagtgccttgaccaatataaaacaactgcccacggaaactttaaagaacttcaaaaagagattcaaggaggaggctttgaaaacgaacaatgtgtacgatggacaacagttacatttaacggttaggtacttacaaattcctaaaaatataactactaaaaattaaacttaaatatttattcctaattaattagaagttaaacttaaatgtttatggccatgttatttttaattaattgcttggacgtgatgtgatagtaaatccaacggtggagtgatagagtgacagtaaatgggtaaagtgtttctactttcttttggcagtggtattgaattgaaagtaggttccttttaggccatttactatagaaaaatgccataagaacgaagtttggaccagttagtcagggacaacgaaatgacattatccataaataccagaaaatgacaaaatatgcaaaacctcaccttgaactttagtatatttaccttttcaaaaaaaaaaaaaagaactctattatatttaaaatttaccataaaaataaatacaaaagcaagaaagcttacaactcgatcgtaattatgccaaaagtaatttctgtattcttagtgttgggtggttgacagtcactgaagctaaatatttgtaagcaaagttaaaatgttgtcattcttaacatttttcatatatataacaacatattcactatatctttctcccactttgtaaagagtgtagtacttcacaagtagactgtagaaagggcagtgtaaactgtacaagatttgcccacataatattaatggaccactttagcattattactgtacacatacactagtcattagtactactaaattatatgatgacatgagtgggggtgtgtatttaaaaatgaatgcaaaggctaatgttgtacttttttgaaaccggtttcattccagaattaatattataaaatcactaattctaatacaatattatattatccagattacgtacgtactcaaagaaagtaatctacatcagtacaagcaagatatctatgatgatacgagtttatcaaagtaacactattacagcattaattagagagcaatatgctgctatgtacaaatgaaaaacatgcgtaagagaactattggctcaagtcagtactactagtaaataaggaatcaaatggtcctaattaaaactgcaatttgcatagagctataaggagttgaaatgtgacacgtaggtcttggatggggaacagaataacgtattgtctctgatatttgatgttctttaattttgtcaagatatcattggaacagtaacagtagtggagatatatattagtgtgttggtcactttaaacatattcatgcgttgaaattcgaaagaattgaattaagttattacagcgatgattgttgtcgaactaccatatgatcacaaaatgataatatacgaaggtcaaagctataaggggttctttcattttcaaagatatatttcgctctctccatatataccaatcacaatcagataaatggctaatgaattgattcagcttaccccacacaaaggcatagaaaggaatcttcatatatgctagcttgtcaatttcccatagcttagctcgaaacatattgctacagtataatattgcttataaacttaaagctgaagaaaacgaaagaaataattattattattaagctaattaagatttttgcttcctcaattttgacatgtgctatgctctttgaacttttaaggtcgttaaaaatgtcccctaaactattgaaattgttgaatttaaaaacttttgtctaatttcattcaatttttctatttcacttatttatcttattattattattattgataatcatcaatggaacatataaattgagagtgtttatcttattattaaataatatatagattaaatatataagttaacaaaacaattaagtgtaacatacattttgtggagttacaagcttctactattttgaacatctaatatatcaagggaggttagtcaacttaacttttgaaatttaaaagttaagatgaaaatataattttgtcaaaggatataagttttaaactctttggagttaagttgcaatattaaaaagggaaatttacacagattactgtttttttccaatttatttcttttataccgttacacgctcaaattaacttttatactgttttctttttttttcgaaattaacttttatactgtttttttttttttcggtcagtgtactgccaacaattt

SEQ ID NO: 295345 - DNA, 2381 bp, Cannabis indica
aaaaaaaaaaacaagtttaaaatttttcaaaaacttacaaaaaaatagtatattgtaaacataacgaacacacctacaaaaaaaaatattcgacattttttttcaacactacgctaacactcctcccaacaaattcacataacccaaataaatcataagtaatcaaactcttgatgaaatttaaagaagttgatgttattcaaagaatgacaaatcgacaattcttcacaaattaaattacagttgtgtatgcagatatcgatgcaatgcacaaatttgtaaagcataaataattttacaatccatatgcatactcaataagaattgctattgggcaacagtgtctaacacctgtaaacatgttatcttacaattggctaacgataatctccaaaagttattacattaaaatatatgagacccaatacttaattagactaattgcgataataacacatcacatggaggtgctacgcaccactcgtgacttttagcatttctcatactcaatattaccaaataataatatgaacattcactacttgtttatattggattggaggaggattttcatttcaaaatccaataatagctacactgaaaaataacaagtactatagaaatgactcaatgtgcagcacagagaaaaaaaccataaacagtagagacaattcatgagtaatacatatatgcaaacattacatatccaatctcaacatgttttaacttgtcataatgtcctttgcaatgtcattctcaacacgagagtgtatcactgaaacaagaggccatatataaatctataaacagcaataaaaacattacatatccaatgttggaaaagtacaattgtaagataagattttaccatatgattactgttccaaacaaacttaatcaaaatagctattatagaatctcaattcaattgaaagaaactccttgaatctgagattgttcaattcaaatcttatatttcaaacttcacaaaagattaactcaaacctaaagcttaacaagaaatgagagcaaaacagattcaaagaaatgtttttgattctctaattcaacatatggaacaaaggtctcaatctcaggcattgaaacaaataactacatcaatatttgaagctaaaccaatcaaacccattaatcattgaaacaatacactgcaaatttaaagcattaaacaaaaagaacaaaatgcattataactgattaagaacataaacccattaattatcgttgagctaattgatataaaaataactcgaaattatctaatttaccttcaaaaaagtgattaaaaatcatctttaaggagaaaaagttctgagaaacgagcataattaatttaaacaaaacccaatgtatctaaatcaaaaaaaaggattaacccaaataaggttttttagcttaaacagagaaaaaagaaactcagcttaatcctgtggaatttcaacatctccatctgaaatctcctcctgtaaatccttcgggtcctttccatcaacagagcaaccaacagatacacacgtgccgagaatttccttgacagtaccagcgagttccttagcaatagacctaggcctcatgattttggcgatctcaatcacatcatcgagagaaatgttaccgttatgcttgatgttcttaaccttcttcctgtcacgttcaggttcctttagggctttgatgaccagagcagccgccgacggtacaaccgagaccttagcttgacgattctgaacagtcagtttgactgtgactcttagacccttccagtccttggctgtctccttggctatgtcttctccgatcttctttggggacagacccaaaggaccgatcttgggagcgagagaacttgccgcaccaacctctcctccggtgactctgacgtaaacgtcaaccacctgagaaggatcgaacttgggcggcattttttacgagagagaaagagaaagaaaaagctctgtagattggtatggaggaagggagctagggtttcgaagaagcaaaactatgggaacgaaaatgatagttttatggtagggttttgcagggtctgagtttgtcaaattactattttacccccgttatgttagagggcttttagactgagacgtgtggcttttgggaaattaaatgtaaatgacgaaaatgtacgtgttgtcagagatgttaagaaaggaaatgtaggggtgttgttgggctgtaatgttttggattaaagcgtcattttgtatttgtgtggcccaatcttttgttcgttttagaatttaaggcccaataaagaagatttgggcgatctcaaacaatcgttttcattttagggttttttcttgaaattatttcaaaaaaacacaaaagaaaaaaaa

SEQ ID NO: 295346 - DNA, 2891 bp, Cannabis indica
cataactgaaactattacgctcggaatcgagttctgacaaagaactgaagaagcccgtgctttcatcgtcaacgtcgtcgtcatctgagagttggaatctaagcgccaattcttgaatattcttcgagaaatcttcgtcggagaatgactctaagctggcggtagaggctctccgaatagtacggaattcagatttgggcatctcgcaagaccaagagcggtgaagcctaatcgacgtagtcccgaacagggaggagcgttgcaattttcgcacgtgccggcacacgagcgtggctccgtctccacggcttcggcgcttagaagaaggagaatatatagcggcagaggccagcgtttgtgaagaagatggagaatgaggaagaatcggccattgcaaaccagttgtggctaccttcaccgccattcgattccacctcttcttttctttttccttctttaatctttctaatgtattaaaaatggttcagcaaaaaagacttcctttcttctttctggaaagaaaaaagaaaataaaaacacaatattaagtcaactaattcaaatagttcccaaatttcgcagaaaataacactgagatttttctaaacatatgtaatctacctaataagaagaaaaagttcattttccaggaaattcggatccataaaacgcaacccaaagactactcaaaaacttggctcgaaactctaagaaaagaagaatccccaaatctgtgaaattcctaaaaactacagaaaagagaataatacacttacgtttagattctgttcggagtccaaaagattttatttttatttacttaatttaaatcttctccgaaacagttccggcgaaaactgagcctgagagacaaagtggaactactgaccgtagcttcactttatcaaaggggagagaggcatataatgttctatatatacaaaaaagcttttattggtctttggccgtttccaaaataaataatttaaaaagagaaataaaaaaaaaaattgagttaataacgagttggtaataatgagtagtatttatatgtgaatatgagtaaatgaaagaggaaacttggaagtcaattattagggggagtgttagaatgatttttactttgtaatgaagaggtagtacagtaaataaaaggagtcgtattttatatgtgagtaagactaaaatactgtaaaatggaaatgggccaaatggtatttggggttgtttcggtttgatattttgtgtagtattttggtatactgtgggtgggcccgggtcatttgccctcaagtgagggggttgagttgggttgagtctgggtgaaaatgaaaatatcaatctaacgcggctagcttcacgggactgtttggacttttagatctgatcagatctgcttgccttaatgaattctgccacgtgttccaacacccttcacctccctattggaaaaggaaaccgtgattcttaccgaccttcttttgcctgttctttcagtgacacgtgtcggttctaaattagaagtggcggtgtaggttttggtttttacttttatgttttttgaaactgtgattaacaagagatttttatggagaacaatctagtaaacttagtttaaaaaaaaaaaaaaaatactagtaaacttctttatataattgcaaaaaaataaaaaataaataaaaaaattcctttaacatctttgtttggtaaacttaaggaaactaccttaagtttataggtcatgccagtaacatactcaatcttcataactaataaatatttccttaactaatagagacattttataattttttaacaaatcaagaatttttaattattttgtttgaaaggaattttttaattatttcgacggttgtattttattttttggacatagaattttgaaaaataagataaattgaatctaaataattttcaaagttatatcattgttttttcacgaaaaaataaaataaaatatcatgcccccagaattttccgtgttagattttttgttagattttttttattaaaattagacaaaagttcatatattcaacaatctcaatagttactatttttaacccccttaaaagttaaggaaatatgatttgataaaaattctaattaacttaaaaaaattaatttatttctacacaaaaaaaaacatttttatacttttttaaaattaataatactataaaaaaattacataaaaaatataaaaattcaaaaatattattctatacctttacacggctcctcttatatttttatttttgatattgttttatttacactaatacttcttatacatgcataatgtcattatgccaccttcacactatctatttttttttccttttctatcattttttttttctagtttcatttcaattttcattgtagctttctttttaaaacttctcccctgattaaaaccatttttggtcccaaaaaaaaaaagatttcgtccatcttcctcaactgccttcctctatcatctgaccacgatttttctaattttttcttttttttttttctgttctataaatgaccattacttagtcttcatcttcttcatcgtcattactgaaaaaaccttcaaaaataagtgttaaatctcttgccaacaaatctaaaggcaaacagcccattgttgaagatgatgattcagactttgctgcgcctactaaaaaaaatgatcattgccatgttaagaagaaattgaaagttgatgttgctgaaaatattcccctccctaaagttaagaaagggaagagcagtctgaatatttctttctagtttctttatcgttttgctctaatattgccctaacttttcttattactagtttttttaggaggaaataatcctatttattctatttt

SEQ ID NO: 295347 - DNA, 1790 bp, Cannabis indica
agatcctggtaaaataaattccaacaattttcacattcttctaagtccccaaaaggtcaaaggatctctctctactttctctctctagaaagtagtggtctttccttagccaattttcttgtaattctcatgagcaataaaaacttgaagtagacgtagctctattaccgtcgcgacacggagagtgaactactataaattgcatgtgtctctctattattacttaaacttatttctcctctcgctaatcttgcgagtgaatggtggccagatttttgcttcaacattttggtgcttttgagagccacaactgaagatcctaatcaagatggttgaaattggatcaataagtgttgaaagaagcaccacaactggtcaacccactaggggaacgccagttgtgggagttggtgatgggacgacacctacatcccggatgccaggtcgaggctcataaccagttccttagctcgtcctccaagaccacaaacaattactggcattgacacaaccaaccaaattctacctagagagccacacgtggagttagaagacctcgaggaagtcgatccttgggttgaacaaccttgccaattagtggctaacttacaacaatagctctgagagtctcttgataaaaaaacatgaacacttccaaacctggttcatggaacattggaggaacattgaaattcaacatgctaaacaagagaaaatctttctcatcgaatctgagaagcctataaatctagcaatggaacagctcttttggaagttgtttcaacaagagctggaaacaaccctcgtgtgccaactggccacgtatggagaagcactcaagggaaaacccttaagacgcatggtacttctaccattcctagtagccatacttgttagcatccaacaagtactgaggatccccaaagggatacgaactatgagtgagcattcgaaaagactcagaatcgagagcgcaaactagttggccctcctcctaatgtggagcggtcacctgttagggagacaacctacgagtgagcatctaaaaggactcggacttgagagaatgtagacttataaaggccccaccttccactgacaagactaaccgtaatcttgcttagagcaatctaaacactgcgagaaactaatctcctctgtgggattctcctcaaaggtccagtgattctaggcctcatgaccttgcaaggggaagggatctgtagtgaatcttaggggagggactcggagactctaccacaaaacttgagggtaaaaactaacgaaccactccacacttgaaaatatttttaaaatgaaaagggtgttttgtgtaggtacttcgctcgcggtcctaacggttaacaatatcagttgttccctcaagagcatgaggaagagctgaacttgagaaatcagttcagttcaactcttttcgcatttgtgaccctatggtagactatttttagggtaatagtaactatagtgctccaaatgaccgctctcgccgtgaccagtccaaggttagtctgtcgtcataagggagaaatccccagcattcctccacgaccccatggttaggaggtagcagccaaacccaagtcaatgaatatttttgattgacttaggaaatagaaagacctgcgtgacaccctgaacaagaaactattggtggaagtgggagcttctagaggtcaccttgtcaaccaggaagttaaagttctaattgggacgcaaaccaccactcgtggaatcaatagggttgagtttgatgttggaattattttacc

SEQ ID NO: 295348 - DNA, 1454 bp, Cannabis indica
agtattttcgtgtcgtgctcggacgaactttatttttgctcgaacataacagcttgtagccttgagaaatgtgatatttcacccctaaaaattgttgtcaaccagccagatttttaagctgatctttaacagcggtcaatcttcgccaataccaacttccatgtgaaggtggtttttaagaccaccagtcttcatctttgatatacacactatgcacccagcgaacccaaagatttttttccttgttagcaatagcccatacgtacttaaagagtgttgcaatagtccattctggtatccttttaaagccaacccctccagcagccttggattgacaaacagagtcccaagcaataagtcccgatccttgaagcaaatgttgtcctttccatagaaaagcacgacagatagcttcaagttccttgataacattctttggcacgattatgatttggctccaataggaatgtatagtgagcagaacagaattgataagaacagctcgacctgcaaaagataagttttaagtactccaggcattgattctagctgtcattttttcaacaagaatcaagcattccttacttgatattcttttgaagcaaatagggctgccaaggtatcgaaatggcatctcttttttactaaatctcgaagcatctacaatgtgttgcacttctctatcttgcataccacaacaataaatggttgatttaaaagaattcagttgcaacccatatgaacaagaaaactactttacaaacttttgaggaggtaatagatgcttttgtattcaccatgatagaataaaattacatcatctgcaaaactcagatgatttattttcagatctgtacacctgtaaaaaacttgaaatctggcttagaccctatttgttgcatgattctggatagatgctccattcaaagaacaaaaagaagcagagacattggatccccttgcttgagtcctctttaagcttcaaagcaactatgtaatgagccgttcaacattaacgagaacatgggagtttacacataaatcatgatcaatcttacaaacttgttagggaaattgaattcccaaagcatttcttccaggaagtccaactcaattgtgtcgtaagctttttgtaaatcaagcttaataatgcaccctagtttgagtattttcctcccaaaatgtcgaatgagatgtttgtgttggaatatattttactacgatctagatttactaccatgtatgttgtttaacatcctaaatgtaaatttttaaaacaatgtaatttaaacacatataaagttttagagaccttatagtgggtgcagcagaaacaaatgattccttccgctcagatctctaacccttgtatcctttttgtagcagagtatcaccaagatctgagcccaaaacttcttctcttgaatttggattcttcacagtcttacacacta

SEQ ID NO: 295349 - DNA, 1728 bp, Cannabis indica
gggaaaaatttacactaataatatttattgtactctgcacactaatttattagttacgtttacgggccacttcagtaccttaaaaactcgttttttttttttttttatttttaaatttttaataatttttcaaaaatatcatatagtttttttttataaatagttcgataattttttattcttttaataaagcctaccctattttaagaccgccccatgcaaggatctcttagcaaaacatagctaagaaccaaacaattgatttttataaaatgtaaacaaaccaattaacaaaagcttttcaagaaaacgtcattttagctttcaacaagaatcttcaattcatttttgtttaaaaaatcttcaattcataaaatttcaaatactttaaaaccgttttaaaaggggaattttcattttctttataggttttaaagtatagatttgtgtatggtaacaagtttcacctctatttattcggatacctaattacctttacttaattttcttatattttttaacttttcattaaattttttccataaaatattttttttaaaattaaaaatcatatttttgcacaaatactataaaaattccataaaatttataatttcctcttaaaaaaaaaatgggggtcaatatgcaaaaataacaaaacacaagtgcccaatttgaaaattcaacataattaaattcgaacgcaactttcttggccgataacttttccataaatgacatttatatccctactttcccaaattcattgaatcttacactaaagaccattaagaatacaatacacccgcgatgcaccagattatggtttccttatttgtgtttacgaggggtaccatgatacgaggacgaggagggctataaaatccgaatttgcctcttctaatcagacctctttcattggcttttcgctcccacaacccataactcaattgttgagtgttctcttcttctttcacataagggctttaaagggtactcttctttgtctctacttttgtttcttattacttgttttgatgtgatatgatcttgggctctgtatttgtttttgtttaaaaaagataacttttttgaggtttttgttgcgtttttttatttgggtattgttgtttttgtgtttttgtattgaactcgcaaaagggtcttttttgatccaatcagtattgcatcgttagatctctgcgtggttttagctttgttttttcttaaatgggtttgattgtaaggattgaaagtttagagcttgattgtgacctttgattgaatagttttgtattaggaatattgaaatcctaatgtgacattctttgttttgtctagttattgttattattttactgtgatgaagtgatgtttttctttttgacaaacctgatgaacagatgttttaaaatatcttttttgaatagtcaaaattttggatttatgttccttgtgatgattttttatgtataaaacaaatttaggccattttagtttgttatcattttaagggactttttttttgtttgcatttgtagattcattccaatctgatcttgttgggtaattctaatcattatagatataatgcaaattttcaattgttgaaaccccttcggtttattgctcaaatgatcatatcaaatgcttagtttgaaaaagaattatattagaaaaatttacacctaaaattttactatttctatttattttttttttttttag

SEQ ID NO: 295350 - DNA, 4084 bp, Cannabis indica
atatggacttggggcaagaaggattggagtattttcagcaccaccaataggttgtgtcccatcacaaagaactttaggtggaggagtactaagacaatgtgcagaagaatacaatgaagcagcacttatgttcaactctaaactagcctccaccattcactcactcaagtctagactttcaagtagcaagcttgtctatgttgatatctacaatcctcttctcgatctcattgtcaaccctcaaaactatggtacttgtattattattaatttggttacttcatctacatattattattgtaacattaattaacttatattttatttttctctcatcagggtttgtagaagtggataaagggtgttgtggaacaggggcacttgaagttgcagtactatgtaaccctttgactccaccatgtgaagacccatctaaacatatattttgggatagttatcatccctctgaagcagcatacaaagtcttggttcccaaccttctaagaaaatatgtcaacagcttcatctattaattctcgatcatcatcactttattaaagttatatatatttacttatattaattgttggtttctggccaactttaattaattaaaactttacatatgattttgtgtaaccaaaaaaaaaagtgttgtcatttaatttagttttcgtttctccatatcaatttgttttgtgtttttgttgggtgaggccttttggaaaaatttgtagcctttgaaacctggaaaggcatttgggcttttgattttgtatttgttggagtttgtacttgttcaataagaaacaaatataagaaatttatatggaaaatttgatcaactatgcttcttagttctttctcactatacccattcaaaatttagtgccaacataactcgactcaaagttgacataatatgccatttccctatctttaagacccctcctatcattcaaacattttggtttctttaattctcacaagtctcacccatttctaaaaattggtgaaatctagccacttaccttctccgttacccctcttttcattctcagatctcgatcaccccctacgccaaccaccattaatgattctacctccgatcaccaccaaaacatctaatgtatttttcttttaatgctttaatggttaaaactcaaatccgaaacacaaacccattttttcttttacaaggcactaacttattaatttcgaattcgcacataaaagtttagttttctttgtaatttttcttagattaaaatttttaaacaaaaaaacgatgtctaacgatgtatttgcaatgtaacatgaaaactttctttttgcaaacacgatgtgcaacgatacatttgccatgtcaatttttttttaacaagattgaagtttaacaaaaattaattttgaatttttttttttgatgttgcgatgatgcattcgtgaagtgataatctatgatgaattttgataaaaactttggcgagataattttttacttgtgaaaagtctaaatgtttagaataaaaaattttagttacaaatgtcattgtaactaaatatatgtaaacatagtattagttacagaattgtaattacaaattgtttttttttcgcgtccaaggaaatcatgtttttctcgcactatcatagttttccctaaatattttttttgacatcattgcaaacacattgtttttttttttttctttttaacaaatcgcgaacgcattgtgagacacagtattttccttttataattaaaacatctatgtatttgaaaagatttataatttatacaaagtactttaaatcattttttttttaattttttaccaggttctgttttttttttcttatagatttttatacacttttttttttttgaaaaaaaaaaatatatgttatttttcattactttctcgtagcggtaacatggaaataacggaaaaatcatactccgtacttttgtaaaaaagaaaaagttgaaatcctgtaaaataacttcaaatccatgtaaactttttatttgagtattatatgaaataatccttaagtttttgggagacggtcacttttctacgtgtgctattgaaataatataatatgaattctaaaagagtatttaaaaagaataggaaaaaataaggaaaaatttgactaaatatgtttatattactttaaaaaaatttctctaaaattataattagcaatatttgtaggataggtcaactttaatgttatccccaaattaccctctccaattacatgacatccttctctctcctctcttcccattccttcttccttgaggtatcaccctagcctctactctaccaccacaatttttttttttcttcgctacaatcattttcaacactacaagctactacactacactacaacactataagctaccacactacaaactccccatatacgaagcatcaatatgtaattaattttttttattttgtttgttattgttatatttagtttagaatattattttgatgcttgatctgatggatgttgctattattttgatgttttgtgtgttgaaatgcttgctgtctgtgaaaactatatttttcctggtttctgcattttttttacttggtccgatggggtccgatgcccacccgatggtggtctaatgcatatagaaagtaggttgacagggatgacaacctgattgggcctgattagggctcgatgggtgtccgatgggggatccgaaaaatgggtttgaggcatctttttttttatcgggtccgatagggcccgatggttagtctgatttttagtccaacatgggttttgggccattaatttaaatggggtttgatatagacccgattaggtccgatggttggtccaacaaggttttggggcattaatttaaatggagtctgatatgggtccgattgggcccgatgggtggtctgattagtgttgaatatagatttaaggccattaattttgatgggtctgatataggcccgattgggtttgattggtggtccaatatgggtttgggactttgttttttatggggcccgatatgggcccgatggtagtccgatttgggcccgatgctaatcaaatttattgcattttcaagaatttgaataacttttatgtgagatttttgttctaaattgtaattgtattttttttaatgtatgtgataggttcaattgttaatgcgtttgttatgtataatggtgtttgggagcttgagggtagagattgggtttataacccgggtcgaaaatttgacatttgatattgatccgaacgtaagatactcagttttggttgatcttttgtatgaagaattggatgttgacaaagttcagtatgactcgaaattagaagtaaattacaagtacatgaaaggcttaatgtatcgccctaaagttattggaaatgataagcgtgcaaggttctttttgtctacacttgcgaagaagccagatgaatttactctcttgtttgtcactttgttaaagaagaatatttgtgtcgatcctagtccacaccaagttctgttaaggacactcgtagcgaggttaggagttttgttccagaattaaatctagaggtgttggttgtggatgtattacctgaagtaaacactatgatgccgagtgctgatattgtagcataaatgcccttcattgatggtttttttgatggtccagaccttgaatattatgttgagggcaacgatgacgtaagagacgaccaaggtacagaggtcactactactgtagctttgagcttgactccattatcgtactaaataccacccaggtcatcgacacgaaaaagaatgccccgtagagaaaatcaccaaacacctagtactagtagtagtcatccaggcaaaaccagtaatgctagaggaacccttgacaatacaggtcctaataatgctagatagaccaatgatgctagtggtccttgtgatgctagagggaccaatgagactggatttagcgatctattttcttcttcgacaagttacagtaaattcaaggagaaaatatttacaagagaagacatcgaggatcat

SEQ ID NO: 295351 - DNA, 4121 bp, Cannabis indica
tataacataaaattattttttttatcaaatatggaataacttttacgcatctagagatggtcttcgttttttttacatattacagctgtgatgagctaaaggccggtctcattcttcgtccttggtagtacctccacaactcattgaccagtttgagatgttggttgagcccgagtctctcatagatgtgcgtccaaagcctgaggcacatgaaacattggattatttaattaagtggaagaacttgccaccttttgaagctactttagagaattaccagtttcttggatctcggacaagatcgcctacacagctagagttaattaccttatttacttggattttcgctgcttttgtttttggcatgggtattttggggtttgtcgtatacttttcggttaggccttgaaattgggaagataattgtgccttttttagtaaagaaaaaaggtattctgtgtaattgagctgtctttagggagagttaagcctctcagaaatctagacatataattttcagtttcaaatacaaggtttctgttgtgcttacctttacattacttaattcatttttaagacttcaaaaataaataaatgaacgtataagaaagatctatgttacaaaatatgaagaacagatccggagcttagaagaactcatttaaaatttgaaaacaaaatgataattatatatctttcacatggtagtaataaatgattgtaaagtgtaatagcaaattgctaatcactcccccttaggagggttgagtacatcagaaatcaaatagtaaagtgaagaggagggttaaagaaaaaggtaggaagaagtcatttgaacctttcgaatgaatcaacagatttcagggctgcttaccaacgaatatgagaagtccagtaaatccaatctttctcacatgcataaatgttttggaatgtatcaaaccagtacattataacaacaacaaaaactagaaattcacactaattacggataaatgcaactgtggcaacccgtgatcctacagaaccaccaaactcgaaagttggataggtgcgaacatgactaaaatactgaaatggaggcaccaccttgctcgcttcctggtccttgttggattcttcagcttcctgggagataccgatgcttcttttgttgaaactttcaacttcttctaccaattcatcttttgtgttgttgcaggacgtgatcacctacaagcaccaccaaagtgtaagaaacagtggaaaatctttgatgagaaatgactttggctccaaacattaggatgataaaattaacatacttcctgcttccttttataagaaaaaagatcctcttggagtatctatctacatctataaattaatagccacacaagaaacactaacaagggggtagaaattcagtcacaattgttaagataaagtaaatatgttaccaataatcctcctttagcaactaatcttgaaaccgagtcccaatacatcatcctgaagatgtaaaatgatacaaaatccattagtcctcagatgtgattaaaattgttaaatcatttataattgaggcctgaaatccctcaagtgtttgatacgaatactttcttttaagatcaaaataataagaggtagtaatagagccaaatgttatgaaatgctcaaaagtcctaagcaaatgccaggattttctgagatgtggaccaatcaattgcaacatgcagcagcacgactcaaatggcttctatacatgtttctgcattggatgatgatattgaaaccgttaccttttaataggcccatctggatgcagtccaatggcatctaaagttcctttatccatcacaagttgaaactgccggcccagcttcgtgtcaagaacatcatcaaccttaaacaaatgaaaccattgacgcaattaaaccaaaagaacacaaataaacaagataagatccttggaaaaaataaagaaataaacaagatatgataataggtatatcataaacatacaaacatgaaaatttaaattatagaacataactgtttatgcagagtctgtcgatacacaggttcaaacaattggaaggggaaaagcaaccaacaaataatcaattgatgcagatttctatgagtatggtcactgatacacattggtgccaaataataataataataatgaattatttgagatgtatttaaacatttctacacctttagacatcagttaagaaaaggacacaaaagagtgaaaattttgagagtttgattcaaactttaagaaactgaaaagagatttgatactgtttcccatactaaattagaatccaagagtgcatctaagacaattctagagaaaacgatattactaaagacagtgataagttaatacttcaaacataatttgtagaaaatatattgaaatttatgtgtttacttacaatagactgaagaacaagaagctatgaaaatcggttatggaattcttgaataagagattctaattcactaggccttctctttaatcacattcccagtatcctattcaggataaagctatgcataatttatttaccaatataccctgataaaaataaaaaggggaaaatctcaacacaatatatcacgtctataaaatgtaaactcattaaagttagaacaagtgattatcaaataaagttttttgaaagccattgcctctattaaattagcaaataatgtttagcagacaaaaattagttttgatgtagaaaattaacaaattgtttccgaagtttttgaaaaacaagcaatagtttcttcctccattttcttaaacaaatctaaatagccataaatatgcataactacttacattccaacaaacatgtgcatacatttaaacaatgatgatatagacacatgcataaacacacacaaagaaagcatatttagatacaatggctatacatacacataacgacataaactttagtaataataaatttcactaaaaacttggtgcatttgtaatttatagactatgttttggactatgagtatgctagcaattatatttgtgatgaatcagcttcttagccccacagctgttggtttaaccattgggcaatggtatcaaccctcaataactattaccaatcatacttaaatcagtaatcaatttctttaacaaaaaacaaaagccagcatgaaccattggcactctagtcaccaaattacagtctacataatctttgtctccaaaagacaagacctttgacagatctaacaaggtctatatgatgtcagttttccattttcctcatgattaaaaatccaataaatactaagagcagatccacagaatacataaacttcacattaaaaacttgccaaagaatggatcatattactaagcagatccacaaaataataaacttcacagtaaaaacatgtcaaggaacaagtcagattacttccagcagaaaagattgaaatgcacacacaactacatcatggcatagatatatatcattctagaaagaaagacaaaagcttataattgcataattttctaggagtatgatcataccaagaaattaatattaacaaatccatcacgctgagcaagccttcgagcaaggtcaattgctccatcactatagtcagttcctgttagatccgaaaacctgaaccaaaccagcagttttacttaaaatgaggtagttacaaatatcttgaaaccaaagggaagcttataccacaagagaattttgttctgaaaatactaaagccataaactctgaaaacatgaaatgagtggagagaaactagcattttcctacacatagtaatacaatgtgatagtgttccattgcatccaaaagagatggagggaaaaaagaagagctcattcatttttaatgctataaatcatctttcaataattgggttgaatcattttaccattctgaattagaataaagaggaatctcaagtaaatatcatggaataaagttcatacatctcaattagaaaagaattaatagaaaaataaagaaccagaattgatagatatatttcttgaaataaacaaaagacgaaacataaatcatggatcaactaagccctctcggacacttttctaagaa

SEQ ID NO: 295352 - DNA, 1697 bp, Cannabis indica
aaaaattaggttgtgactaaaaaattatcactaaaagtagcagttttttgtagtgatataatatattataataatgtgttattatatattataataacacttatgcctttcagtaattctcagtatattaaggtgtgtctattgtcttatttgtcttattgtatcactactagtataattaagtattaaattctatataatttaatataataatttttatagaatattgataactaatcgcaaaatgctatctctaaataatgttagtcactactagtagagtcggtccaaacattgagcagcttggattgcaaggcgcctagttaccaagccgtttttcttaatgaaagacaagtttaaggcccatcctgatattattagtgtctaatagcaatactcatcttataatctaagtaagtcttgtaatgcatcgatctctacaaagtaatatatagcttatgtattttttgaaaagagaattgttaaaagatattattagtatctaacactttattgggtgtcatattactattagtgtaattaaatagtagatctcacataatttaaaatattactaaccaatcgtacggtattattggtgcctaataacaatactttttgaaaaatacacaaaataataatatatagttgatgtatatatataaatataaataatggaaaagatgatgggttattgagaagaagagaagagaatgaagatgagtcagtaggcgtgcggttatgcgcgtgatcctataactcaacccctaacctctttgttttttataatgtaaattaacaacaaagattcaatgatgatgagtagtgtttttctatattatatattttttgttttactcattggattaattgattattattataagtagtgcttgagttgagaagtccaataatgttttaaaatttcaagtaaggtgggtataaatacaaattagaatagaacaagtgtgttttcatggctcaagtttcatcaactagctactatactactactgcatgctctcattttgttctgaccaatttctaaccacaatgacaccatgtggctctttcccatgccatttttaatattcaacaaaattatttattattattattgttatttaaaaaaattgttaaagaaaattttaaaggtacaacactaacatttcccaaaggatatctgtccttgtgttactctcgcccaaatgtgtttaactaatggaatccggtacattagtattgatattattacactcaaaatgtattgtgcgatataatcatttacatcgaacctctcttttcactcaagttaaataaaaaaattatcaattacaaaaataatcacccaataatgaatcagaataaatatcaatccaatatatcattaaacacctacaacatttaattataatttgtacattatggtgctgtcccataattattattatgtattaaaatgtacattttaatttatttgatatatatataatttacatggataagtctaatcaatgaacctcttaaaagagtgttttgataaattagttatctgtttcagtatttatgaaaaaaaatttaatttaattttttcatgatcacataagttgtatctatttaggaccatatgtaaatttttcaaaaaaaatctaaataattaacaatgtacaaaaataaaatttatatattttgttgca

SEQ ID NO: 295353 - DNA, 1198 bp, Cannabis indica
agggcacaaaacccaacagtcaattggtgaaagtacctcttgttcttatcaccgagcttaagccaattaatttgagagcattactcccaatacacttcttctttataaaggagtcgatcaaggtccacttgaagtaggggacaaagaagaagatgagaatcagtgggttgaggttgattctaagcatcttgaagctaagcttggacttttttaatttggtgtggaagaggaggacctagagatatcttccactcaaaaaggatgagaacacaatgttgaagcttgttgctgagatcaggggtcaatgctttacgaaggcattcctcaaaacaattgtgaggtaaccaacttttaactaagtggaattgtggcttatgaggctgcatacaatcctcaacatgttgaagggataatatttatgctagatgatcagatccaaagaagtctccatagaggaggtgcaccgtggggaaagaaaagtcccacatgatatttgagaggccccagtcaaatctttcttgtatgtggatgcgatgtgaatgtttgttagtcttgctgtagggactgccatggccatgaatggggtggagaatgaaagtatctaaaaatttctgaaaaaaggatcaaaggttttttatgaatgtttccccacctttgttagtaggtgagagaaaatcatgaaattttcccattaaaagcaatggtaaattctgaatagtgtcgccaaggcggtgtacgagttgccacctgttatggaaaaagtacctgaaaggtagtccataaatgtctctaattgggtagatatgaacaaattaattttgagtggtctgaaatctcacgatcatcatatattgattaaacatattatactagtgagtatccattctgtgttgccaaagaaggttagatatgcaattacgagattgtgtttgttcttcaaatctctttgtggtaaagtggttgctgtaaagtggtaaattatagaagttttgtgttacttggaataatttttcccgccttcctttttcgacataatggttcccctaacagtgaatttagtgagagaattaaagttatgtggacctgtgtacatgagatggatcatgtacccattcgaacaatacatgaaaatcttgaagggttatgtcagaaatagaagtaggcctgagggttgtattgttgaatcatatatcgttga

SEQ ID NO: 295354 - DNA, 2483 bp, Cannabis indica
ttcaatatataaacggattgataatgaattcaatcttcgtgtaaatcaaatgacacttgctttgtatataaaggagtgatccaacgtgaaatgaaaacaagatagaaatccttgcaacagtggactaagtagagtgtgatctgactacaccactatactctcttgtgtttctttatatttccagtttctattcagtattttgtgtccttagtttgaatactcgcctctcgaagttgagtactcgcatatattctccttatattattactattacttattttggtgttgttaaagttccatcaacaacaaatatttacattttataccaatgccatttgaaaaattattccaatcattaaattaaccttctaaaattcttgtaaggtatgacctattagtttgtaactaccttatatgacaccctacgagattttagggttaattgtaccttataggagtcctagtatacaagaaacaaaacaaaagagatgtttttcttttaataaaaatagaaatgtagtttttttttctctgaaaggaaatagaaatgtagtaagtgaaggtaaaatgatagtagatattttattagagcattgttattgggtacgtgattagcatctctagatataccgttttacgattggttagtaatagttagatcaatagtaacacttaagagttgtgacttttaacatttctctattttattactatatgactatatactttgaatatagtgggacccgcattcaaaaaaaaattcacattgttcattccaagaaagttgaaaaaaaatcaaaatatgagaatgacaactacacaacgaccatccaagaaaaatgtaataatttcaaaacacggaaggtgtacatgtgtaagggcagtcaaagcatctaatgaagcttcccaaaattgttcggtctttcccccttccattccttgctcaccaagaatataagcaaactaactataattaatcagcagcaccatataaatacacatcaaaattcacaaaacacaatactttctaataaatccacttttaatatactgtagctagtctttcaaattaatattcacaatctaggttggttaagcaatatggctcttttgtcacgcttcttaagctgttttcaagtttcttcctctagagcagtctcggatatcgtcgtggaaaatttcaagcagaaattaggggaagggaagagtattaataagtcggccaatattaaggcatctaaatcaccattggtagtgtcctacttcccagtcaattcatatctttctcgcttatagaatccactacgggaagagcgagctggctttctttgtcgtacgagcgtcgttatatacctatgtgattgcaagttcctcttcaagccactactataaaattagttatttttccaattcattgcattttttaatcgatgatcatcattttatcttgtactttaattaattgttttgtaatattcgtgtataattcctgtccatcacacaagtgaacaatttctataagactttcctggatcctgatccttaatttgtcaaaaattcatgtccattttcttgtccaatgtggtaacctcaaccctttagggtatgttctataaacttatcctattggtttttctttttaatcataaaaaagatgaaatattactattaaactataaattcaaagctatgaacaaggtgaaatataagtaaaaaaatataaaaagcactacaagacaaaatatatttttaaaaaataaaaatataaagtagaacttaaaaataaaaaccataaaagggattaaaaatcattactacaaaaccactactctcgtgggtccacaaaacatttttcttcggggaccgtggctaataaaattaaatgagtgttttaaattgtcaggaaaaagtgggtactcaactaaaaaaggcttaatttgcgtaggtcaccgcgtctcaccaaaatggactactaaaaaactctaaatttttgttagttttacattgtcgggtaaggaattctcgacaatccataaaatcgtcgtctatacaaacgtcgcgaacactgggtagaatagaccacaattgaaaacagttgggaaaatagtatgcttatagtgagcactataggcgacaatttaaaactttggcctatatatagtataggctacggtttaaaactgtggcctatactataagccaggattttaaactgttacctatagttttattggtacgattttaaaacatcgcttatagtaaagttttcagtttaattataaatttcttattttttagcgacagtttttgcaagtcattttgttgcaaaacaaaaagggaaaaaataattttttttgctatttctctgttccatgaattaattgttattaattatataatgtcagtaattagttagggtaaagtataaacataaattgaaaatgaacaaaaactgaaatatatacaaactacgtactctaact

SEQ ID NO: 295355 - DNA, 6368 bp, Cannabis indica
gaaatgtcccaaatggaggttaaaggggagacagacagtggaggtatctgtttgggccggtggcactttcgctcacaacggatcacagacggcttttcggaccggtggcactttgggtttacaacggatcacaagttgctctgataccatgttagaatttgggaataagatgaatgaggttctatctcaaaactaattagcaatgggaggagtagcccattcatcttatatatcacaatttatttccacacattactaatgtgagactaactcttaataaaaagggatgtgatttcaaagtttgggtttcatacgagaaaaaggatacgattttggggttcgatgatttcttggttcgagtttatgacaagaggggagcaattttttagagttatcagagtttgagattcatatatatatatatccattaggaatggaaaagatggattaatatttaaattaatttggggcttttttatttggggtaagttgaaaaatgcctcttttatcaatcaattaactaaatttacctcaaattttatttaattgaaatatacctcatcttatatgtattgtacccaaaataccctgacataagggagtcacatagagagtatcttgaagtaacaggggcaaaattggtacaatttttaaaaaaagaggtaaaaatgatagaatttaaaaaagagggtaaaaataaaagaagacaatataaatagggtatagagtctaatttcctttttttatttttacactttaaaacagttttttgttagtatttttacggaattctacatagaaactcctattgcaactagcgctgcaacctaaattgcaataaaaaatcgtatagaaatttctattgcaactagcgctgcaaccactttagaaactcaaaccgtatttttttaaaaaaaaaagttacaaaaatagtatatggggtaattccccaatttttttttttttcatataaggaatttcctcttatagttcaataggaattgattttagttattattagtagaagcttttaactattatgaatatttaaaataatttaagtaaatgaaatgtcatataaaaggaaataagtgtcttataaagaaataatttaatatttaattggttgaaaaaaaaaatatagcataaaagtgtataaaatacttatatagcaaatttatttattttttatttttttttaatatagtaaatttacttgtatattgtagtgaaaattgccaataatgataatggattagtaatttaacaaggaaccccacacaaccgaataagagttcaagggtgaaaaatgaaaaattcgtacaacctaatccccattgttcttctctatcccattggtcaattctagcaactagacaaaacaaaacctccacgaaaataaaaaatataaaaaataaataaataagaaaatcaatccactagaaataaaaatattccttagattccgtcacccacgggtgacgcaattgttactcgtagactttgcaccatgaacaactaatcaaccatcgtcttcctcacttgtcccacctttcccccatttctacgctcttactttctctctctaactctttatcctttctctttcatcacttccaatcgagccaccatagatgtacacctccaactcatcttcatcatctcagaagccaaccggacagccgccaaccggtcttacccggtacggttctgctccaggttccctactagccacggcgatggactccgttattggacccgaccgcgagttcaacacgctcagatcgccactcggcggacacgacttctcgggcgactcctcctccattacctccgattccagctgcaaagtcaactcctctttgcatagatcgcatggactcaacgagatagcggccaggattggatcctcttcttcgtcgtcttcctcttcagcttcagtttcagcttcggcttctccttcttcgtctttggtacgccagaggagctcccctgctggcttcttcagccatctcagtaacgttgttactgataaaaatggtatattagatattttcctttctttttttttttataaatagatatttttcatttttgttttgttttgtgccttttttacttacaattttgtgatttttgggtctaaaatgactattttatccctgtcgaatgagaggccattctgaagtatgaacttcaactgccacgtgggcagttgagcacctctttaggagaaaaaaaaaaatgaaaaaagaggaagagtagagtccttctcatatttactgcttaattgcaataaaaatttcaatatttatatacaaaaatggaaacttgtatggagagtggaagaattcagaaacgttttaacattatcataaggctcccaaacaatttttgttacgaaaactgtttaaaatttatttgaactattttttatttctcaaattttgttacatgttccataaaagctaaagaagatttttatttataattgttaattgtgttcaacattaaagcttcaaaggttgtataacataaaatttaaataaaatataaattaaaatgaataaatagatttttgtgaagtgggatatattctacatcaaaaccattgatattaattgtagttcaagtaaggatgtaattatagactttccttcgacgtaactaggcaattacagtaactcacgtttggtgagaatgtgaactgtaggtttttctgtgacaaggggaagtggaggttatgggtctcaacaaggtggcaccaattgtggacctggagtatcaaggctgaagtctcagttgagcttcaccagacaagattgtctttctcaaatttctgaagtaagtgaaaatgtgattgatggtatgagctctgaaaatggtcaccataatgcaagtcattcttttgccactagctttggaatggactcctgggataataataccaattcaattgttttctccgctcctcaaagcaaacgagctaagaatatggatggagacttgtataactgtctcaatgttctggatacccaggtacttcaattttcacttgtttaaagtttttattttatttactgatcaaatgaaccttctattcatggtcacacgtttcctggtaacttaatctcaatagtgcattatctgcatcaccaaactgaatatggtaaacaaatcaacttgtacgacttagtaatagaacagttcataattcttaaggttgaattgttataagggcttctggttcagtatatgtggataacttgcaagcacttgtatctggactttacagtgattttaaaaactgatacaagagaatagttcttattccgtttatgaaattgattaataaattgaaagttcagttaatcttaccagatgtggctaatcaaagttggcttgtatcgtatatatgtgttttactagaattctgagacttaccactctttacagatgttaagtgaaacatatcaacattatacgtataatgatgttatcagatttccacctttttgaggggttgacttttggaaattttgtaaacatatatttccctttagatcacttctaatattcacttgaagctcaagataagtagataaactttagttatattttttattcgttgtctgtttcagtttagccttccacagacgactctagaaatggcagccgtggagaaattacttcacatcccagaagattctgtcccttgcaaaatccgtgcgaagcgaggctgtgcaactcatccacgaagcattgccgaaagggttagtatatttttaactaataattggattgcccttttctattctagtttacaagttttctttctatctctttctcacacgcaataggcatttttttcttctgaatcctccactttagagaaattcattctgtatagaaggccacatattttaatagtcttcttagtatgtggcatctcatgaggactagtttttcattcttccctttatgtgtttattcttggtttgtatctttaacgaccaagttaattgtttgatagtataattgtggtcacaaatactaagtccttttctcttttagaagagtaggaattcattaatgtgactttttccaatctaggtacatatatcctataatattgtactgactccagatacctcatatacaggagaggagaactagaataagtgggaaactgaagaaacttcaggatcttgttccaaacatggataaggtatccgtttcgtacttctgaaactcttacttcatgtaacatgatttttttctgttaaaaaactgtttgatttttcaaagttacgttttcaccccatcagtaatgaaatccaatgttatctttaaaacatattgaaatctattattcgtgtttaagaaaaaaaaaatcatttattactcactgcatgtgcacaatttcacgaaacaactactgaaggcttaaacatctgagattagtaaggctatgtcagaagtttagttcatcagagggacatctagtttttgtatttttagataagtggggcactgtagcataccttgtctgagaatttattttgtttgcttctcatgagagtttgcaatatgatgatgcttcattgtctctaaggcacttggttgtatttcatcaaaagaagatatagctgtccctcatgaaaatttctgtataaaataacgttaattgcctattacctttgttcaaagaattacattattagttagtcgcacttgtatggacatcattgtagggaaaaaaattgtgtggtttttttttcaaaaagaaaatactaattattcaaacaatcatcgtacacatatgtaatttcatcaaataattgataataagagggtagtttctgcatttgaagctagaatagtctttttttctttctgaaaaagagaaagaggccacatatcttagactggttcctcctcgttatatattgaagctagaatagtcttgcctccaatagagtacatgaaagtaaatatcatgtcactggtggaaggttccattgacgcatacattgtaaacagaaacagaaccattaatgttttagttaacctagattgaagtgtgagcttgtatcatggaaactgattatgtaactagtaccaatgaatctgactctttttcttttgcattgttgttacagcaaacaagctatgcagacatgttggacttggccgttcaacatatcaagggtcttcaaaaccaagtcaaggtttgtgacaattttataaagataaatgcatagaggagtgtttttatttattaaatataaattcccttgagaacgtctagataaaatgatcatgaacttttgatagcttcacttgactttggtgttattaataagaaattaagaatgcaagaaatgacctgaattagtatcattgtaggcaatcacagttaatgatgggcattttcttgcagtatctctatttaagatgatcgtatgatagcttacgattgaaacaatgagcaaatgctttatctcacctttccacttagttaaggatatcaaactaaggagagcttgtattttgtgtattattaatgttgcttgtagcattggaggattgaaatattagatctttttaataattgattatcgttaatttattggatatcttgtttaagccattttgtggccttgatgtctattttctttttatatatataatattacagaagctccatactgaacttgagaattgcacctgtggttgtaaacaaaatacatgagaggctcctctaacgacactgcagtagacaactaaacggacctcagagctttagggtttgagaagtttgggattgatcaaaatgggactaattttgtacctttacaaaagttagacttgatagaactagtaggtggaggaacattgtctcaaaatgttcattgaggaaagtttctttcatattttgtagtgatttgaatttgctgaggttcttgcaataaacaatgtatatatgatggtttaaccgtcatctcttagttcatgaatgattggaaattgtttctttcttccttggaaggaattgtaacaaaaatagaacaaagaaaatacagtgaactgtgaatttttggtctttgtatctataagctttgatccttttacttatctagatagagttaaatagaaactgtgcaatattaaggcaaaatttattgtggccagtaacccatctaatgaaccattcgttgtgcggaaatggaaaatatcgatctatttttatattgcccattttattagtttccaactgaattttgaaaactaaatattacctagtaatgttaacctgaaataaaaatctcttgtttggtacgaggtgttcaaaataatttgattat

SEQ ID NO: 295356 - DNA, 894 bp, Cannabis indica
ctagcttctgtgtggatgatctttggtgagactgtgtatattatgactggctgacgtggcggctgctgatgatgagctgcgacgggcggttgcgacggttgtgggaccaccggaggctttttgatcttgtgtgaacccttgttaatctttagaggtgttggacgtggcccttggagttcttttctcggtgactttcccggctgattgttgtagtccgatggttccgccatctcgttgatatgatgacgtggcggcggtgatcggtgaagatgttagctagaaaaggaagagaattagaagagactttggttgttgataattgtaataataatgaaggcattgtttattttagagagacctttagggattattatatataatgtatatttatatttaaagagagatcaagtcaatgaaatgaaataagattattttaatatatttggcataagaaaaaaaaggtaaaatgatatatattgttttggctagttgttgaagtaaacatatgtataaataaatttttagtaattaattgaaagtgtagtttgttgtttataaatttaagggccggtttctttgtgaaatgggtgtttgaaaatgtcaatatatattagacgttaatccagagaaattgtataataataatagatgaaagttggaaggggtcgggtgccacgtcagagcataacatgctgacgtaggattacaggtcagcgttagcaaacgattaaagtaataaatgaatgaatatatataatgaactgatgatgagttaattaattgtgttgggttttcatgaaggtgagatatatatgagagcagacccaagttgacttttgttgtagacttgttgtagctactaataaataataataataagggaaatgttaatac

SEQ ID NO: 295357 - DNA, 5891 bp, Cannabis indica
aatataactctctcaatttcctatgtttttccactttctttctctttccaccggactctgtcagcttctaacgccatgaacgccatcgctacagctgcagctctctctttgccaatatccctttgtagatcatctaagcttaaatacaggaaggtatgtaaagttttcatttttctttttggttcttttgattatctgtgtcattgctatgttttgtgatatcagttgtcaaatgtagtttacactaaagaacgctcaagtctagccctttagctgggttttagtgtggttatgattgatcactgtgattatatttacatggggttacttgttgtcaatgttatggtatttcagggtgtaaaagcaaggtttagggtgtttgctgtactggaggaggaagcatgggtggagaagaagagtggttggggtcctcttttcgatgtggaggatccaagagccaagtttcctcagagcaaaggcaagttcttagatgtaaatcaggcacttgaagtggctagatttgatattcagtactgtgattggcgagctcggcaagatgttctgacaatcatgctccttcatgagaaggtttggaatgaacaaacctcattcattaatgttattcaattttgaagttgtgttttattgttattaaatgtagtttaacctgtgtaggtcgtggaagttttgaatcctttagctcgtgattacaagtctattggtaccatgaagaaggagctagctgaattgcaagatgaactatcacaagctcatacacaggtgatgctcaatacacatgtaaatagtaattaagttaacttttttcactaacttggaaccatgttaaaaagtctttcatgtgaacaattaacaacaggtacatatatctgaagcaagggttgccactgcttttgataaactagcttacatggaagagttggtgaatgataagctattacaagatgggaaaacaaccactaagatacctgagccaacaacccattcaccaagttcttactcagagtcttcagttgatgtgaagagaagtcctagaaaaagcttgaatgtttcaggtcctgttcaaccttaccattctaacatgaagaacttctggtacccagttgccttttccactgaccttaaggatgacacgatggtatgctcccagaaagaacacatgtatttcatttggtagaagaatgtgaaacacaatatatggttggcttgcttcccttacaaaatcctgatttcctttctatttcagattcccattgactgttttgaagaaccatgggtagtctttcgcggagaagatggaaaactcggatgtgtccagaacacctgcgcacacagagcgtgccctcttcaccttggttctgtaaatgagggtcgtatccaatgtccataccatggtgagtaaatatttggtggtacatatagatagatggaaagtagtagtaataattcttattggattcactaacaattctagcattttcttatccaaaaaaatcaggttgggagtactcaacagatggtgagtgcaagaaaatgccatctacaagattactaaaagtgaaaatcaagtctttgccttgttttgagaaagaagggatgatctgggtttggccaggcagtgatcctccctctcccaatctcccttccttaaaacctcctccaggatttcaagtccatgcagaggtatacctcaaagacatttctgtgctttgagatgcaacaatcttctctaacatatttcttttgttgtaatgtatttccctcaaaacagatagtcatggaacttccggttgaacatgggctacttttagataaccttttggatcttgctcatgctcctttcactcacacatccacctttgcaaaaggatggactgtccccaggtttgttttatctatgcagttcatcatggtaacatgacaagttagatgaatctaaactttcttcgtttgctattgttctaaaatcctcagcttggtgaaattcttgacacctgcatctggcttgcaaggatactgggatccgtatccaatagatatggagttttagacctccttgtatggtactctcaactattggaatctctaagcctggcaagctagaaggacagaatacacaacaatgcgccacacaccttcaccaacttcatgtctgcttaccttcatcaagagagaagacaagactgctataccgaatgtcgctagattttgcaccattgcttaaacatgttccttttatcgaccgtctatggaagcatttcgctgaacaggtaaacatactcatccatcatcaatcacatcacagctgacacaacaaggcaaatgtttactttttgttgtataacttgacaggttttgaatgaggatctgaggcttgtacttggacaacaagagagaatgatcaatggagcaaatgtatggaattggccagtttcatatgacaaactaggagttagatatagggtatggagagatgcagtggaaagaggagccaagcagatacctttcagtgaatccatagtaaaaaaaaaaaaaaagaaaagttaaaaatgaaactctcaacttacatagatcaaataacttcttatgttttctcctgatgaccattctgtgcatgaataacttttcaacgtctcttccaccagaaccttgcatacataagaagaagatcgaccgagacgatgtcatgcagtttggaactcatcgaatgaatcccacttcccagtttaactcggcggaactgtgaattaaatctgaggcacaaaatcatattgtctcaataatcaaatgtcctatgtaagcattatagaaactgtgcactaatatttgatcccgtgtacagtaccatacagtacagtgttaattccaattgttttttctccattcttctttcacgtttccatgttacaatgaagaatattttccagtttcacagacgcagattgatcacccccttcttgtaaaatggaaaagcttgatttacaacatatatgagtaaagtaatagtaaagggtgagaatgcctctcttttatgtcactctcaaaataatttgagcattgttattgggcactattggtgcccaatactttctataagtagtgttttacgatgatattctcatagaattataccgaggagggtgctaaacaacagtggtaccttttagcgtttcttaaatagtttaggctaatggattttgtgagcgaatttacacttatatatgtgtttatatattaatattaaatgttttttttatacttcaaaatagtttttttttttgcatttttatagaaatctacatagaaacccttattgtaattagcgatgcaacttaaattgtaacaaaaaatcgtatagaaacccctattgcaactagcgctgcaaccatcttaaaaattcaaaccgtaaatttaggaaaaaaaaaaaaagttaaaaagaccgtatatgggataattttcctaatattaaaaacaataaacttaaattaattttagaaatttaacataatagttttccataatatttttattttaaaaataacgtgttgatttaaatataaatgtacatttttattccttacaaaaaaaatgtatttttatttatttttaccttaataatatttatatttttgttttaatcttttctacatttatatttgttgacaacgaatttggctaaggctagcaatacgagtcaccaaatgatgacgcctcaaaaacgacacataacaaatgattttgggttgccgtgttcgtatttaaattttgaacaagtttaataatcgtgttgatacgtttaataattatgtcaatacaatataacacaaattaattgccaaaggttttgtaattctttcttctaaaaaaaaaataaaaaattcatgtttatcttgataattgtattgtcgtgctatatcgtgtgacctgctaattaaacgtgtcatgtttgtatttaaatttacgacacacattaaccatttcgtcttataaatgtctcaacataaacacgacaataagtagacgtcaataagacaataataaacaagagttgaacttaaaaatgtaaataacacgaagattaaagtggtttgaccgtattactggtaataacctactcaatttgatattttttattatctgatgacttatatctaagaacagataaatctcatgagctaattaagtttctcaaatacaaacttgagaaggagagggaatatgatagccctctatttgtacatagtaacatatataacaaaaaaaaacatcaatcaatatataaacagtttatacacactcaagatcacagaatttaattaataaatcagataatcatgcaaagtatgtatatgcccatatacataaatatacaaatacatacacaccttagagtttctatagtatttttttataattatttgtatagtatttttttataattatttgtgaagagaagaataataaataaagaataaaagatatgcagagaaattaggatttcattcaattgtaagttaaaaaaaactgaaagaatacaactaataagaaagtcttgtatagtctactaacataaaagactaaaataaaagaaaagactaaaataaccctaaataactattcaacaccctccctcaaactcacaatgcagctgtaagaagcatcgagagtttgctaaaagaaaacgaaaacaagaaatcgtatgcgacttagtaaaaaagtcagcaaattgcagtgaagaaagaacaaaaggcaaaataatggtgcccaacttcagatggtgatgagtaaaatgacaattaatctcaatatgctcggtgcgttcatgaaaaaccgagttgtgagcaatctgaattgcactttgattgtcacaatacataggcgtaggaaaagagtgagtaacacccatatctgcaagtaaccatctcaactaaacaatctctttagtagtagatgccatgccacgatactcagcttccgtagaagattgaaaaacaacatactgcttcttgctcttccaagaaataagggaatctcccaaaaagatacagaaaccaatgatagattttcagtctgtaggatcacgaccatgatctacatcatagtaagctcgtaactccatagaggaggtggaaggcaacagtaggctctgaaagatggtaccccaaagttaccgtagcgtgatccgaatttttggcagtggacacatggaatttaagttaacatccaaggcccattagttggtcccccaaagaagataaagtgggccaagcccatttggacaagtccttccacgaacgtaccccagatccgtaaccatagagcctttaaccattgacaactcaagcctagaagcaagtccagtaccgtgaggcccgaagggtgagacagcgtgttttcagaaaactagtccagtttttctttttattcctgcacgtaataaggaaacaatagctgccagatctcgatagaggaccgcatcatgctaaatggaaaaacttaaccacatatcaagcaattaatttacagttaattgcccacaatcaaagtacacggtgttaaccaaatcaaataaaattcgatctacctagtcaacaaattctctacttcgtgggctggactttacgaagcagcccaagtgtgttattcactgtaagctccccaatagagagaaaagggaaactaaatgtaattctcaaactactataagtacccctcaaatcctatggattaagggttgaattctcttgcaaaacttgctcaggtaaacttgagaacatatactcattgtattcctaaaggtttttcaagccaaagaactactgaataacactaactcgtggactaaggctatttaacgccccaaccacgtaaaa

SEQ ID NO: 295358 - DNA, 2482 bp, Cannabis indica
tttttaaagttttgagagaagagagataaataaaaaaaaaaaagaaagagagaaaggagggagagaaaaaaaagtatagataagggtattgaaacatacccaaataaaaaaatattatttatacttaatcaagttatttttgacaattagataaaagtaaagtgtgaagtgcaaaattctcttaaaaatcattctaaaaaggtatttggttaaaaaaaataaaatgtttttttttttaattcgaaagttcttttaggagaagttaatccaaaagtacttttgagaactattttttaaatttaaataatatacgaaaatttctatttgttatccatgtttttacattaatgacacgattacttctagtgcccaaagttagccaagacatgttcattcctggcccaattaagttaatgaatcatcccacaacaaaaccaagctatggtttcggatccagatgcaagctcaacttacaggcatgataaagccagaccactttggtccgggaaaggatgtcttgcccagaagatcaaaggtccatcaggacatattcagataccctcacagggtaatcgaaaaaagggcgaataaagaggcacccagagacattcagaaagcatcctatgtgtcatccctttgacataggacccaaccaaatcaggaaccttgtcccctatgttagaccaaaagagtaagtgcaccatcaaaaggaaatcacctttttgtccaacaccgtattctctgacactcattgtaccaacatagcaacacacaacacctgtcatgaccaaacggccccacatgtacggttgaccgctatctcataaattaggtcttacctaaccaacccaaagctattatgaattatattttaccccaccagtgggcctagttgacacctttaaagacccatacctgactcaagcctataactagaacattatcccttcatgcaaagggttagaaaattatttctaaaatcatgggctaaagattagggttcttaaactttggcaagaacactgttgtgtaataatacttcaaagcttttccagctcaataatattgactcgtagaataaggctcattaatatcccatttacgtaaaaacccttatttctctatctttaatttacgctactttaaacacaagactaagcaccgaattgaaatcctaaggcttaagccgtcagaactggagcctcaaggtgtccagaaataaattcacttagtaagaaattcatctaaagtcacaacacttaaggaatttaaaccaagagcaattatgtgaaagtaatcaaaagaaataaagagagcaaaagaaattaattacagcataaggccctacggttagggtataaaccattgtctctacaacatcaaaaagggaaccttaagtcccccaatgttaaaataacaaaagggaaagaaaaaagataaacgtatcagttggattaaagcagggcacttgtatcggtgttgacaaaagctaaaattggttcttgggttggaatatcagtagatggttcttggaccagaagctcaaaagttggtacctctatcgagagtattgcttttggtccctcagtagggggtcaagagatggctcttcagccaaagggtcagtttccaactcaaaagaatactcttctgcctccttagccttggctttaagctttgcttgttccgaggaaagaagttaggtgcgcctgtcttcctcctcgtcactaaacgctttcaaagaaatatccttatctctctgccagacagtgtagagagcagtaaaaaaggcacctctcaagtcttcgagccttctttcatcagcctttacttactcttccttgccttccgccaacttagttttggtctcttccagatcttgcttcaatccatctttcaccttcatggaggtgtctcgagagtcggtcattaggtgaaggtcttgttccagggtatggacttggccatgcttgttctcgagctccttgttaagatccatcactcgatccccgacatgctttagcttactctttgccaccttcagcttctgttatatcacactttttactcttctccaaggctatgattcaactagttgcatgtccataattgtctatgaggtcctgattctttttggccagcttagagtaggcatcattcatctcctccctacgggtgcaacaactgattgaatgcttctctcaagctgttctttgacatgttagtctacaaccatttgaaattgtgcctacatattttagtttttgatcacaatattggttgtatatgttttaaacagcactagctcgaatttggccttcactactacaaaaacaccctttagaggcggtttttaagccctttaggcgtcggttttcgcgaaattcgctaccgacgcctatcagggcgacgctaaagggtttatttgaaccgacgccatatatacccctatggcgtcggttattagtctaggtaaccgacg

SEQ ID NO: 295359 - DNA, 6780 bp, Cannabis indica
gtaggagacctcgccctcaagtttagaagccttggaagtatcaaaaacaaaatctgagagctcagagtaagtacccaacgcctaagttgacaaaaggtctggtgtgctaggttctgattatccgaatctgatgtcgttttgaccgtccatctagtttttcacaatgacaataatctatgaagttaaagaaatcaaattcacaactttgcatttttcatttctagctcacccagaaatgtagagtttcgagtctcccatttttgcaaaacagcaacatctttgagaaccggtgaccagcttatagtacatctcttggacggttttacacttatccaatgtgcaggttgacgtcatatgtcaacctgggcgctgggatgtcaatttcggcgttgggtcatgaactattttcagtaaaacaaccataactcactcaattttgatccgattgatgcgattcaacttctgtttggaagctaattcaatgatctatcaactcatatctcacactccagatgtaattctaaagttatcatcatcaaaatttaccctaagatatttttgaaaacaagctacgagtaacctacagtgggacacgtcaggctctgaaaaatgaccatcactaccaagagctaatttttactgttagaacatcatcaaaggagagctcctttagctcatttttcacattcaaaaaatacccataaggtcagagcttctctctagactgtctctctctagagtttagagcttttgacacttagtctattgctataattaccatctcgtaagaaataaaaactcaaagtagacgtagctccattactatcgcgatatagagggtgaactaatataaatttattgtgtctctcgtataaatatttaactacttattcattctcgtcaatctggcgagcgagtgtggcttagaagtctagtccagattataattcaacaaatgttaccttcgatgaatcttccatgctaagtaagataactcagaaggcagatgaaactttgaagcagatggagtaacctccaaaacatgcaggtttaaaaatagagtaattgatatagtcgatgataatgaagatgatcactcgtttacagaagaagaattagatgaagaggtttctaccaaagagcatgtacatcaacaagaaacaattgagaaacataggccacaatgactaaacatcaagatgtcggctcgatatagagatacagaatgattaccaacccaattaaaaaatatggtggcctatgcactttcaagtgaaaatgatgatggttttttatcttacagaagcaaccaaaagttctgaggcttacaaggggacagaaaatcatggatgaggatataaaatctcttcataagaatactatacattgagattagaaaatttactagaagataaaatgaaaattgtgtgaaaataggtttatgcaaacaaagaaagatttcttaataatgatggcattcgctaaaaggcaaaatttgtgccaaaggattgttctcaaaaggagagcattggctataataagctatttgctaccattttgaaatatttctccattataatattattggtattggtatcacaactagatttggagcttgtttaacttgatgtgaagattgtgtttctacatagtgatttagaagaaaaaactatgtgtctcaacttgagagatttgaagttactaataaagaaaattaggtgtgcaagctggccaaatcattttaaggattgaagcatccttcaagatagtggataagcattttgatcaatttatgttgcaacaagagtagattagaagatgtacattcaggtaacagctttaaaattcttcaggaggtggaaataagtagtgtcaagccttgagaaataccaggtgtttctagcaattaatatggattgttttaacatagctagttggaatgttaggggaataaacaagaaagaaaaacaagatgaagtggtggagttttgtaaaaagaataaaataggtgttgttgctttaatagaaaccaagttgaaggataataaaatcaaggagatgttggattccaagttagttgagtgggattatttctctagcccgcccatagaagggagattgctgatcatatggaggagaggcttcttcagagtgattgtaacagctgaaactcctcagttggtccattcttttgtcaagagttccggtcaagaaaaagctttttgtattactttcatttatggattcaacaccatagatgaaaggaaaagtctctggtctgatctcttaaacttaaaactggcagcgaagccatgggctcttcttagtgattttaacgctgttttcaacttggaagataggtctggagggaaccccattcattacaatgacttggctgattctaccaactggctggcacaagctcatttggaaaaaatttagtgttttggttctaattttacttggaccaacaatcaagaaggcagcctaaggatttattcaaaaatcgatcatgcttttattaatgaagagtggggggacactttttctaattccatagcccatttcaattaggaggtaatttccaatcattgctcttgtattattaaaatgaaggctgttgtgaatataggaataaaactgtttcgattctttaatttttggactgatcatcctgattataagcagttggttaatgataattggaagtcgtttggagcagcttctaatttggagagagtttatttgaatttgttgagactcaagcataaactcaagcagtttagtaacaatacttttggggacatgggcagaaattttcaaaaggataaggaggattatttggaggctaagaatttggctcaattgcatcctagagatgaaagttaccaggtgaaggagaagttggctgctggtgtttatagtaatcaagttaaaatgtacaacaactttttgaggcaaaggtgtaagatcaagtggattaataatggagatgataatacctttttttttcatgcttgcctaaaaaagaggaagctggataaccgtattattgactttacaaatgatcagggtgaatccattgattatttccctgatgttgttgatcatttcatcactcatttgaggaacataatgggttctccaggtagcagttcaggcagtataaacagtgagtgtttcaacgagggtaggctagacttgaatcaacaactcatgcttcttaagcctttttcctcaaaggaaattaagaaatcaatgtttagtattcatgaaagtaaagccccgggtttggatggatttgggtctggtttttttaaggcaagctggtctgaaattggagttgaattgtgtgctgcaattactgatttttttgaaacagggagaatgccatatgatcttcatgccacagccatatcgctcattcctaagaaggataatccatcaaggtcgtggactacaggccaatcgcttgttgctctacaatctataaatgtatctccaaactgctttgctcaagacttgccttagtgctgcctcaaataatcaatcagaatcagggtgcgtttgtccaagggaggagtatagctcataatgtaatgtaatgtaatgattcttcaagatcttttgaagaattataatagaaagaatacttcccctcgttgtgccataaagatagacataagtaaagcttatgatactgtgaattgggattttcttgaaaacctgctaaatgccttccacttccctcaaaagtttgttaagtgggtgatgatttgtgtcagatcaactcattactcaatcatgatgaatggtagggttcaagggagcttcaaaggagaaaaaggccttaggcaagggggtctgatctcccctctgttatttgtcttaatcatggagtacttgactaagaacctgctccaagctgcttagaattccaggttcagatttcaccctttgtgtaaaagtttaaaaataattaacctttgctttgctaacgatctaatgatttttagcaaagggacaagccactcaattcaggtgctaaaaacagttttggatgattttagtagctcctctgggttacacataaatttggagaaatctcagatatattttggtggcgttgattcaaaggtaaaagcctgcattatccaagagctcaagttgtctgaagggagctttcctctaaagtatttaggagtccctttaagaccaactaagtggaaagctgaagattgtgaagttataattaggaagatcagacaaagattgtttacttggtcaaccaggcatctctcttttgctggccgagttcaattgatccattcagtgctagggcttcgtaactattggatgagcatatttgtgcttcctcaaagtgtgactaaagaggttgagaaactgtgtagaggatttctttggggtttgtccggtaacaaaagcaaaatccatgtggcctcttgggagaaagtttgtctcccgaaagcctatggtggtctcgggttcaaagagggagctaaatggaactatgctagtttagcaaagtatgtttaggctctttcatctaaaagagatattctttgggttaaatggattaataacatatacttaaagaattcctctttctggacttatgagctgaaacaggatacaagttggtattggcgcaaactttgcaggttgaggcttaaattttctgaggtggacatccttgctgccgtgagagctgggaagttcaaagcaagtagactgtataacagtttactcaatcagcagcaggtgatgtatcatagagcagtttggaattccttaacgctgcctaagcatcggtttctcctttggcaggtagtgaaccaacatcttctagctagagacaatttgctaaagtttcatgtagtgttaacttcagcaaattgcccagtgtgtgatcaagttgaggaagggcataagcatcttttctttgaatgttctttctatagtcaagtgcttcagcaggttgtcctttggctggggaagagagcttgggctgtggattatactggctggactatatggttggctgctggtagtttgaattttgtgaaggagattgatgttgctgtcttggcagcaacttgttaccacctttggattaataggaacaagtgtatatttgagggatactctaatactgttgttgttgtggttaaagagataaaaaatgttatgttgtacgtatagatttcaatcaagcattcatagatagatgactagaggggaaagggtatacttgaatagagtgatattgtaagtggggggcttgcgtctgggagctttttttgttgtgctcatgtgtttgtatgtgcttgttgattaatgaagccaattccttcttgatcaaaaaaaaaagagtagattagaagtacacatgaccattgtgtgatatttttgcaagctacaagataactctttattttgttttgtatgtcgatgatatgctaataacatcgaagagtaaagaaatttattgagaagttaagaactaaattgaattaggagtctgagatgaaagattttagagaaatcaaaaagattccattgccatggagataagtatagaaaaaatgcaagttttattttacaaaaaatcaatatttgaaaagtactgcaatgttttggtataaatgaacaaacaaaacctgtaagaaaacctgtaagtactcctcttgctccttatttcaagctcagtgacaaaattctccaaaagtctgatgaagaacaagaatacatatcgaaagtttttgtatgctaatacaattggtagcttgatatatgcgatagtgtgtacatgacataatatctctcaggttgttggatctactcagagtgtaattcatttatctcataaccaagtctttcatgcaagaatgaagcatatagatgtcagctatcatttagtgaggagattattgaagaaggtaaaattctcattttgaagatcaaatagctgataatcctacctacgaatatgatgattatagttttgacaaaattaaagttcaaaattatcaatgttccacattaattgtaaatgaaaatttagctcatacttaggcctacatatatgacccctacaccatttttaatcatcccaaaagttgtatacctactctttttgtaaatggtggttgtttactcaattttgtctaagttgtagttatgaagttatagtgcaatgatcagcgacactcgaaaatataagtaatttttgtgtactaaatttcataaatttctcgtatttttattttttctatttatttgtaagttttgtttggttttattttctcttttagcatattctttcaatagtattgttttttcagactagtataattttctatccatattgtgaataagaacattttaaggaggaaaagtatatgaaaattttccaacaattacatatactttaccttttgcatcccataagtaatagatattttatgatttttaacattttatatatagcatgatataatactattaatttgtacaattaagcataagatcgataaattgaatatttgtgagaccaaagtagagactagggtctacttccctttttttttttcctaaaaagaaaaacatatatatgttataaatactaataattttgtggatgtccaaatcttttatttattaccatgaattgtaatcaacattcctcttttccttagtttccctttttcttagtttcttaatatctcactcttgtatttgtataaataggggttcacc

SEQ ID NO: 295360 - DNA, 2882 bp, Cannabis indica
aagaaattacgagagttgggagaagtcgagggggtgaatggagcgcattcggagctgttcattgttgcaggtatagtcgtagaagggggatagagcgaagtaatcgaagacaaggttgcgatccagcggatatgagttgagccatagttggtccctgaagcatattccggtcatgtctgttcccggtggaggtggcgctacaggtggaccaccttccatacccggcacccccactggtggcgctgccatttttgttactgagactattcctcgggtgcttgatcaaaataaattaaaatttactgaatgatttagggtttgttcgtactggaatcaagtactattttttcttttgttttgggcctctaatagcagtaaaaaattctagatgcacaacaaatgaacattttttcttttaaagaatggttgattagatagaaaagataatcacccaaactaattatagacaaaagtctacttataggccgaaaaattacaagtttttacagtattataaaataaacagccaacaaaaaaaaaaatctttcataaaatatggaatagttctcaatttttcaccttcccaacttagggtctatatcattgatagaattaatcattaccttaaaattactttccacaagataaacttgtagcctctatccttcgccacttccaaagctaaacaaatacgggtagcctcaccacaaagtacatatgaaatattcaattttgtcgtattcactcaaaccaccttactccggtctctagcaacaactacaatacacatgtgctccactcttactttaacgtcacaattcacttgagtcaatcttaaggaggaggggtccacacaatgcattaaatcagaggcggggaagggataagggaatctatataatctgcgtaagagtgaagaatagagtcaatacattgattcacattattcatcatgttattatgtactttatcattctgaatccgccaaatcatgtcaataacaatagatgcataaaggaagatctcatatgcatttatgcctttgtgcttaaggctccaaatgaatttgacacaatcccacacacgaattcttttaccagagacaggaaagataccccaagggaaagagcgccaaagatgaaatgccatgttacaatgaagaaaaggtgctcaataaatttctcatctaccccacaaattgggcaggtattgttagcaataggaaagtggtttatcaagactgatctggttgggcgtgcattagacaaaatgctccaccatatgactaccccccttcaaatggcagtaatagtatcactattaaataagtagataagtttttgaatgtcgcggtcactagattctatcaacaggcctaacaatatactgtaagcatgctattaagttcccaaaataaaagttgtaagaatcatcttctctgagaaattttaacaagtaaatcaaagaactcaatgaacgcaaataggagttcatgtatactcagaattcagactgatctactaatgatcatcattgtgatatgaataactattttatggtaaacgacacgttaatgaaaaatgtttattacatatcggtccagtcatgcacaatcgaattatacacaatatctttattacattttttatcaacatatgtgattcgaatcaaaatcacacacgcaagaagtatagtgtatattaaatcgtacttagcaggtccatattacagattcacattactttaatacactaccgacttgttttattcatatcatatcatcttaattctcttgtacatcattacaagattattccttctctatatgaataaggaattttcaaatatttaatacttatacacttataattaatatgtcatttatcttataattgtattttatatattctctaatatattatccattaattacttgttcttaggtcataaatcccaacaatcactttacaagcccccttcctaaagatatcattggctttcaccatttttttctaagactactagtttggaaccttagccttacacttgagaatatcatttcctctgagatatttagcctctagtatcttgcagcacaaagactagcatcctgtaagaagtttccacccccacttagccaaaaaatgcctgattcatttctttagttttcctgaatccaaggccgccacgggatttaggaaggccttggattcaggaaggcacaacttgttccaagccttcaagtggatcccgtgattttcttttttaaaatcccaccaaaaatctcgaaccatgctattaattttcaaaaaaaaggaaattagagagcttggtatcttgcatggcataaacagccatacctaaccccactaattttataaaggtggcacgaccaatgttagacaaagtttttgctttccacccttacagtttagatgttaggttatccagaataaagttaaaatctacatcattttgtctaaaacggaataaagggaggcctagatatttggtgatgcctttcgggccaccaattcccagggcatttctaatttccaactttgtatactcagaggtattcttgctgaagaaaatagaagttttaagcttattgactcgttgccccaactaatcacacaatctctttagacaattccacataccttttgcttcccctactgtaacgtcccaacttcaagcttccattgggcccttacacccacgtaataatggctcttatacatgagtacgccactctggctgcttcttcgattaacgactagtactacagaccaacacaagtgtttctagcgtgctttgtcctcactcgcacactttctgggaaaacttcccaagaggtcacccatcctgaaattacctca

SEQ ID NO: 295361 - DNA, 11625 bp, Cannabis indica
aagagtggaagaatcagagaaatagaaaaattacaaaaaaaaaaataaaaaaggagttatgaggtggcgtgcgtgtacgtgtgtaaggaagaagggaaaaggtaaaattgtaattatgaaactttttgaaaagtaaaattgaaaaatgtaaaagttaaaaaagtttaaaaaaccgtgtattgataaaaatgtaaaaaagatgtcaattttgacatgaggtgtaaaaatctcaatttatttattaccttaaaagaaaccaaagctaaacaaaattatgatgttaattaattatggggtaggtctatattatacaccatttgaacaatattttagtctaattttaattataaattttaattttttgcaacacttgtaaattttttgtaaaattttaaataattttaattataaaaataaatttaaatattttattacatatataatcattactacgaaaaaataaattattttttttaatgctgaaattgatagaatgtattaaaatacttttaattgatgttattattttgaatgaaaatgactataaaataaattaatcaaaccctaaaaataaagttcatttataaacaaaaaaaatagtcatacatcaagaaaaaaagaatgatagatagtaacaatttatatttttatttataccaaaagtcgaaatgaaatgataattatagactaaccaagaggccaaaaaatggaattagttatctacacgcaattgactccaaaaactccaaatacccagctaacttcaaaccatgaattagcctattttgacgtgttttttcttcacttatttctttattattattattatttctaataatttttaatttcaaaaataaaaaaaaccttctttgacgcttggcaaaagagagaaaaagaataataagcttatttatttaagcattattattaaaaattaaaggtatataacacttttaatacaagtatccttataattaattagcaatattttattaaaaaaaaatatttttttaaattatataaaattttaaatttaatagtaccaataataatataacactcacaaaaattaataccttctaacaattatctgattaattaagtaaagcctcctttctatgacagctcttattgccttaaatcaagttggttttcccttttcccactttctcatatttccataagaataaaaacagagcaagccagcccaacccagcatactctactacactactcttttctcttcaagtaaccctttttattttctttcttaggaaatcactaagaacccagaaagatatctctttcacatattcatatatttcatatatacacacatatatagatacccttttgtttgttttctctatattttgattttttttgagttctctaaacttgggcaacacgaatatatatcccttctctgaaaaaggttggtacttttgattaaaggaagaagaaggggtgtgaaagatgaaggagatgaagaaagaaaaaatgttacaccacaaccatcacctccataggtgtaaccattggagaaaagggcaagcttttgaagatgatgaagagtctcaaacttttgttgtaatggattgtggaagttttggttattataagagaacaaggcctactcttgtttctcttcttctcctttctcttctctcttgtgtctttgttttggctcctcacttctttggttcttcttccaccttttctctctcatgtaagcttttctccctctctctctgtatatatatgtatgtatgtatgtatatgtgtatatatgtgatattttggcttgttcttaacaaagcttttctggggtttttcttattttgcagattcacctcgtgatgaaagtgaagaactttcttctgatttgaatgtaaaaactcatcctttttcacttgactctaatggtaagtaataccttcctttctcctcttaaaatctattataaagttcagaccttttttgtttgggattcaagtttaatgattgggtttttagaaaaccagataaaaatcaaatctttgaaaagggttactataattttgtttattgatttttgtttttgttcttctcttttcattttcaggtactatatattgtgatagaagtggttaccgttctgatttttgtatcatgaaaggggatgtaagaacacactcagggtcctcttctgtatttgtttatggccccagagacagtaacagctacatggattttgtttccaccattgttgctgaggaagaaactgaagaagaagaagaacttcagcatgaaaaggtcaaaccttatacaagaaaatgggaaactagtgttatggacactattgatgaaatagaccttatttcaaggaaaccctcagctaaaaaacaacatgagtgtgatgttaaccatgatgttccagcagtgtttttctcaacaggtggttatactggtaatgtttaccatgaattcaatgatgggattttgccattgttcattacttcaaaacatttcaataagaaagttgtgtttgttatctctgagtatcataattggtgggttaccaaatatggagatgttctttcccaactctctgattaccctccaattgatttcaagggtgatttgaggacccattgttttccacaagccattgttggcctcaaaatccatggtgatttaactgtggacccttcaatgatggaagaaaacaagactgtagttgactttcgaaatgtccttgatagagcttattggcctagaattgaaggactaattcaagatgaagaaagggaagcacaagagaaactagctcaatctccaacacaaacattgtcaaagattaagcaaaaggtttcgaaagacagactttttcgcaagccaaagttgctgatcttagcgcgaacagggtcgagaatgataacaaatcaggacatggtggctgaaatggctgagaagatggggtttgaagttgagattcttaaaccagacagaacaacagaattggccaagatttatagagctctaaattcaagtgatgtgatgattggagtacatggtgctgcaatgacacatttcttgttcatgaaacctggctcagttttcatacaagttgttccacttgggactgtttgggctgcagagacttattatggtgagccatcaagaatgcttggattggagtatattgggtacaaaatccatgctagtgagagctcattatatgaaaaatatgatgaagatgatcctgttcttaaaaatccaaatagtgtgaccaaaaaagggtggcaatacacaaaaagtatctatcttgatggtcaaaatgtgagacttgatcttacaagatttaggaagcatttgatgcatgcttataaatactcagtcactagaataaggaagatcagcagcaatagacatttcaaatcacactaaaaattcttcattgaacaatattattatatataaattcttttttaccctttacaaagttgtaatggttgattattatttgtggggtggttgtagattttgtgaacataaaatgataaaattgggggggatattaatagggataaatttgtttgtacttttgtagaaattcatggttggaggattatgtaataataataccttttgtaaattcaataagattgttaactaagaaatcaaggtctattttttttttcttcttacttatgttatgttaattcgaatttggcatattctcactgtattattgaattttgttcttgaactattttttttttaaaatataaatccctcaaataattgaactgttggtggaaataattccttttattatattcgactgaaaaaatggatggaaatgtgacctgacaactacatacagtggtgatatttttattaatcctctcttcaaaccaaaatataattaaataaattaaaatgctataaaaaaattaatttattcttaaatcggaagagtaattttcaataggctaattaagatttttgtcctttgacatgtaccaaatcatgtcctgaatttttaaggtcattgaaaattccttgaactattgaaatcgttggatttaaggattttttttctaattagccttttcaataactccataatttttttttttttcttttcatggtcaattttattattattattttttaaaaaaatcttcaatggtatgcctagtatatagtctatcaactgtcattgtagtaacttgaaaatgaaaaactgaagtgacaaacaaattgaaaattttatgatcaaatatataagttggattaaaaacaaataacttgacaatcaccaaattattcttcatttaaaatcacaaatattacaattaaaataaaaatatacccttaatataaacattcttaaagtgtggattgatttaaatttatatagctttacaattatacccctcatgttgactaactaaacttcctacttaactttatctattaagaaaatcagattgggacctacacacaaacataactatcttttgtgtctaaagttttttacatcaaaacaaaattattacaaagaaaatttagccaaatctttttctttttttatttcttttacctaaaataaaatataacaaataaaaatttagaagggttttactttaaactctataatataataaagaagacttagtagtgtaactacaaaaaaaaaatgagcctcaattttttttattactacgaattcaatgttcaaaataaaatgtcgtaattaattacaaagagaagaactaccgttaaatcagttagtgaactcttcttcttaagcctttgttctaagaccttaactctagttttcagcaaagagactttgcttcatttcgagttgaagcaccaccccatttccaccattgttatttcttattctctcagtagatttaaacccaccttttagaatacttgtttgattggcgaaccggaggaggtgtcttggcatttctattgtcctttgcatctgtataaacaaggaaagttaaatacattgttagtacaagaccatcgaaagtacgaatgaagatcattgaaagttgttaaaggacctactattattattgtcagctgtattttctccaagagaagatcttcgattccccgagtttagaacaccggtaagtgattgcctcctcaaagttttcccattagttgttgtagcaggagatttcccatcattgaaattgcttgaaactttggtgtttagttgagcttccatcagaacatgttggctcctgcaaagtttgaaactgcactagtttaaaatgtaggcttaagtgacaacatgttaataacttgatgattttcctaccttttatcagagccattaatcagttttccgatcgttgtcctcaaagattttcgtatctgggatccttttccgtttgtgctagcaaccaagttgggtgtctggtagtctaacgaaaatgtaagctcattttgcatcatgttctggaactcaattttggagcgtgtttgtgattcgggtgtttttggcggttgaagggaaggaatctgtgttctactgtctgttttcaatctcttctgataggtaacacttgttggacttcgaggatcctttggacgaattaattctactttggttggactccgaggatccttaggacgacttacttctaccatggaactttcgttgatgaagtttccaaatgatttcatggaagcttcagaatcctgatggaaactagcatctgccacaattgtctctagagcatccttcttgaaagattttggaccttccaagcttgatcttctcaaccggtttggtacagatggggttctaaatcccttcctgctttcaatgctcatttcattctttgattggacgccattctcaatgctcaatctcctcggacgtggtggtgttttctccatcattggtctaggtttctcacatgttctgtttagctgtacattactctgtccttctttgtttgccaatgccttcttaagagtttcaacctgaacattcaaagacatttttaacaataagattgtcacaaggcctttgataaatcgaaaatttccaaagcttattacctgttgtttaagttgaataacttcactgctttccttattcgagcgagcagcaccgagttcaacagtcgaagctctctgagcaaacttcaaagtactaactgtttcgctaaaagaatcttcttctggactgacatgggcaaacattaatgttttcgcgtgtccacctgaaatagaaatttagatgaagttgttagataagtaaaccatctatttcgtgtaaaaatcattcgagatattaagcattaatcatcggctaacaacctaaggagtcttgcagtagcagggtgagtttgctgtttctataagggatatgggaattcttctgagccaaggctgtaattacatctcccaaacaagaaagagacttgtttatacactgtgcctcctttagcctatcccctgtaacttccgatttgtccactcgttcacttcctgcaaggtctaccaaatgaaggcagctgcggatattacctccagacgtatcttttccatgcacatgtaccgtgaggacactgcaaacatatcgaaacaaagctattagtaacaccgaaataagagtaacagttgaagaaaaatgaagaaaaatccatccagaaaaacgacctgtgtgaacggctactttgggtgttcattgcagtggagctgacacaccgattaacctcaccaatcttgatgaagttgtaaacatcagcagtagacttaacagagcacattgtagcatccggaagacttaagccattatcagttgtgcaactacgaatctctaatgtataattttgttaaggataaagtttaatctcataaaactcaaacacacataaaatataatttagtaaattaagaaaggatatttagtggttgatgaatcttcagcaagaaggtctcgaacttgctcgttatatatttcaaccatttgaacaaagatttcataacttatgaggtcttttctcttgctagagatcttaaagaggtcattaagagctagataattgatccccaaatcagtagttgagccacctgagggaccactctgccaataagaaaaaaatgttcattgtgagcttagtagatagtttctaattttttatacatttggttatgaaaatgaatcgaaataagcaatgtctcaccatggtataagtttttcccgatccagtttgaccgtacgcaaaaatgcatacattgtaaccatccatcacagatctaatcagtggttgagtgtccttataaatctcatctgaaaattgtggtcagatattgagaaatcaatcagctcaatatacaaaataaactatggtgaagattgaagtttggaattatattattaccttggctagaaatggggccaaataccctgttgaagttaaaaactcttcttccatctttcccgggttttgatggatctagcaacactagtgaaccatcctctccgatgtaatctattacacttgttgcttcagcattgaaggagggccttattctacagtaaactcgaatgttacctaaattaagatagagaaaatagcatgttagttccgggccaaattaaaataaattcgatcaaacgaaagtaagaagcatatggcataattttattctactatactaactgagtcagttaaactgacctttcaaatcctgaaccatgttgtataatttcctattctctttaaccaccttgtggtatccgagagcagctgtagagagctcttgtacttcggtgcctaaagtagtaaaaaacacagaaaaatgaaatcaatataggcagaactacaaatgattatttcatttcacattgctgattatttcatttaacatacctaagtacttcaaatctctttgcaactggaattgtagctcttcaaactccaccttagttgtgaacaacaaggttttgagatcctagaaagtgggaaaaaaattactgatgtagataagcactttcgatgtattatcttagttcaaataaaggtaactaatttgatttttttcaatagctgggtcactagtttaacagcatgaattatgtatacaggccgaaagtctgctagaaaaaagaacgcaaagatgaaaaagatgcataccgcaagttctttttcttgcatttgaaatacttctctatgatgacaattgccctttctcaaacaagctttgcagcacttcaaaatccacataagaaacacattagaatatttggtaacactaaacgtactgtataatttagtttattcaaattgttagatactgtaatgttacgcataagtattccaaataagacaaggaacaagtttaagttccaattaacagttccctgatctagcaaaaaaacacattatatgaagacaaagaagataattgtacttcatattcactggactacagaggtcagaagtatggtaatttcagttatgaaattgaaatgtttaaacaaataagagctttggcattgctaggccaaggcggttaagaaaacaggtggcattcttttttataaataattttaaataataagaaatataacaagaaacaagtcattaattttttcaattatactgaaatataacaaagaaactaaatcaaaataaagcttagtttattagtgtggtatacatataaatatgccactaaaaaaacatgtttgctgtgaagcaaggaacaaggaatttcagctaccctttatacagatattgttcaatcaatttaatcatctgaaatgagtcactaaacatacatataccttagtgttttgcagtgttgataaatcccctaatggctcagatgttgaattgagattggcgatactccgttctttcaacgaatcttttaacattgaatgaaactgtttacataaataaaaaaacaaaaatgtatttcagttctgttgttctgtaactacttgatgttaaaaaaagcagtatgaagtacaataggtgaaatcagttacataataaagtaagcaatctacaattcaatcaaacatattccaccctagctctgcctccatgcctatgaattaaccacccgaaactaaaaactaataacaaacaattttgtgtctacaagcttaatttacgcattggggatattgtcattcagactcacctctggcaacttcttctggagttgttcacccaaataacctgacataatttttctgattagcttgagacgatcctgtgacaccattagagaggattgaacatattagatattacacaacttttatgccttttggtatattgttagttaagttgaaatatatagtcaataaagtcttattgttacctctccattatgaaaggaagcaaacaagttttcatcaatgttttcctttgtgccatccattgactcttcaaatagcttgacgattgaatcgaccaaggcctctgcaagaagagcaaggaaagacatgtacagccgatattagaagattatgttccataactaaactagtcatgaaccttatgttccataactaaactagtcatgaaccttattacaatcaaatttattcactatttgtaacacttaataattttcagaaatttccaaatgtttactctagaattaaagaggaatcaagtaatattaaccttcaagttttttactgtcaccctcaattggtggctgtctttcacatgtggttgacatatccaatcgtctacaagaatctgctgagattgcagctgaagctttcgattgcatcctattgacagaagtcataactaaaggagattttacatatctatgaattccattcgcggccacactactttgctgcttacactcgtgataagatttaagagccaaaatgcaatcaacaaccttggctgctgaccctgcttccaacgagtcctgatacaaaaaagagaaacaacatcattagatacatattattaactctaaacattaaaaaccatacaatatcattgaaaatgttaccctttcaaggtcagaagcttcaaaagcgggcagctttaactcttcgacagcaaccaagaagttacgaacattctcaaaatactgataagcaggcaacggttgtgtttcccggttgagtaattgtaatgtcgattgactctctacaacctaaatatttccaaattcaaggtcatatgattgttgacagatatagaaaatagttatccaattgataaaatcatctcaagagggaaaaaaaatctaatgaagagtaggaccatcatatacaaatggctcaaatcaataccttgggcactgctcctggatgaattttgttaatggcattacataaaatgataccatttcttagacaagaaatgaattctctctctgaaggttggttcagcaatccaagtggacccacaacgctttcaagccattgcacagcttggaatcgcctccaagctgcagattttaatcgttaaaaatggattaaaaacaagaaaagggcaaaacaaataagcaagctctaaatccaattaactattagcaatttaaaaaagattcaaaaaaatagaaaaatactcatacaatctccccatttctattgtacaaaattcaattgctataataaaaacatgtaaaccatacaaaatgaatgaacaagtttgaaataccaacctgtttcttcagcttttcttgaagccatagtaatatcatgagacccagttcttgtagaatcctccattaaaaacccaattagttatttcctgcaataaaccaaaaatccaatcaaatcccacaaaccatttcaactccaccccccaaaaaatcaaactttcaatccaagaaagacccaaaaatcaaattttgttcctgaataatcatcaaaaaagagaaaaaacgacaaaaaaaaaaaacatacttgattgattgatgattgttaaaaccctaattaagatattgggattttgagattctacttattggtggtggccactcagagtagagtggaagaagagaaagagaagactgtgctcaatttccggtaattgtttctttgataagcctttagtttgggatttcgaatctaatggctgaccaaatcgtaacgttattaaaatgggtgcggtaattttttgaattcaaatttgtagggccacacgtgacaatgttgacatagtgctgtgatctcagccgttcatttctggagtttgatatctcagccgatggatcaatttttttgggggaaagaagccgttgaagtttgcgaattgggcctcgaatttgggcttattgttgggacttgggctttggtttgaattcaagtttgtgatctattttttttttcctttttttttcaaaggtttgtttaatagatttttaaatttactataaattattatttttagtaatttttttttataattttgattttatagttttttttttaatatttgttactagtattcataaaaacaactacaaaataacaagaaaactacataaaaataatagaaaaataacatcaaaataataaaaaaataatatataaataataaaaaataaacaacaaaataaaaagaataacaacataaaaataacattaaaagactagta

SEQ ID NO: 295362 - DNA, 1604 bp, Cannabis indica
gatgtactaatttaaaatgccatgacattatttttttcggaataaaaatattcacaggttcataaagtttatttgttcagtgagaatgaatgttaccatttgtaatatggtattggagctcgtctacagttataaacttttctttagcctacttggttatttccccaatggcttaattgttgcttttcattcttccctcattgtctacctgttactgctcttggtttgctcttcgtttttatttaaacatttggcatggttgcaaatatgacccttccttttgtttcttaactgactctttggtagagtttatgacattcttttatgttgttgatgcttttattaatagtagcaatcgagtttcaaaaatctcaatcatgttattcaagttgaaacatttgcatgttttatattatttgtttctacttgcacgagtgtttttccattatgttgcctcattaaagtgaacatgtgacagtaaaattttcatcctatgtgcttccaattatgatttgtacctctcctgtctgtttcacccaacagatatttcactaattattttggaatgatacttctcaggtatcaattatggaagccatatctcagagctgttatggagcgtgacatgaaagctgttagtgaaggtgcaaaaagcaaagatgaagttttagaaacttgtttgcatcagatgaaatcctgctttttagatgtaagtacattgttggtatctctgtggccgtatgtttctcttcagttcctgttgtgttccgctctgactttgatttcctggatgtggttcatagctttgtgaagttgcttttttgcattgatgaaattaagagactgatataatcacctaacccatgttgatgtttattattattgtagtctttagtcaggcaaactaactcttttttatgttgacagtctcgtatcatctctaagattttaaggatcattacaattaattcaggaccacacggacgtcacactggtctaagcttgatttatgagaaattataattagaaatgacatattatatgtattagaagtaattgaagaagctttgctttttaccgtggttttgggaaaattgacgtattgggtttatggagttctaaaagttctatttttttttatttttgtaaggatttgggtatggtgtcagctatatgatcaatatgcttattattcaatgtggaaacctactacagtagtttcttatgttttctgggcagtcggtaacttaggagacaaggttttaaggttacattgtagagttttttgttttcttaactggtaagtatatgtaactcttgtgtctgctgaattgctttgttaccacgttacttatgacatattctccttcctttcttttcactcctagtactcttgaaatatttgagtgaaaatttatcttttgtttcttatatgcaaatatggggcattaaaatctgtgaactcatcgttaatttttagtgattgagagttcgccttaaagagaagctcctccagttcatctttacgggagctgaaaataaactggggtgtttgcaccttgcgcggactttctcttatatctaattccatgttcattaatatt

SEQ ID NO: 295363 - DNA, 1443 bp, Cannabis indica
ttttaatattcaaaatatttttagtattaagttgtaattctattatttttatgtgtaataaaaaaaaagttatattttgctgtcctaacaaaaaaaatatatttttagtgtgaataaaaattttaaaattattatacatgccgcacgaagtgcggctttgttaactagtttagaaataagagtgactcgtggagtatgtatatttaactacaaaactacataaaaaaatttgtgttcaatatgtatatatatttattaagtataaacattaattctttatcttttaaggcttcatttattgttaacaaaaatttgagttaacagttagtactttcattgagagccttagtaaaaataaaactcgaaacacatctcccctttttgtttcatcacattatgaaaaacactcatcatgatgagcctactgtagaagaagaaacaacaagatgaccgagaaaagagccccagggggcacagactcaaaccatacggggaggggtcatactaagaggaaccttgagagaagtgaccctgaggaagaaattcttgaaagaagggagtcagatgcatatgatcccacaagatatgtccccattattgagttagagaattaacaacttcgttgaaggctggcacagttcaatcgaaagaatcaagaattggaataagttatagctacgaccaaagtgcctcaaaacgatgctccagatgtataggaggagaaacctgcacgacgtctgcaagggagaccccatggttcacggaccaaaagggcacaaggacccaacattgtagaacagggaccaaataatcccactcactcccaggaacaacaaccaggggaaacgtgagacaatcctgttgatgggtgaggcccccagaatcagggtgccacaaccttgcgacaacgggcgaagggacaatagaagtttaaagaaataatgaaaatccaaaagatcaactgcctagccagtctggtcgccctccacgttcaccacaaggatgcaggagaggagaaagaatcaatatgtacacatacctgaatagaggaagattcaccaatttatttgaaaggcgaagacctgctcaagaatcaccacaaggatttgaggctaatacagcctaaagcagatcgaggagttgaggtcagacacaatctttgaggtcatgtacatgggaaaacccaccacgtgggaagagaacacattggtatgaatatcgaagcgaacaagagagtatgagtaactttcaaagttaccaattagaaagtatctccccaaatagatctgtgagcaattatgatagcagacaagattgatggcaaaacatgcgggatcaacccaataagcgagatcatataaatttaagatgccctaatctgcgtctataaataaatagaaatgcacttaatttatgttggtttttatgtcctaaataaaactc

SEQ ID NO: 295364 - DNA, 5384 bp, Cannabis indica
cgcttgatggtagtacagagtttaatatatcttaccataaaactaatcaaatgagcaacgacgatttttcaaacgggactacacatgtaactcaacttcatggtgtttctggattctctgtcatggttgattcatcacccttgcaggaggatgaagctagcaatgtcaatatagatttgattgttgataagctaaaggcgaagcatcttagaaaaacattattgcaccctcctaatggtagtgccggtggacatgcatttgaaaatgatcttagaactcagaaaggaagtgataataatggatttttccatagagaagcgtttgtaggtatatctgaaatcaaccttcgaactcagccatcagaattgcctccaccttgtcggccacctcctatagtagatggtgagaagggaggttctagtaaactggccccatatcataattgttttacttcagaaggattctcgggagatgattcgccgcctttctttgatgtagaggtagatgccagttcgtctgctgcagtctctgctgctgctataaaagaagcaatggagaatgctcaggcaaagattaaaagtgcaagagaattaagagagaagattaaagatggacttcaaaccagccataaatcaggtttgaaaaaggatgtgaaagggaaggaagggaagagaggtaagattattgatggatccaatagaataaaagacgagattgtgaagggaccttgcgaaaaagccagcggatcaactttgttcgttatggaggagaagcagaaggtgactacggcaggccctgaagttccagaatatgtagaaccggaaaaacctcatgctgctgctcaaaagtatgcgaaagacatgtctgagaaggaaatatgttcaaatagaggagcttataccattgatgaagctagtgaatggaaagaggcaaccgaattttttgaattaataacaacagaggaatctaagaaggttgttgaacaggtagataacaagaatactgctgtgcagaatacgattcacgagcatggacagcttgagaaggcaactgtggaatcatttgataagcactcagaaaatggcgggaaacaaaatgctgccacggaagatcatgggctggaaaatcctgagctgaaacaaggcacaaatgagtcttttgggtacgaggaaaaccatgtacagtcaatattaaaggaggaggtatgtgagcaaaaagatggtgaggataaggtaaaagtaaccaatgaagtttgtgaatggggggaagtcgataacagctttacaatagccaagcagcttctgggatctaacaaaagaagtagtggtaataaatccactagagagagaaaaagatggtttgaagattccaaagttgagcagcctataaagctaaaggagaatgataaaatatcggagactgacaaaatgattgaaattgaagaaaaatgcaagcttttccatgcaagtgtagacgacaaagagaagcaaacagaggcttttgaacagaatataagttttgaaggggcatttgaccaagaagaaaatgagaaaaaagtgcagaaggatcttgaacaggaagaaaatcagaaggggttaaaccatatttttgagaaagtagagagtgagaggagacctaaagtagctgccaagcatcatgagaatggaacgggattgaaacagtcccttcaacaggaaatttacaagaagacacagaaacaagctcttaagctggaagaagagaaaaaacgtgaaaaggctcataaaagagaagcaaacaagaatgtacttaaatcggttaacggggagaaagagactaggaaaaacatgaaggcctatcagcaagaaattaatgagaaaagattcacagagggtctagacaaagaagatatagaaacaaaactgtcacacgattttgagctgttggatactcagaacatgccaaatgagattattgagcaggtaaagactaagcaagtgcttaaagatgctgttgatggagaagctgagaaggatctagacaaggcagatgaagtgaaggagaagattgaaagtagtaaggaagtaaaattggccaaaggagctcagttgcttgtggaggaagaggatctaccgcaatttgatgtggagcataagctggattgtagtgaggagaacagtcaatcaagccagtccactagcgacattgataaaaacagtggaaaagtgaaaacaactcagggcagctttagctttgcccatgaagaaagtggtgatataaggactagtgaaatgcaaccaggggcagttggaaggaaaaataaattcattgatagtactatcaaagcacctaacatagctgaaaagtacttcagaacggaaggcgcaggaaaggactttaatttggataacactgtgaagaaaacaagtggagaaataaagattaaaccgaaagttagtgaaacagaattagaagcatttgaaatagaaattaagccaagctgtggtgaaggaaaattgaaagcagttggccagtcacaaggaaacttagaacatggaaagaaccaatgtaaaggggaagatgcctttgagctgcctcatctagataatcgagcgaagaaggtggggcaatcagcctcagttattggacaagccaatgccaataaaatcaagagttcctctcagatgggatctgtttctgaaaatcaagagaaagaatttgctcgtcagtggaaggagagagaagattgcactcaggcccaagctaccatgaatcaggaagagaagagaaaaacaatgccaactcatatggtgaaagaaaacaacaccgaagataagagaaaaacagaagcagtccaaccgcctaggcctgaagagaagctaaagaaccagaaatcatttcagcaagttaatgcagctgcagagagaaaagagaagacatctggagaggtagaaactgaaaggatgaaaagagaaagagagatagaaaatgaaagactccgaaaaatagaggaggagagggagagggaaagagaaagagaaaaggatagaatggctgttgacctagcaacacttgaagctcgtgagagagcatttgcagattctcgtgacagatcagaaagggttgctgtggagaggctaacagctgaagctcgtcaaagagcaatgtcagaagctcgtgaaagactggagaaagcatgtgcagaggccagggagaagtcattatcaggtaaggcagctatggaggctaggatccgggctgagcgttctgcagtagagagagcaactgctgaggctcgtgagcgtgctgctgaaaaggcaatggctgaaagagctgcttgtgaggccagagaacgagtacaaagatctgtttctgataaatttgcagcttccacaagaaataatgtgttgagacaaagctcatcatcctctgtgagtaatctcttttctgctgatttattgttccttcagttaacttcaatttttcataacaatctgaatccaatggtattgtgcaggatcttctcgacggctcacaccttagacatcaatattcctcagtttatggtggtatgtaatcaaattttgatatttactagctggcttttaatattttctttacattctgcccaatttgttttgaacttgatttttttttttgttttacagagagatttgaaggagctgaagttgaatcagctcaaagatgtaaagctaggttggaaaggcatcgtagaacagccgaacgtgcggtatgataattcaagtatttatagttaatgaaacagcttttgttttatatttaacttatttaacatcaagcttgtccatttcaggcgaaagctcttgcagagaagaatatgcgcgatcttcttgcccagagagagcaagcagaaagaaatgtaaaaactttgttgatagaacttcttaggattcagattttcttctcttttcgggtttaatgagactgatctaattgtgtttgcagagattagcagaaactttggatgctgatgtcaagaggtggtcaagcgggaaagaagggaacttgcgcgccctgctttcaactttacaatatgtacgcatttgttatttctccgagattcgatacacaataacacattttaatttactaaaaaaaaaatctttctttggtggcagatcctcgggcctgatagtggttggcacccgattcccttaacagaggttattacttcagctgctgtaaagaaagcttacaggaaagccaccctttgtgttcatcctgacaaattacaacagcgcggtgcaagtattcatcagaagtatatatgcgaaaaagttttcgatcttttaaaggtaatttacaacggacacaaccatgttttatcagggttatgtatattacataaggttcaccttttaaacctttctgcaagacaattgttacaaaatagaaaaattagttttagttgataactaccggacacttacatttttgtggtctgtctgaatttactccaggaagcttggaacaaatttaactcggaagaacggtgactcggcctctctcatactttataatgctgttatactgcaacagcatgtaattttataaagctgtaagtagatatagtcttatgttcagtttttcctttctatctttcacttattaatttaagtagatattgaatgtaagcttaaaagctcaaagaaaatagttgaaggaaatccaagtaaatgaaatatggttggccccctctttttttttttttttttctttcttcttctaaactttattaaattgtctacttaaaatttgcactcaaatattacgaaacagttaacgctattagatattatggtgtctattgtctagtaaaatagttagccatttcctgtaattattactaaagtaaaatatgtggtatcagatattttgggtgttcaaaatatggctatggaattttcacttttcattttccacaatcaatcaaaattgagtgggtgcgtattatgaaagggaagttgctgaggaaatttcccaattgaattgaacaaagatggaatgaggaaattttctgagaagattgggttgtgtcactatcaaagatataaaaaataataaataataaaaaattgagaatctaatcttttttccccaccttagatttcagaatctttatggtcataaaagagaatagtatagtccacgtgtcatgtatctattgggccactttgctatagtgcttgacgatgtgatgtgaacggtgtcgttggctatgcctttatggagaagttgatacctggtctactgtagtcctcaagttacacatttttcaaatttgttgtgctattaattcttatattcaattaattaattaattatatttgatctctttcaataataataataatacttattat

SEQ ID NO: 295365 - DNA, 1918 bp, Cannabis indica
tttttttttttttttgacgacaaatttagaaaccaaatgtggtatccaatattactatcaaatataatattagtaagggtatgtaggtaaatatttaataatttatttaattattaaaattttattataagattaaaacttaatagttactaagtataatgttatacattatcattcatttatatctggtagcaatatattagaggccactaatactaacatatctaataatataatatcaattatcaaataagtagtttaatggtataccaaaatttgtatgtactaaatttgtcacataattaatgtacttttatttattaatattatcatttagcattaataagttattttaatatacttttataattacagtattgtaattattttttcaaagaatatatttaatttattaattatgatgataataatttatatgtcaatttgtatcttacttttactttttctattattcatttaaacacaattgtaaaaaaaatgtgaataatattatttatttatggttgtgcctctaatatatgcaaaatagaagtattgttgggacaagttattattaaaaagaaaactaccgtacatcgtgtgatcaaattaaatgtaaggaaaagacaaataaaataatgtgaaattatgaagtatgaacccaaacaatagtttgctacttttggatatcatacaattacaaggcctttatgggcacgtgggcctccgacagcgactttacacatatttacaaataaacgccactcaaggttcttttgactttcattattcttatttgtatagttgactaactattagttttattttcactttttataaaattataaataaatcttaatattaaaaggagaaaaataaatacattagtttgttaattttaataattatttaattttttgtcttttttaaatatgtataatttttttaatcttcttctaatattttttttatcttaatatttaaaatatattttatttttattatatgtattgtttaagaatacaagaagggtggtttttttaaaaaacaaaatatagtataaattagtttctagaacatagacaaactgaacttcaagcatgtacaacagtaacacaagctccttgataaagaacgttctaaagctcttaaggaagaagttgaaagattatggaagaacaacttcattagtgcagttacaactagatcatcatgcacacactaaatgaagagcatactagtttatgaactgacatcggactttattgctacaaagtaatgcccttcagactcaagaatgcatgtgcaacttatcaaagactagtcaatcatatgcagactagtcaatcatatgctccataaccaaattggaaacaatgtagaagtctacattaatgatatgttggttaagtcgaaaagattcgaagacaacatcaaagatctagagaaatgcttcaacttcttgcgagaatatcgaatgaagctcaaccctctaaaatgtgatttgacgtcgaatcccgagaagatcaaggccttgcaagagaagtcactgtcgtggataaaagacgtgcagagcctaacatgacgaattgttgcacttagcatatttatttctgggtcaaccgataagtgtgttctcttttttaagttacttaaaggaagcaacaagaggtttgaatagaccgatgaatgcgagcaagccttccaagctttcaaacatcatctagccaagctgcccatcttttccaagccaatgatggtgaagaactatacgtcaatttcacaatcaccgagcatgtgttgctctagtgcgtgaagaagaaggggtacaacatcttgtctactacatcagcaagtgactcattggggtcgagtcaaggtatccacccattgagaagctagcctactgcttggtact

SEQ ID NO: 295366 - DNA, 8700 bp, Cannabis indica
ttttaaaaatagaaaactgattacaaaagtgttaccaaacgccacttaatttttacactctatctactatgtaatttaatttaattagatatttaaaattaatatcctatctaatctaatcacaatttaaatatctaatatttcactaattaaattatttatacgcatctctattctcaatcacggtcccgtgagggagtaataaatatgtatagagaagatgacaaaattggggtatatcgcccactctcagctgcgtgaagtgtaatagtacgcgccgttgttctcgcatcagctcacgtgggtggtcgagtagtgtgaaagcagcatcattctcatttcttatgtgtggatgcaattacgtgggccccgacgaacaacaaattaaatacgaaatcccattaattggatggtcccaccaaactcaaacccagctgtgctaataatagttattaatatattattattattattaatattgatagatacaaaagcaaaagaacaatttaaaataattattgagggacccttacaaataaaatatcttttgaaccatgaaatacaaatgctaatatgcttatgaaaagtactaacaagcacatcttagtactaattaaatattatattataattaagtattgagtctcatttaatttaatttaatttaataataattatataatataattaatcatttataaaatattatctccaactacttaacacctaataacaatagagaaatgttaaagggcacatagcaccctcctatgtattaatattactattagtccaactaaatatcgggtctcatataatttaatataatagcttttaggaaatatcgctaaccaatcataatgcgacatttcgagaaagtgctaagcaccactgatgactaatagcaatgctcataacaatactatatacttatgcacctcactccactctttataatactagttaaagaagtcacgtgattcatcaacttagaaaataagagttaattattatataaagtcattaatatccttaatttttagctcttttttatacaatttaattattaggaaaaaactacaaaaaaattaacaataatattaataaaaaaagataatttctttgaaaagtatagaaaaagattatgaatttccatcaaaaatatgtactttattttattatgtggagtagattatccttattttacatccatgtagaggtggaagttaaaaataggttgtgtaaaaaataagttgtattcactttataaagtcacgtgcacatcaacccaaaaaatttatatttcacactttagtttttatctaagtgtcacaaataatttagccaaatattaaaggtaaatactattttaaactttgtgttttacaaaagttaccaattgaattctctattttgttaaatgataaaataaaccctgtatttttcaaaatagtacaaataggaacttgaactgattttttaatcaaaataaaatttaataataatccgatctaaatgtattatgacaaaactatttacattttatgtatttattcgtattaagaattgtctttaagttggttacattaaaaaaagttatcggaaattaagtttaggatcctattgttaccattttgaaaaataccgggttcattttatcatttaacaaaacagagaatccaatctataacttttgcaaaacacatagtctaaaatggtatttactccaaatattaataatgttcttaaagttattccctttctccttttattctttctttcttatttctttcttttcactcaaactttaaaaataatttatggtcacattgttatgcgggtgagcttaaaaaagtaccattgtgatttactcttcaatgtgaatattccaagatgtgagaatcatatgcttttttgttatttttagaaaagaaaccatttgcttactaatatagtgattagttactgttttttaatttttttttaatcttagttaacatttattttagaattttattaattgataactaattagctttcaagataataataaaaaaaaataattaaataatcagtatataaaaataatagcttgttgttatccacatttctggagggaagacatgtgacattcccaataacaaaattaattgattaaagcccgcttagaagtccaacaagataatgggccaagagtatgcgaagatttgggtcgcacaaccatctgagatacaggaaatctatgcctgaaactggatgtctccaaatccagaagggtgactcgccccactcaaaaagaatcagtcaagacccttcatattagcgtctgggatagatctagaagggttctccaagaaacagcccactaaagctagtctcaggtctaatcaagtctgtgggttgaatccactaaagaagatggaccgcaagtctatccaaattgtaagtcatccacgtattgatccgaacctttcagaattcgaaagggtatctcgctgagatgaagataacttaccgaaagccttccaaatgagctgaagggatacttttggaggagtaatccaaaaggcgtttggaatccacaagctgacatggaaaacttctaacaccgaatcccacaagcttaggaccttgtcccctgcgtcagatcaaaggattgcgcgtaccaccaaagagagcatacactttgtccgacgaccacctcattgacgtaacagtgtacggaaacggctcatgcacgccgcttgtcaacatcaagtggtccccatccgtatgtaatatcacagtctcacgggctgggcctcattctatgggcctaaagtcattttattaagtgtatttactccattagtggaccaagtttaatgcaaaccctatcaggtcacgagtatacccatatccggatcgtagcctataaatatagcattataccctcatgcaaaggattggaagattgttcctcaagcactttagccaacgtctagggttcttaagccattacaagaatacttgtgtaatacattaaagactatttagcccaatacaattgactcatgaactaaagctctttaactcctcaaccatgtaaaaattatcatctccacttacttattttgaatttactttcttggctttcactttcatataatcagttattttggtacttttattgagagttgaagaaagatttgaaagcacattgtctctataacaatggtgcttacaagaaacaccatccccaagcctaatctttgtgagcagaacgctgccatgggcaacgttaatcctcttctagcagtgtacacccagtcgagcactgtaagggaggtagagacgtctaaatttggcagtcgtctaaccaaaaaagccctaaagacaatgatgatggatatgaagatgacgatggatattttgagcgagatcctaaagtgattcgaatgggtaaggaacttgttgatacaaaataaaaattggctgtacaagaggagttctctcaccagatgcagcagatgttagagcggctaataaagaaattgcatatgtcattaatggatgttagcacagaagccgaaccctgctgatgatggaccccctattcctacaaaggataaggggaaaggtagcatgggtgaacctccacaaaaaatgtccccaccgctcctaagaataataagaacacagctaaccaacctctgcggatatataaaagtccacctatgctcctatgctaggatgcccttctcatctgcgaggcaaagttgagcagaataatagtcttggtgctcaggtggaaaagctaccattcgggaacaaaaaaattgtctcaatatttttgttaaccagagaagaggagagaagcttatctatctagaagataacatattagatgataccaccacttatgctaatattgtgggaaaagcactgtgacctaagggcgtagttgagtgtattcaagagtcttgatggactcaaattgttggtggacctactgctcctcctacctctagttatggtaggggtggcagtgactcaaccactgatcaaaacagaaaggtaccatttgcacctggtggctcaaacaagaataaaaggttctgagggaactaaggtcgtggtaaccgttagggtggtcctaagaacttatacacttacccaaaaggccctaattgcaagaaacatcatttgggcgtgtgtagagggcggagatgtttccagtgcagagtaactagacattacaagagagactgcccacagttaaagaaagaagagcataaggttgaagtaaaacctactccaacaagggtgtttgctcttactcaggctgatgcagctagcctctcagttgttacaggttagctctcagtcaacaactctagctattatgttttgtttgactctaggtccactaatttgtatgtggcagccagaataattggtaaattgggtaggccatgtgataaatatgataaagggttcggaaccctattgcctgacggagaattacttatctctaaatggtgtgttaggtctataccgattagaattgaaggtaaagagttgagctctactttagtggaattgggtttagcgaattttgatattatacttggaatggattacttctccaagtatgctactaatgttgattgtaagcgagagatggtgatcttccaacccaaaggtgaggaatcatttatttttgtgggatcagtttaaggatcctgaattctagtgatctcaatattgaaagccaacgatctgttataaaatggatgtctagggtttttaacagtggtgttggacaccacttggcctgaatcagttcagccagaaacatcaaagtagttcaagaatttctagatgtgtttcccgatgaaattctaggtttaccaccacagcgggaaatagattttgtaattgatttagcacttggagcggagccagtttctaaggcaccttatagaatggcttctgttgaacttaaagaattaaatattcaacttcaggggatgcttgccttagggttttctcgacccagtgtgtccccctagggagctccagtgttgtttctcaaaaagaaagacagatcgctccgtatgtgtattgactatcgagaattaaataagttgactatcaagaataagtatcctctacctaggatcaacatcttgttcgaccagcttcaagggaagacagttttttctaagattgatctccaatcgggctatcatcagttgagaatctaagaggaagatattctaaagactgctttccgcactaggtatggacattatgaattcttggttatgtcttttagactaaccaatgctacggtaacttccatagatctaataaatatggtcttcaagaattttctcgatatatgtgttatagttgtaatatcccggaaaataatgtgatatttaattggacatattttattaaatatgtaattattttagtaatgaagtacgattatgatattacttagattaattagtgtgaatttattaaatgattaaataaagcgtagtttattaattacggaaattttattggaatatatgggtatcgtggatactatttttgaaataaaatatttttgggcccggcgaccgtgggaactgaatggtgtggtcagaaatgtcacgacattaatggatgaattattttggaggtgtttcggactagtttaaaattttaaaatgtcggtttgatgtattagctagaattactaaaatgcccctagatttttataaagtttaagtttaattagaaaagggcattatgggtatttcatggattagtatttatttgtcttttagtgttaaatgagctgaatttatttaagtgatgttgaataaaagctgattttttctttttgagtgtaaatgatgagaaacttaaaaagtaagataccataagcttcatcctttcctctctcttttcgagcagctagaaccaaccatcaagggaggctttcctcatttttttcatttgatttttgagcaaattcttgtacctaggctcaatctagaagcaactaaggtaagttctatattttgtttaatgaatttaattggtttttaggttagggtttaattgtttcttggctgtagagtttgtttaggttgagatgttaagtataggtttgattttgaataagttgaagctgaattgaatgtttgtttagggctgcttagcttagattggtttaataatacctaaaattgagttttcttcatttgagaatgtgattttgagcaaattgatgaattgtggtgaattggtgattggaaaatgttatattcgttatatggaatagttttggaaggtttgaacagatttggtgaagaattggttgggttttggaacaacaaaccagaatttctcatttttgcagcagggaaaactagttaaccggtttcacaggcatagtgaaaccggtcaaccggttttgtcagcaagggaaatcctatttgaggcttcgaaaccagttttgttcggggtgtttcccagagcttagaatatgatatttttatgatgtctgagttattttgaaccagtggagagtaagatatgttcggttatgaagttagggttattctaaagtttggaataagttgttaattgagctttgttgtcgtgacataggacccgagatcgtcaagctttgattccacttaagattagcatgtacgctaaatttttgaattgaggtaagagaattttaatgcaccgttaagtagctaaatatgaattggttataatcgttagtgcctcgaataagatcaagattaacgatatgtatttgtagtgactcgatcttgatcgagataaataatatgtagttgttgtgactcgatggtaatcgaggttatgatgagaaataattattgttgtttgtgaattgtttatgattgagggaagaacacggctatcaacgttgttgtgaatgaattaagaaacggtcattaccgttatgagtaattactcgttgaaattgcggttaagtttcttacttatcgttcgctttatcaggcaacaatagtgacatacgcagctcgtggataacgagtggtgaggattggaaatagtcattaccgttatgagtaattactcctgaaaccgcagataggtttcttacttatcgtttgctgtatcgggcaacgatagtgacatatgtagctcgtggttaacgagtggtaagggtactttatgaagtaccaaaattggatggttacgatgttgtgaaatggatcaagtgtgttattatgtaatgagttgtaattgagtacatttttgctacagtgtgattaaatgaatgttatattgcttatgaaattggtcaattttcttacagtctcagtggcctagggatgtaagaatacatggttctaataatatatgattagggtgtttaatgaaatactgaggttgttgattatgtatagctataaatactcttaattttataatgagtttgctcgtatagacgttgaattgtatatgtacgttgaaagagtatgacctattggcatgtataatccgttgtattgaaatctactatcactttctataattttctttatcttgtagcttttcttgctgagtcagtgtgactcacaggcgctttgtggtgcaggtaaggaggtgttcgaccatgacttggaggtttcctagcaatgtgcatatcaaccgtgctgtcttgactttcgagaagcaggatcaacccttttctatgattagatgtataacttattcttgtattaacggttttgtaattagttataaaagaattttattagcaggggatctccatattacgacagtatttaaaatggaagtctttattttgaatttaattaaaggttttaattaaaccacactttttcaaaattacaagattagtaataataagtttataaaaaagcacacacgtggcgtccctgagagtcagggcgttacaatagtatttatcgatgacatccttgtgtactcttagtcagaagtagagcatgagcgtcatctacggatggttttacaatggttgcgagaacacaagctctatgctaagtccaagaaatgtgaatttttggctatctcaagtgtcatttcttggacacattgtcagtaaggatgggatcatgattgattcgaacaagattgaatttgtcagggattggccgagaacgaagacagtcactaaagttagaagatttctaggtttagctggttactattgttggtttgttgaggggttttctaagatctcaacacccttaacgaaactaattaaaaagaatcatcagttaatatggacaaacaagtgtgaaacaagttttcaagagctaaagcagcgattgatcaaagcttcggtattagcactactgtcagatcaagagaagttcgtggtttattgtgatgcatccatacaaggtctagggtgtgttctgatgcaagctgatcgagttatcacttatgttgggtttgttagagattttattacaatggaattagaaaatcaaaatattacaactctattgtaatacaatacaaggaccaacaaagagattaaataaatgttacaacaacataatatacaatatatatacactatatatattatatataagaaatgtagaagaagatcacaacacatacaatataaaatatgtatatatataataagagaat

SEQ ID NO: 295367 - DNA, 4799 bp, Cannabis indica
aggcccatattgtagtagtgtcaacttgtcagatgccataatctgattagttgataaaaaagaaactatagccaaaatatggaagaagttaaaggaaatatttcaacaaaaatctctcacaaacaatatattcttgaaagaaagaatatttgaattcaagataagtccatccaaatcttttaatcaaaacatggatgaatttttgaagatgcatattgaattagcaaactcaggggaaaatgagacctaaagtgatgagaaccaaaccatcattatattaaatttcttactagattcatgtatggaggtaaagacagccataaagtatggaagagcatcaattcttatagatgaagtgatttcttccttaaagttaatagacttggaaatgtggaatgaaaaacctaaaagttcaaaaggctgaattgtgagcattttggttaaggcaaagtataaaggtagaaaatctaaccctaatcgaggaagaagctaaagcagggggcctacaaggggaaacaacagtcagggcaaaggcatgtcacaagagcctaaagatctaatggatacttctactgtggaaagcttggacatatgataaatgattgttatttctggaagaaaataaacaaatacaaaaatgaaggacaagattcaaatactcagagataaaatcaccactcaaacaagtacacggagaaagaggatgccaactactctagtggttgtgatagtgatggagaactctatttggcagcatcatctttaaaagatgattggatcactgactcagagtgtattttctacatgataaattctagactgttcttaatagactacaaagactcaacaggtggaaatataatattgagaaacaatcaggcatgtcaaatacaaggcttaggtaacattaattttaaaatatttgatggtattgtaagaacactaacaagtgtaagatatgtgcctagtattattagaaacatactatatgtaagtgtgttagatgacttggatattgtgagtaaagttgaattaggtattatagggataagcaaaggttccataaccataatcaaaggccaaaaacttgaaggactctattacctaaaaggagagccaattaaacattgtaacaacattgtgatccatgcaccaaaagacttgaaaaaaatattgtggcatcggaaacttggtcacatcagtaaaaagggattagagatcatgaatgaacaaaacttgttaggtaagaacaaggtaagtaaaattgatttttgtaaatcatacatcctagaaaagcatcatgggtttaaatttaaaattgggattcaccaaactaaacaaatatttgagtatgttcattcagatctttgaggtgtagagaaaccccaactcatggcggtcacatggacatagccttaatattggggtgaacctctaaaaaactcggtgttattctttccgttttactttctatctttctgtttattgtgtgtgaatcttcaagatcgatttagatcttgaagatcagtgccgtgtgtgtgaatctgatttgtgtttctctcagtgtgctcttgaatgtgtgtttgctagggtttcgagggtttgggtgaatcgaatgaatgttcgtgattgatttctcttggggttatatatgtttgtgcaaatccaaaactgtgttgttttgggaaggtgtaaagtgcatgcttattccgcaagcacaaggaaaggtcaaaatatattgatgaatattttgttggtgtagggtacagtttggtaaattcctacactgaccaaaaaaagaagagggagattattaattagcattggaatcaatatatgccatataattaatatatcgatcaaaactctgattagttcaaacaatattagctagggccatttatagctgtacaataacgtgtagagcattatccaacttgcgaaaagacaaagtcttgaaacgtagctggctaattgacttattttaaactaaagcactaatgccggaatcggatatatgacttggaaaacttattcaataatgatcataactaattcgatattggatatccctatagcttatatatgtgtatgtatgataatatggggtgaagttgagatttgtttaaatattgttggtccatatatatcagcagctgcaaccaattttacaaagatgatcagtagtggtggttgtgatttgtgattgattaaaatgggtttgttctcgtcgacgccttattaccaatacgcaagagcatccgaacaccattactcccatggaactcccaaccattaccaatattattacaatattcttcttctgcttcccatcgtaagacttctcattctcttctttcttaccagtactactactcctgcatgcgcagcatatatatatatatcatgatgatacaattaatccatctttattcctttaaattgacatatatatatttgtatatggatttttgaaatatatttattaagtgtacacatttcacaatctctactatagtctgcttagaacaaaaatatatttttccttattaacattttattatgtacttaatttcattatatactgatcaaatacatttattataaataaatatgtaactatagtcatcatcatcatgatgcatatgagtaattgatgtgtgtaaatatatagatgttatatatatatattagtaatattagtgcctaacgattatactttcatgaattaatacaacatatttatatgcagatctagaattattacctggtggtttgtaagtcgttagcacaaaaagtaagatccacatcggcagataggcaggcgaaagtattattagtggaagaagaagaagagtgagccaaagggcacaagccttggaagaagttcaaatagccagtcaaacctgagcaatagtcctcgtgcaattgagcttggcaatccaccatgttacaacccacacactcatcttcatgcataacacgtagcacttggggacactttttgttgagatcggctgtgcaaccaatagatctacaatctcttcctctcctacccttgggaaccacaaccatcggaagattatatcccgttgcaacactcacaagataagtcaattggccatcgcccatacccatggtgttgaaaattgccaaagtagtggttagtggtactgtactggatgttgagcttgagctagggcattccatggtagtagatgatccgcaatctccagttacacacgagaattggccttgtaatgaatatgtgcatagagttcgaccccatacgaaacctgaccaccctggtggaatagccactgtctttgcctctcctggccttagtgagaaaccagtattaatattattgttggagaattgaggagagcttggttttgattgtatgactggccaaatattgttgctgcatgagtttttgattctcaagaatgttggaggagtactcatgatcaaaccagctgtgcatatatatatatgtagccatcatatatatattttatatatattgcatgcagattataatttgatcttcaaaatgaaaattaaaacgagagatctattaatacatctatatatataactaactgtatgtacgtgacaaattcaaaatacaaaagtttaattatagtacctgatgatattgagaataattgcaaggaattgatgcaaaacaggaataagccaactccacggtcacttcggctagtacacattacaaaccttgtctgagaaaacaaagagtttcaacccttaattaatttgttggaggagttagaaataaaaccaaagtgagagagtgaagacttgctccacacgtatttgtgtatatagctacaccctcgaaagatgacttccttcctttattacaactatgccctttttgtattctctacacgtcacgtgtaggtatttggtaaatctcgaccttctatttcaacttatatctccatcatcgcatctgaaataagatagaatattaatcattaattgagaagtgttaccaacactcttttattataacctcttacttaatttttgtgttcaaaaacacacatatttttttttaattgcattgttcgatgttatgcttacaacattattcttatagatttttgaaaattttcgaatagtttatggtgtcaaaaatatgtttgaagttttttgaactattcggaactctattttcaatactgtaaattatttagaattttttaaaaatttacagcgataatactgtaagcataacgaataccgctatgagaaaaattaaaaaaatatatatatttcgacatgtaatttcagacatgaaagttgactaaaaaattttaataggaagctataattagcactccttatctaattatttttttcgaactttttcacgacagtgtcttttatagttaaaaaaatatttctataaatttttaaaactttttgaatagttaccataccataatctgaattaataatgaacactatcaaattaacgttgtaatgagcacttctcaagttatgttaaattgattaaaattaaaagtaagtattagtataatttaatatcgaatctcgtacaaattttaatttaataactatcataaaaatttgtagttgtataatcacccatgaagatatatctcatgatggttagcgccattattgtctaatagtgttgaacacattcttgattctgttacttaactgtgacagttagtagttatagaagttagtggtttattttctattttcatttgtaaagtccttttttggcaagttaggtg

SEQ ID NO: 295368 - DNA, 11948 bp, Cannabis indica
ggcataaaacccaacacataggccaaaagtaccaacatgaaagccctaaggctgaaaataagttatgttcaaaagtaaaaggccgataggccatacagaacatacaatcagaatgttgatgcaaacaaaaccataaagctaaaatactaataaagtgaagctacatgtgtgcaggtgcaagtgaagcttggttggaagccacagagtctagatctccaaagtgtgggttgaccatagcctctataggttggtcgaccacttggtcaaaatcatggtggccacctcctcagtaggggggacggtcatggcctcatcgaatagcctcgatgacgatccttctgactggacggtggtctagtctacctctatcctgctctcatacaacgctttcccctgggccagtgtgctctcaaggaaagaagcatcccccatgtaagaaagatcaactttggggttgttcagcttgaactcattgatgatctccaaagacaagccaacatactcgtcttttatggcatgttggccatcaagggcaagctttagcttgtcgtcactcctcctaagttctgtccctagcctagagacgtcaacaacaagcgaggtattcttttgattcctggtgtcgggcatgatctccaaaccataaatcatgtcctaattctattggacaagagcctcctagttggtcacaacctcacccctagtcaggagcttagcttccagggtctttagctgctttcggagagcactagaggaccctctgaagttgcgatgaaaaaagctaagctttataaaggcttgaagaaaaaaaaaaggtcaagattagcgctagaagataacattggtcaaccagcccctctatggtgctaccaaggctggccagcttctcaaagacactgcaatgaccggccagcttcatacaacaaccccatatggtcggccagctcgcaataatactaaaatgtaagcaaagttagatgtgcaacttagcgaggctagctcttgaagaccgatagaagatagcctctctggctcgccatcactgagctcccgacactcatcatccacagtgggtaaggctctatccatatgcctacgagccaaaaataagatttacatattttgttgcacacacggctatttttcttatacgcactgtaaactttattttcgacactataaactattcaaaaattttttaaaatttaaaaagggtaaatattattttggatcctgtgtttttacaaaagttactaattggatcttttgttttgttaaatgacaaaactgacactatattttccaaaatggtaaaaatagaacgtgagctcaatttttaataattttattttttttaatacagtcaactttaagataatttttaacacgaacaaatacagaaaatgtaaccagttttgtcataacatctctagatcagattattattaagttttattttgacaaaaaatcagttcaatgtcttatttgtacaattttggaaaatacagggttcattttgtcatttaacaaaatagatgatctaattggtaatttttgcaatatataaggtctaaaatggtatttatctatttaaaaatagtgttaaatagttacaatgtattcaattatgaaagaaaattagacaataaattttgtttggatgtaaaattgatatgtaaatgagaaattttttatatcatatattctaatataacattaaaaataataataacaaaaaaacaaataaacaaaaatataaggtggtccaccaacaatcctctttcgttggactactaaattattttcttattttataaaatgatgaataataattcaattatttcttttttttttcttttgaaatgtattcaattatttcattaatcatacagtttcgaaattattctacctaacaatgataaagtaaattaggagtgtttattggatcacatttaatatttttaaacctattcagatctaatccaatcatatattggatgttagattttactatccgatcggatccaattaattccagtcatcatccaacatctactggaggttggattggatcagttttatccattggatgttaggtttattcaatattttagacctcatattttttagatcgtatcaaatccatccaatattttaagtccagtatatcttgaattgaattggatctatccaatcaatctaagaaaaaaaaagtaaaattttaatgttaattttcgtatatacatttagatttgacgtataataatataaaatttaattactcatccaaactaaatgagaatactaattagttcgattgaaggttggatgtagtggatttttagacaccctatctactatccgatccgatccaattaaatattataattaaatcgattctcgttaaattgtatcaatgcacatcgttaaaaaaatatacatatattttcattttttataacaatgaaaaaatcttaagaagattgggagagcattatttggtcgtgtatttattatatttcaacaattcacatttgtccattacaatcttttacttgacattttctattttattttatttttgtagaaaggcagagatattattggactgttttaataattaataaatgaagattgaaataataattaaaccaatccggacacctaacagcataataattaaagtgactgtttcgggtttcgactttccattacatccattcctcgtatcgtatttatataatattctctcttgctctttcgctcattaaagtttctatctaattaaccagacgagacgacatgtcgtccagcatcaccagctccgatgaaacatcggccaacatgtccaccagaagcctcagccagatttccgaagttgaggccataaaactgggactcgatctcgtaccggccgccaggcgaaacatcggcttcttaaaagccgtggctgcgtctcaatggcttcaccaaaaaccaactcttatcgaagccataaggaggtcaaaactcagttaaccaactttgagtgtgctcaagagttgatcatcaaaacgctcctagattttatttatattgagtgttcttggggttttcaggtacaatgagctttggatgccgttaatttccgatctgacggtggggtcaactcctccattgattcttcctcctattgatattgaatgggtttggttttgtcatacattgaatcctgtaagtaaagactctgtgcattttctcaacagtcttttggttactaaaaatattatatgaatagggtcctttatttactgttttctttttatggtttatagtcaaagatcaaagctttccatgttatatttcatccaaaaaaaaaaaaactatcgaaccaataagtttgacaaagagacttttctttcttcttttttattggaaaaaggtttcttatagggaatactgtgaatcaaagttgtcgaaatttataggaaaggcagctatttttgatgaagagaatgaagaatacgctttgatgagatgtaaagagatatggttgagaaggtacccggatgagccatttgagaatgaagttgattcggatttgaccaaccctgttgtagctgatgaagagtttttgatggaagtcaccaagcacagatttttgtactcaaagttctcggagccgtacaggtctgaaactctgtatctgatagcagcaaggcaacgttataagggatttctttatatgctgcagaagtcaattcaagtgcgctctcgtttggtgcctgcttctgatattcttctaatgtggcttattcatcaagtctgttctctctctctctctcgctctctctctctctctctctattcaaaataagaatttgagattttttagttcttaacttagaattcagtagttggagtttgatatatatttggccaaacagtctactgtgcatctttttatgtacatattttgtggtgaacagttgtgtaattacttcttattaaactaaattgttatttgctttatttatgaaacagagttacccaactttatatgccgaagatttgagggagattgatagtgttgtgaagaaggtggtatctgtatgggaaactgttaataaaaatgaagtggaagagaccaagaatctttgggagacaacattggaccaaccatatgagaaagctggtggagaaattgactttaatttggatggagttattccagtccagcctccagtttactgggaagtctcagagacagatgtcaataccaaatataagcccatgcaacctagattcttacttgaggttagtttagctctttctctctcatgtaaaattccaaatataagtcaatgctacatatgatttttttttagttgcacacttctctgttaatgaccatttctcaatggagaaaacactcccaattatcaagaaatgcacattgagattattatatttaaaatgtctacaggtaatagtaacaggtctatgtgaaattgtaacaacattattattaacgagtttaaagagagctacactcaatcccatcaccatttaagagagttaaactgagattttctggttttgcaatgtaggtctgtgtgtttgtgaggctgaaggttgacatgaagacaatgcatgaggacagaaaacgtgacacccttcgtcttcgaatgttaaggtgtcacagagagctgaagcttgataaaacaatttccaacttctctaatgaatcatggataaaagcgtggcatctgtattgtgaatttggaacaaagggagtcatagttgagcattgcaggcaaggaggctattgctgcaaagcaagtaccgttgaagaagctgtgacattccattggaatgacttgttaagagcaccctctctgactttgcaaagacaaattgataaagaattgaaaatcatttcttcaataactcccccagttcaagcaccatacttgttaaaatgtgtcccagaccgtgtgacagatgattctggtgccatgatttcagatgtgattctgaagatgaatcattatcatccacaagaaggccggtggctctctcgcacagttcttgatcatgctgggagagagtgctttgttataagaatgaggttatcttcccatcttgtatgttattactcctttttctaaagctcaagattttttctactggcctaatcaattctgaatcaaatgcagggtaggaggaggattttggagaagagggggtgaagttccttcagcagtgaaatgggaggataggattacagagatccgagaaggttcttggtcttatgttgctggttccgtcggtagagcaccaggtctgttgtatatttcatgctagaatttttttcaacgaattttaaatgaattatatagtaatcggtttttccaaatacttgtaaagggctctatcatttcaagatcagggaaacatctaaatttggtcaaatagttgacagtattatattgttcaaaacaatgatcttcactaccttgtttttgaaacaaattttaaagtttgccgcttgttctagtacagagagggtggtaggaacagcaacaccaaaagaagcttctggacaatggaaggctgcatggcagttttcaacaggagatgaattgatgcttcggtgggattcgtcaacatcgatatcaaggctgagtttttgtttgacaaacaagtcggaatcaatggtaggattttgataatcacaatgtgtagacataatagtagtttatttagtaaccaatcttaaacttcaggtgaagctgttgaaagggagaaaaatgcaatatcaaaagaagaaagtcaagtcgcgtggcaatgacagcagagcatctcgaaatgaactagaagaggaagaggtagatgaggaagaagagggttttctaaccctagttaggttcacagaagacaacccaaatggaagagcaacagctcttttgaattggaagctattagtaatagaatttcttccagaagaagatgccatttttattcttcttctatgcatttcgatactaagaagtgtaaccgatatgagaaaggaagacttggggtctttgttaactagaagaagagtgaaggaagcaaaactaggtagtagggactggggttctgtggtactacaccctttcactagttcctcaactcctccttcgccttaccttcaaccttggtacgagaatgctaaagcagttatggtatcagatagttcagatcacaacaaggggccgccggctttcactcacatgccagaggaagggagcgatcagctgtacaaaagtggaataattacatgagttttatgagatacgttgtacatattctctatgtactggttatttgattaaaataaaaatgccttcattagttgcattaatccagtttccagcatccacttttgtaatgtaaattagtggtttaattattcccttgtgtttattcttctttcagactggatatacttgacaatttgtgcttaaagaaattgagttaaatgcttgtgggacattgatagcggagatccttttgcacaaaagtttaaaggaatctacgtacatgtagtggaagctatctaaatatctattgacaacaccaattgacgtagtatatatgcatacatacatcagccgaaataattaaacagtaatataagttaaggaaacctgtttcttaatttacaggtgtgactaattccagagaactatactcattatggttctcattttttcaaagggtctgtgcaattagattctgattctagaaagggtgagcagcagagatcctttgtgtcatcacacttgaaaaaaccatcatatagcaaagaatattttaaaccctctcctcaaaagaaagcatcaaattttaactttgttcttagaaaaagcacaacacaaggtaaattctgaactcaaaagacaaaagacatttctttgtgaacaaacaattccaccacctttcccattaccttttcccatacacatgatataagtaaacaattctcttttctcatcccctcatccagtccaattccatacatggcgttaaccaattttcttgtcattctcatcattctactaccaaccacactttcttcttcttcttcttcccctgactcaatcgaaaccctgcttctgaaagtttgtgacaatgtctacgaaaaggactcatgcatcaccaaagtccaaactgagctcagccaacaatctcctgatcgcagcaggcattcagtcataaacgccgcgcttaaacactctctaaacgaagcacgagctgcaatcgaaatgatcacaaggttcaacactttgtccacaaattacagagaacaagttgccataggagattgtcaggagcttcttgacttctcagtgtccgagctggcttcatccttaggagaaatgaagataatccggtctaatccaaacgacatagctcatcatgaaggtaatctcaaggcttggctaagtgctgctctgagtaaccaagacacttgtcttgaaggcttcgaaggcactgatagacgcgttgagaggttcattagaggaagcttgagacaagtcactcaccttatcggaaatgttttggctttgtacacagagcttcatagcttgccttttaagcctccaagagatcagaattatatcatacctaccaatcagacctcagggttgccgtcttggatcacagatggtgatgaggagctgatccaatcccaccctacacgtacgcatgtcaatgctgtcgtggcagcagatgggagtggaaactacagaaccattacagaagctgttaatgcagcaccaaattatagtaacagaaggtatattatatacataaagaagggaatttatagagagaatattgatatgaagaagaagaagactaatatcatatttgttggagatggtattggaaaaactgtggtgactggtgatcgaaacttcatgcaaggatggactactttcagaactgctaccgttggtaaatattttcagttgaatacctatctattaatccaattttctgcccaccttttcttttcataacctctataattcgaatctacatagaaatgttaacttcattatttacgtagtacattacatacatattttaaaaaatatcattctaattgaaaaggtggaatacaaataatatgagctaccgaacatatttagagtaagactaaagaattgtataagtataccaaacaaaattatgctatacctattatatttattgctttttaacagttagagattcgagaatgaatattctgttccattttttatttattcaaagtcaatttatttttccatttgtcaacagaatatgtgtgatttctagtacatgctctaatttttcgatgtttttttattttctatatttgtttgttattttgaatgtagctgtatccgggaagggatttatagcaagagacatgacatttcgcaacacagcaccaccagagaatcatcaagctgtggctcttagagttgactcagaccaatctgccttctttaggtgcagcatagaaggacatcaagataccctctacgctcactctctccgtcagttttaccgggaatgtgacatttatggcacaatagacttcatctttggcaatggtgcagccgttttgcaaaactgcaagatctacacaagggtacctctgccactacaaaaggtgacaatatcagctcagggtaggaaaaatccacaccagagcactggattttcaatccaagatagctacatcttggccacacaaccaacttatttgggaagaccatggaaacaattttcgaggactgtttttatgaacacttacatgagtggtttggttcagcctagagggtggcttgagtggtatggtgattttgctttaagcacattatggtatggtgagtataggaattatggaccgggtgcagccttatctggccgggtcaaatggcccggttatcacatcattaaggatgctggcaccgcatatttctttaccgttggccggtttattgatggaatgacatggctgccgaggacaggtgtcaaatttacggcgggtttgcgtaattaaattagttaattatttagtcttccgaatgttttcttaacaattatttgttgtttgatttatttgtatattgttagttgtaagtcaataatcgcatataataaatttttatgaaagtcaatgctaattgtgagtaatccctaattaatctatctatttatctatacatctatccatattaaagcctcgtttcatacgccgtattgtaatgtattgtattgttggattgtgttgtgttgtattgtactgtattgtattagtattatttaatacaatacaatatttggtattaacttgtattaattgatagtgtaaagatataatatatttttaatacactcgatcccaacacttactacgagtctgggtctcgcgtccgggtcagagtccggttccgggttcaggtccgggcccgggcccgagtctggggtctgagttcgggtctgggtccgagtccgggttcggatccaggttcggggttcgagttcgagtccggggtcggggtccgagttcgggtcgggtcggagttcggggttcggggtccggggccgagtttgggcccgggctagggtctgggcccggggccgggtccgggtctgtggtccggggtcccggatccgggttcggatggtgttgaccctaaattttttgtaaatattataatacaagctaatacggaccatttattatgcattaaataatacaacatacattgtattaaaaaattttgtcgtaataattaatacaatacattgcttaatccaaacatagtgttatttattatttaatacaatacgacccttatacggcgtaccaaacgagccatgaaatgggtgtttcggcacataaaagaaattttatagatttttttacatgatagtttatggttatattatagttagttaggactatttgtaaatttttaaaaaattctaattaatttacaatatcaaaaataagatttgcatattttgttgtacgcacgcttttttagacgaatagtaagtaacgattttaacatttacaagtagttttaaatagttacaacatactcaaccatgaaaaaattagacaaaaaaaaaattctaaatgctaaaatagataagggtccaccagaataatgtataggtaaatatacacgtgcttttttatatttttgaatcaaccgacagcgaggtcgtgcagatctgatgcttgctacgtgtgtgcagaaataagaatgaaaagcaataaacaataggatttttttatagagcttcgactctcttgtgatagcgggtaatgacctactctccttttaattatattatagcaagggaattactatctagatcgctatataggtggaatctgttatagtacccttaggattacaatgtatgaatcaatgcttgacaaaactcaagtgttggatagcctagggtaggcgtgtgagagagagagtttatcagacacttagagtttgagatcaggtttctagcttagaggcaacttaggtttttagtcaaaggttaaggcctttatagaggaagccttaaaccctaggtttacaattcaaatcccttagcaatcgtatagttagttagatattaacaaaagaccaaagtgcccttgattctagatattattcaaccattctattgggcttttggggcccaattcgcagcctattatcattggccacgtgtaggagtggccattctatttgcgtgagttcctttcttatgaacttcgagacagggttggggatcttcgtctgatgctccacatatcccaagctgcgcccccaaactttcctcaatttcctcaagttgcctctcctgagagttctgggaatatctctaggttgtttcttgtcccttggtctgcgagttgcgaggtttgcctcgtgaatctctgcttccaagatcaggttgattttgaggactattctcctgcgctgccctggctgcagctatttcacgctctaactcgaaattacgccggtttgcttcctccaatcgacgcctaagatggcgattttctaattcaacgattggtatgtacctggttgggtcgtaggcaacatcctcatcaacctggttaggaaatgactagttgttgtttatcctcagtccttcaagctaagaccccaataccgggttttcctggagctagcagcctattcatgtgatgaatcgatagatccctggggactcaatggctcttttccagggcgatgattgagtacttcatgaggattattttcttcgacgtcatccataacttttatgtcaggaggctttttctgagctttttcatagaggctctactgttaacgcaaatttcgttaaccaaatttgagcctcacaataacaatttcacacagaaaaaataaaagctatcaaagtaaaagtatgaacacagggttttttttacgtggttttgtagttaaaattctgcatagtccacgagtcaatcttattcagatttctgattgttttctcagggcctcttttgtatgagtttttttttgtcccctttttggtcttacttgtcactatttataatcgtatagtgagcagttaattacaaagttgactgtaatctttttacaacgatcatcccctagaatcatgggatttgattacacatcacgttaagtaaatgcagttttatttaaatttcacacaactgtgaatatcccgcttttattagaccaaaatgaacgcgtattaaagatgtatggtaagccttatctcattggaatatctcgctgggaatggagctgagttaactctgatggcgagccagagctcgtcatatatcttctcgaggttgatattgcttttactttaatttgacaactacagtttctggtgtc

SEQ ID NO: 295369 - DNA, 5696 bp, Cannabis indica
attctttcttgactatgagtgagacctaactatggtttttcatttctaacttgttctgggttctgttttgtggaactgaaattcccaattatcgtgctttgctttgtttatcctctcgataaaccctaatttcacagaactcgattccaatatggcaactcaggacgagtttatggcggacgcctccgactctgctcccggaagatccagagcccctaggttgtttattaaggaaatggttatgagaaatttcaagtcctacgccggtgaacaacgtgttggtccttttcacaaggttagggttttcacttgcttcttcttgttctacctttaattgtgattttcactagttcgaggttgggatttggctcggtttatgacgaaatttgggtgattatggtatttgggtatgtatttttttttctttttagtcttgattgtggcgtaattgagaagaaaatgaaagccaagctgtgtcagatgaaggattactagggagggaaggagagagaggatgaagtttagattttatttcacgtctttccgttgctcaaaaattgagttttgttgagttttatatccattatcactgacttgattttatttttcgtatgtggaatcagagcttttctgcggttgttggacccaacggaagtgggaaaagcaatgttattgatgcaatgctgttcgtattcggaaagcgagctaagcaagtatggaaattttacttttttgggttattttacacctaattgttacttaagatagtgacatattttcttttgactaagctagaatacattcttgattggaattttccctattatcttgtgaaggggttattagtatttatgttcctcattgtgttgatgtagttgagtttttgagaattgcagaagacaataatggttaatttacagtgcaatgcattgatttatacttttcctcttttgttgctttttataatcggacattgtcaattgtgtagatgcgactaaataaggtgtcagagcttatccataactctactaatcatcagaatctggacagtgcaggggtctctgttcacttccaggagattattgatctggtaaattttgtttagttacaattacatgtagttctatttttatgtacagtttgattatgaggaaaaattttaactttcaagttttatctgttccgtcacagtatttgtaaaagtgaaaaatttagttgacctttgcaaatggctctcttgaattttgtcaacatgcattcctgttagaaattcatacattgtgaaattttattattggtccaacatttttttttgacatcaattttctttatccaattttatttacattattaattctgttttaaattattacaggatgagggaacatatgaaacagttccaggaagcgattttgtaataactagggtggcctttcgtgataattcctctaaatattacatcaatgatcgttcaagcaactttactgaagtgacaaagaaacttaaggggaaaggagttgatcttgataataaccgttttttgattcttcaggtttttatactcacacagttgctcttctttatttcatgactcatgagtttaaaacaatgttttttttataatatttaactcattggttgttatcagggtgaagtggaacaaatttcattgatgaagccaaaagctcaaggaccccatgatgaaggctttcttgagtatcttgaggacattattggaactaataaatatgtagaaagaattgatgagtcctctaaggagtaagtactttgttctctctctttttcgattgaagttaatgtactcttggttcttcttcttatgttcatctcaacatgtgatgggctattgattttactttcaacatggctattatgagaatttcagattttatgactaataacagtgattataatttttaattcctaccgattatgattcgatgtttagaagtttatgtaaatctcttgaattaattggtatagaactttcacacctttttatgtttagtcttgtttaattggttttgctaggttagaatccctcaatgagaaacgatctggagtggtgcaaatggttaagttggcagagaaagaaagggatggcttggaagtatgagtagtttacttatttagaattattctttaaccatgtttcgtttacctgctaacatacatttttgaaacaggatgtaaaaaatgaagcagaaggctacatgctgaaagagttgtcacttctgaaatggcaagagaaagcggcagcattggctcatgaaggtaccactacgaaaatggttgagttaaaagaacaagttgccagcttggaagaaaatttaaaaacagaaaggtaattttcttattgaaagatgaatagctaattaaaagtattcgagcttatttttaatctccaggttggaaaaaaatttaaaaacagaaaggtaattttcttaatgaaagatgaatagctaattaaaaagtattagagcttatttttaatctcttgatccagggagaagattcgtgaaagtcataatagattgaaggagattgaatctaagcacaataagcatatgaaaaatcaagaggttagtctacgtatctttgacactgagataatattgcttcagaaaagaaaattcaaaattctagcgcacttgttatatttgtcagtcatcgttactcctgactggattcattttttttttttttgtgaattcgtaggatcttgataatactctcagaaaatgtaaagaagaatttaagcagtttgaaagggaggatgttaaatatcgagaagatttaaagcacatgaagcaaaagatcaagaaactaacggataagcttgaaaaggtaggttatatacattattatattttgtgaacatatacatacgtctcaaatctgtctttcatctcaggattcatcaaagattgaagactttaagaaagagagtgagaactcagcaaatttgattccaaaacttgaggaaaatattccaaaactgcaaaagcttttggtggaagaagaaaaagtactagaggaaattaaagagaattcaaaaggtggggcttgtacttctcaacctttaagagtttaggttttgctattgtttgtatacgattttgtgtttggacctcagatattatagtgtagaagaacgtattcccatcatgcagtagtgaagcttagatctgatgtgactgggtaactcaatgtctaacatatttttctatttgattgattgacaagcagttgaaacagagagacaccgctctgagcgttttcaaaagtttcgtgctgaattggagccttgggaaaaacaacttatgagcacagggaaaacttgaagttgcatctaccgagaacaagcttttgagtgaaaaggtgaggctttaatagtttatattaggactttgaacatcagcttattgacactaatagctaataggtaaacaatcgccttgttgtgttctttttactgtacccttaccttttctctttctaaaatgttcacatggccctttgctttgtaatgtttttaaaaatttttagctgacagagctgctcaatttttctagcatgaagctgctcgtgcagcttttgaagatgctcaaaagcagatggaaaacattttaggtgctattgaaacaaaaactgagagcatcacaaaaattcaaagtgatcttgaaaggaacaaacttgaagcattggaagctcataaagtggaacaagttcgtgttttattgatgtacatttgaactttagtttcttcattgctattacaggatatgatgatgacatttggtatgttgtaggaatgcatcaaagagcaagaagaattgattcctcttgaacaagcagcaagacagaaggttacagagctcaagtctgttatggattcagaaaggagtcagggatcagttcttaaagcaattttgcaggctaaggagtctaaccagattcagggtatatatggtcgaatgggtgacttgggagctattgacggttagttgccttgccttgcatttaatgaaataaaaatgtatttatgcatacattccaagtttgtctggagtggcaatattgctttattagctttcttggctagttctataattgtgctcttattcatcaaagctgtcgggagcatagcaataatttctgcttgtttactttagtatacttgtgcttctaatatttggggctcaaatactgacatgatgtctttatccagttatttattaataagcaaaaccacattttataatctgccattatgtggaggcattaattctttcttgaaatgacaccatctttgcagcaaaatatgatgtcgcaatatcgacagcttgccatggacttgattacattgttgtggagacaactggtgcagcacaagcatgtgtcgagctactacggagagagaatcttggtgttgcaactttcatgatattggtattcatgtgcaatttgatatgctattagtctctttgatgcttaattattacgtaataaaattcatgcaatagatgatattctagatagcttagctaatttccactaatggtacctttgatacattagagaaaggtaactttgggggctatggctgctgtatttgttgtggcatttactacgaccacacccatttttgtgtagttttcaaatattttaactgcaaccctcttgcattgaagagttgattgttttgttgaatgctgatataggttaatacttgtacatttaacagtgaaaagttaaattcactaactttcttcccaattcattgattcatgtgctaggacgtttggcatactctaggagaaggcctaaaaatacttaagaaaaaggactaagtaaaatttccagctgtaattttcttaatggctctataatctgtactcttattacaggttctgttagtttctcggtgagtttgttgtaaatcggctgtgataattgtctataaatagtcggcttagctgtttgtagagggacatttgaaattttggtgatttgttcagagtgtctgtaagaatggaacaggtttctgttcaagtcatgatatttgagcctctgaaatagcttaacatcattctaaccctctgactatcaatagagttgcttcctagaagcttttattttattaaagctgtaagaccttttgagtatgagtttgcatatgttgaaaataacttgtctgggttttatttaattttctgaccattttttttttaatattatcaggaaaagcaagttgataatttaccaaggttgaaagagaaagtgcagactccagagggggtaccacgtctttttgatttagttaaagttcaagatgaacgaatgaagctcgctttctttgcagccttgggaaacactgttgttgcaaaagatcttgatcaggtgtgttttttgtatttatgtgtttcatgtttgtccttcatatgcatgtgctagtactttcacatgttgattactagtaatacttctatagtactagaagcgtgttgatattcttcatgattcagtttatggatagtagggcttttaaatttcttgcttcagtcttgggttttctgtatcagttgctacaataacattataaactgccaatgtgctaagcatgtcaagtctttcttttccctgttttttggtattgtataatcaactagttt

SEQ ID NO: 295370 - DNA, 5224 bp, Cannabis indica
agttctcaacttctctaaaacaaaagtgaaaaaaaatgatactcttttaaaatctctgtctcactactatagtattaaatcttttcttttttatctaaattttacacaattgccaacatgacatgttttcatatttaaaatgcccacccaatgactttgtgaagaggagactggattttttacattttgcaatgaactttggacttatttgaggagttggttattattgtgctataaccactaaatttttttggaagaaaaggccactatataataatcttttccattgtagaaacaatgaaaacattgattttttaaattattatttttaaagccattttgttcatatttatgcacaggtaaatacagagagggctatccgtcatgcaatccaagaccgcctgcctattgtagttgtaattaacaaggtgaatttttatttattcaatgttcgggcttctcatattcatatttttagcatatcgagttatgatttatcttccgtaagaagtttgtttctatacacagtacccttgcattatcgttctgtttttttttttttgagaggattgcttgtacttcccttgatattcatattactttcttaattcaaggttgacaggttgattacagaacttaaacttcctccaagagatgcttattttaagttaaggcatactctagaagtaatcaataacttcatatcttctgcgtcgtccaccgctggtgatgtccaaatcattgatcctactgccggaaatgtttgcttcgctagtgctactgctggatggtcattcactttacagtcgtttgctaaattatatgtgaaactccatggaatcccttttgatgctgataagtttgctagtcgcctttggggagatttttactatcatccagatacgagggctttcaagagaaagcctccaagtgggggagaaagatcttttgttcagtttgtgctcgaacccctttataagatatacagtcaggtgattggagagcataaaaagagtgtcgaggcaactcttgccgagcttggtgtaactcttagcaatgcagcttacaaattaaatgttagacctttgttgagactggcatgtagctcagtttttggttcagcctcgggtttcaccgacatgctggtccgtcacactccttcacctagggaggctgcaactagaaaggttgatcatatatatactggacctaaagactctttaatctacaaggctatgaaagagtgtgatcctcttggtcctttaatggtaaacgtgacaaaactatatcccaagtccgactgtagtgtatttgatgtttttggtagggtttatagtggcacagttcagactgggcaaactgttcgtgtgttaggtgagggctattcaccagatgatgaagaagacatgacagttaaagaagtgacaaaattgtgggtttatcaagctcgagataggatacctatagctgaggctcctcctggttcttgggttctcattgaaggagtggatgcttcaatcatgaaaactgctactatttgcagtgagtattatgacgaagatgtatacatctttcgacctttgcaattcaatacccttccggtagtgaaaacggcgaccgagccattgaaccctagtgaattgccaaagatggtcgagggtcttaggaaaatcagcaagagctatcctcttgccattactaaagttgaggaatctggagaacacacaattttgggtacaggcgaactgtacttggattctattatgaaggatctaagagaactctattctgaagttgaagtcaaggtatatattttctaatgcttttgtctttttgtgtgcttataaacttaaaattttactccgaataagttttttaaaattttattttccaagggtttctgtttattatgctttctcacttaggtttgattccaaacgttgtaggtggcagatcctgttgtgtcattctgtgaaacagtggtggagtcttcatctatgaaatgttttgctgaaacacccaacaaaaagaataaaattaccatggtaggggaaataatctgatctatatttcacttaagcactgctgagaatcttctaatatatgtttatacaatctttaagttattcttgtatgattttagattgcagaaccactggagaggggacttgcagaggacatagagaacagtgttgtaagccttgattggcctcggaaagatattggtaacttttttcagacaagatatgaatgggatgtgcttgctgcacggtccatatgggcatttggtcctgataagcaggttagtaataaatccctagttaaaaatgataaaggaaaaaaggaaaaagaaaaaacacgcggacatgtattatggaggaaatctaaattgatttattacgttgcatgtaatcatccccaagtcttgtctcactacttgcttttaaatggcaaacatttaggggcctaatatcctgttggatgatacactttcaactgaagtcgacaagggcttgctaaatgcggtcaaagattccatagttcaagggtaaacaaaatagtatcttaagtctttctttttccctgatcccatttttgtggatcgtattccttgcctactaacaacaatctgatgattttgacagatttcagtggggtgctcgtgaaggacctctctgcgatgagccaattagaaatgtaaagttcaagattgttgatgcaaaaattgcccccgagtcattgcatcggggatctggtcagatcattcccacagctcgacgtgttgcttattcatcttttctcatggcaaccccccgacttatggaacctgtatattatgtggaggtaaatggttgttgtgttgatgccattcgaagagcaaaaaaaaaatgttgttttctattttgtcggcttattgggttttaatgaaaacaataattgtgaaatatcagtttgaaaattttatgattataaaatattgttttgaaactgaaacgtaatttttaaaaatatattagttagttgttttaagatatatagatggaatagagaaaataacaaaatgatgttttcaattgttatggggggacttggtgtgtctctttcattggagattttagcattttatcaacacaacccataaagcattttcatgtgttacaaatgtttaatgtttttaaattcgtgaagttatccttataaaaaaaattgtgaagctattttcaaatcctaaatcaatcaaccattataatttcaaccgaggtatgaatgtcaaaactttatctaattatagttctgtcgataccggccaatatgtcagtcaacgtgtttttcatgaatttcttaccatgtggaacttagtatttcattctttattttgtgattaacttatgatgcattgtttcagattcaaacgccaattgactgtgtctctgcaatttacacggtcttatctcgaaggcgtgggcatgttacatctgatgttcctcaaccaggaaccccatcttatattgtcaaggttggttaccaaattttgtcatagagttacaacaagtaatttcatgctcctgcttcgggtattagcatgagcattgaagctggttattgatgtttgctcagtaatagtcaacaaattgtaaagttagggacctgttgtagctccaagttttgtgtataatatatgtcgacctttttcatgccaaaatacttctttgtggtcctgtgggagttgatattaatgagttctgttgattttagctgattagtttctcttgatttattttttcttatattcttctggatttcaggcatttttacctgtgatagaatcatttggttttgagacggacttaagatatcatacccaaggacaagcattctgcgtatcggtttttgatcactgggctatagttcctggggatccccttgacaagagtattgtcctgaggccacttgaacctgctcctatccagcaccttgctcgtgaatttatggtgaagacaaggcgtcgaaaggtatactcatacgtctctcttcttttcatggagtcatgattttttgtattctttggtctttaaaattaggagacagcttaaccaagaggggtttctcaaacaatcaggtctctggtttgctcccataatacttgaagtcttttgagtctctttagatacctgtaccggaattgttatagtttttagttaattattatagattgaggaaaaaagttcagtttcaataaaattactgaaataaatttagggggcagatttctgtatgcatttgaccttaaattaagagtttactgaggaagtagttcaaacaattagacatgtggtttgttcccaaaaatgtcttacatttgagtctattgtaggtacttagcaatttgttttagtttcttaatcaccaaatattgtaaggtttcgcagagacctagttttcttaatcaccaaatttgctttaccttccaagttccatcctaggttggtctgcacttccttatttgtaatgggggcttaagcccataatcttcagccgttctaaattaccgaaaatgaggaatgatatccaagttctaacatatttcatgttatgattgaaaaaaaataaatctattagggaatgagtgaggacgtgagcatcaacaaattctttgacgaggcaatgatggtggagctggctcagcaggcagctgatctacacctgcaaatgatatgataagttcatatttttggtgtttactttgcttatagctaagttgctgaggataaaaggggttggtttgaagacaaaattgacctcactatatagtgtctgttgagattatagtttagacatctttgctatttgccttttcttatttcgtgcctttgtcgtatgcgatttttgtaagttgtaacccaaaaggaaatgtacttaaaatttgttcttcttagttttgtagctttttgtatcccatttcgattatatcatatgatctttaatattatctttaaatcaatattgatgactttatgatatcactactgagatcaatgatatctgtagatatttcaatggagaatccacatcaaatgtttattgtattacaataatgacataatcaaagagtagctgtcttgaagttgaaacactaggtcacatcaataataatgttaggtggtatttttggaggtaataaaatggaaaaaaatgaaataatttttattttattttttagttt

SEQ ID NO: 295371 - DNA, 4778 bp, Cannabis indica
tgtatattgtatactcattttattttacttattttaattttaatttttacttttatttttatattctttaatatatactcacttttatagatgatgttcctattataactcttaggttaatataaattatgtgctagccttaagtggaaggtgaaggtatattgaacaactcactcacaaaagttagtacattttaatgaaatataatatgagagtgattttcattaatggatacgaaaaagaagtattcctcaactttgtgaatatttcgagtgtgactaatattgattgctcttttttgtctctacttttacgtgtgaaattgctcattagaatatttgatcagatactgagaataccccaaattcccaattagttaatttgtcataagccattttttttgtatttttttaccaaaccgtcatgccctacacttaacccttcttactatttctattaactttttttggaataaaagcgtacatgtaataaataaaaatagttagatctcgcgatcattacataaaatgtttataggtatggcagatagcggaataaaaccaaacctctggtggaaaaacgcccacttagctacattatggacaacaaagttataaattctgctaatattagaaaaaatacaactaataaacaaaggagaataactattacaaaaaggatatagttttcaattgccagtggaactcctttatattaagagcattgataactactctcaagtcgctctccacaataacaaatccagaaccaatgtccctagcaaccaataaagccaaacagcaagccaccggcccaccgcttctccgcataatggattttttaacttatccccttaatttgtgatggaggcttattatttttgaatgggctcatctccttttaatctctcagcccattttcctctttcatggcctaattgtgttaccccaacatatttatatattatatatattattaggttattagaataagattaattagttcatgcaaataataataggtgcaagtacattactttctattaattggagatgataaacgacgcatgggaagacatggagatataatttttttaatattcattattaattaatatctacacttgttttgcaaaaattaaatgttacttttcatgaatcatggcagaccatcttgataaattagattatgattttatttttcttgaatatattctgtacagatgttatagatggaacccaattaattaagttattttagagaaattaaattgtgtactttttttttggcagcataatattattaaatattgcattgtaagttatatttgctgtttccaccatatatctgaataatgaccttagattaatgacttttggatcatcacacccattagtgtattatgttatttcaattatatgtggaataattaagaccttattggaaggaacaaattatttaacctttgatcaagagaaggaatagcttaaagttacatatatatattagtgacaatttatatatatatatatatatatatgtatcaatgtgtgtattcatgtggccaagcacgatagctagctttatctcaattcttatttaaaattaaaaaagatgttaaaatacaatggttgttgttgcatatggaaaagctcaaatatacaagtgctttaacccaaataggaaactatgtaataagctattgtctacttgctttaattaatttcattaatattaatggccggtcagtggcttaaaggagatgatagcaacttctagcctcattaaaatctgtatttttttttaaaaaaaatctgtatttttattctattatatgcaatagtgtgtggggataggaaaaatagtcaatggccctatgaatatgaaggggaaaaaaactttaaaaaagttatacatatacttcccaagtgttccatcccatcccatatatagttactataataattaaagtgtcatcctttcaaaaaaaaaaaaataattaaaaattaaaagtgtcaaagaagtgaaactatttataaatgtagggcatgatcttcatagccatgaaagtactcactttgatcattaagatatataaaaatatgtatgaacaatgtgcccattttctcatgatcagtctatatggaacaactttatacccattgtgatccatgaatattggcttttttttttttgcttaaaatagataaaataatcaaacggattgaacatttagggctcgtttggtatgccgtataatgatcatattgtatcaaataataaataaaattatgtttggataaagcaatgcattgtattaattattacgaccaaattttttaatacaatgtatgttgtattatttaagacataataaataatcagtattagcttgtattataatatttataaaggatttggggtcaacattaatctccgactcggactcggatccagactcaaacccggacccggatccgaactcggacccgagacccagacccaggacccgaacccgaactgggacccgggacctagacccggacccgaaccggccgggacccaaatctggacccgggaccaagacccggacccggatccagacccagacccagacctgggacccaggacccgggactcgagacctagaacccgaacccagaaccagacccgggacccagactcatagttagtgttgggatcaaatgtattgaaaatatattataactttacacaatcaattaatataagtcaataccaaatattgtattgtattcaataatactaatacaatacaatacaatacaacacaatccaacacaacacaatacaatacaatacaatatgacgtaccaaacaaacccttaatcgtttatcatcatatatatataattatataatatgctttcactttatattttcccttatataatatttagatatgagtatcatatgtgagggttttctttttttcatttattcctaagaccccaaccaattccactatgaatgatatatggaaaacataactagtcgggggcacgagtgaatatatatatatattttttttcgaaaatggtcataacgactacactttcttagagagaacctctaggaagcagacacttgcattcattcataattatctcatgcagaacaagagagtgaatacaagaaggatagtcgggccaccatacatatattgctaacagtaattaataaagcatacttaactaaagtatgagccgccatattaaaaattctaagacaatacattagactcaccaaactgaagttattaaaagttaaactaaaatcattcagaacaagtcctaaagaagatccaataacatatgattgctaaatttaaaaaccaaatttagacaatttgactcaaaaataatattattaaaaccaaataaacaacattgagcactcacacttcgaagaacccaaagcttatacgagttcatgtaagaaacctcccactaagaactaagaaccgaggccaaaacctctctttgtgcagggatgaggttttgcttcaatataatgtaattaatattttacctattatatatatattttcttttaaaggtaaacgtaaatatttattaatagataaattagacataatctattttcttagggtaaaattatttaaaataggctaactgaattgttaataataagcgaaaaaaaactccaatgattacctcaactaattattacttttagaacaagtggacttagttagttagggttagttttgggttgttaatcttgatattttgtagctaatctttcggttaatagttggttatttttccaactgattttccttgtctgaactgagctatataagctcatctcttatttgtaaactcaagttgaagagccataataaaattcttgctttgttttcactctattctctcttttttctcatatggtatcagacgacatactgcccaccacttcaatggccatgccttcaactcgatcctaggatggtgctcctccatcgtccatcgacaaccaagctgcagaggtcacctccgatcctgtaccagctccaaatcccccagcaaattcaactcgtaatccacaaattagggttcaatctcagaccacagacccattcccacaagatcgctccaccatagttgacgacaacacaaaccaagctcttacttctcgatcggtcgctaatgatcactccagccccttctacctcagcatcggcgatcaccccgaccttgtgcttgtctccaccgtcctcaacgacaccaattaccaaccggggaaacgaggaataaccatggcgctcactgccaagaacaagatcgcatttatcaatggatctctcgcccagaacctggtaacatctatcttaattcttggttaagatgtaacaatatggtcatgtcttggttgattaactctgtttcgtctgagattgcacaaagcataatgtattttgacttagctactgaaatgtggaacgatcttgctgagcgtttcaatgaaggcaatggccctcggattttccaattgcagactcaactcacccgacttcaacagggtgacaattctgtttctgcttatgggatgaactcaaagagttccagccaattactacttgcacctgtggtgcaatgaaagtattcttggattgtacaaccagaatcaagtgcttcagttcttgactggtttaaacgatcttttgcctcggtttgagcacaaattctgctcaatgaacccatacctaacctgtc

SEQ ID NO: 295372 - DNA, 3274 bp, Cannabis indica
acaagcttactttactaatgccttaaaaaaggcataccactttataagtgtaagtaaaccaaattgttgattatcatatcagtgtaaattctatgtactgataaatcatgagactaataatttaatcacataatattgattattttccactatgtagacaacacaataatcatgaataacaatatgataaaaatttatatatcaaacaaatgatcatgaaataaacatgtgaaccaagcattattaaataattttgttcctttattgataaataaaattgaagatgacattgaaaaagagttttagttaggacacaaaatccaatattttatatattctctaatatattatccattaactacttactttttgggcataaactcttacacaggtttagtctgggtccctttctgggtccgagtttgggtgcgaggtttgggttcaggatccgggttcggtcggggtcctggttcggggtcgactccaggttcaggtttgagtttgtgtctaggcccaggtctgagtgtgggtctaggttcaagtttgaggtctaggtccctgttcgggtccaggatctaggtcaaggtttgggttaggttcgagtctggggtctaggtccccgtttaggtctggggtctgggtccgagtctaggccatggttggggtttgggtcgaatttattttaatgaatttataattttagaggacctattagttcaattcaatatcaaacatagtattgtttaaataatactaatacaatactaaacaatataatacaatacaatacatcacgatgtaccaaccgagccctataatattttttttagcgctatatatttaagaaaacatcatttaaatgttataattcaacccatgtaactaaaatttttcagttgattatattatttaattgttaaaattttctatgttatacgcatttaataacattttaaaatgtaatcgtacattttggataaaaatttggtatttggacatcctgagaaaaattaggtattttttgtagaaaattgctaacaattggtttccttctttctccaatctttgtaatcttgggatgcatgtcaccaatctgagttccttctagtataagtggtcagagactattgttcatgccctatggaattgtgagaagttgagtgcttctagaagcaccatttaggatatcatctatattctgctctatactagaatggatttctacgaatttctatctatttgtttggatgttatctcttgcagatcttggaaaattatttgtataggaagaatatttttctgaatgaaaagaccctactgtttggccaccttggagtcttgccttccttgacaaacatcttgttgtcgtcaggtatcatgcgatccttggtgtcatggggcgtcagccattgacagatcaatggtggaagaaagaacctacgagtttgctaaaattgtactgtggtgtggggcttgatattggtgtgaaaaaaattagtgtaagggcagttattgatgattccagaggctgaattttaacttttagtacatggttttggaatattctattggagttcattgttgctgaagctatgatgatctattttagtgttgtgttgtgctctcgtcttggatgctctatggtggagattgaatcagattgtttcaatgtggtttgtgccatctctaatcatcatgtggatcattcctactttagatatattcttgcttattgtaataattttattagtatttattttaagttttgtcctaagatggcgaataatgttgcagactcattagccaagctagctttatcatttattgataattatgtttggtggtctaactatcttgattgtatctatgttgtccttcaagacggcatttcataatctatatatcttgagcactctttttgctctcgagatttcttattggatttactccaaaagttttaatgagatttattttctaaaaaaacaataaataaataaataaataaacaatagtacattttcaattacattataactatgttatacaattgttataattttagaataattactctttattaatcttatcttttagtttcttgcaacactttataataaaattgtttaactttatagtgctaaatttttttaattattcttttatttattgtaattataatttgataaaatctaatgtatttcttgtattatccaatcagtacatgtgttctaaatattattcttcttcttctttttctttttttgctataatgtgctctaaataaaattgataaagcacaaaacatatcttaatgtctaacaagtaacaagtctaatatagacattaaaaacaagttgtaattaatatttgtacggtgccttctcttcacttagttgcaagcatccaggtcttcactatcttcatcatctaaataataatttagatagaaatattcaataagaaacaaaacttgagatgaatttatgttatcaatttcattgcaatatagaatggaagcatgtacagtgtcatgtcaatacttcaaaaaaatataatgaaatttaaatactaaccacattcagtttcaatgttacaattgaaaagaatgatcaataaactcataccttataagatgactataattctcaattgacattagagctccataactccatgaattaagcttttcctttaactgtttaaaatatccaattgctgccgaaagaagtaaacatcaaactcaagcaaaactcatcaacatcaactaaatgaaaatgaacaaataactagcatacttaatgcacataataaactttgtttaagcttgaaacaaatatctaattattattcaactatatcaatgagtacgccctgaaccaccttatatatgtatacattatattttctcagtaacattaccaccaaacccaggaaaaaaaattgtatggtttttgtataggtaaagaaggtacataggatcttcctgctcaagaaaaatataagccaaagtatcataggtagtttggttttggttactgtaaaaagttgttgggctactctgctatgctttaaatttaatctattaaccatatcttccagtaaatggatcattgtacaaacgtgtcacaagtggcatggatctctattaacaaatttgttcaacaccaagctaactatatgcaaataagaaaatgatgcaaagcatttagattaaggcttagctgtatgcacatggtattagaatatttttattatggaaattattttctaatta

SEQ ID NO: 295373 - DNA, 6856 bp, Cannabis indica
ccatttacccactaaaaacaaaaaaattattagtagtgtacaacaacatttttattcgccattatacatcatcaacatagcaagtcattcaaagattaagagtgactatgcatagttctttcgaatcatgaaagcttgaacgaatctctcccactctgcagttcttataatgtacataataagcgcgaagaaaagaaaactatagaaaaccgaaaaaaaaaaaaaaaaatataaagttttaacgaaaatggaagagggtaattgtccctctccctaactggtaccgacgacaagaaaaaatgaaacgaattcataatatataagtatgttcctattgtgtgtgaacctgtcactttgttcttgtaacgactctttgggtgagatctactagtgctcgtctcgatctttttacatcttcatcatcgctctctggaagtgactcgattgcctcagcagcgaggtttgcatgctttattgcaagttccctcgccttttggatcccgcgactctttccaaggtagtcgagtgcctgtgttttttgaattttacatgcatcattactcggttatgctaagaacacaatttacactatgaccccgttcatagggacactatgatcccgttcataggggtatatcacattacaacatgaacaagcatcacaaattatgcatacaacactcggttttaaagtacttacaatgtcaacatttttggggttttcaaatccctgctcaaccacggcgcgtaactgaggaaactcttccatggcgtacaataatggagctgtaacaataccctgcaaaattttaatagaattatgcaaagacatgggggacaggcaataaacataaagccattgctatttgctaccatttgttattatattctccaagttttttcttaagcaagattagcatgaggccttaaagaaaaaatcatgttttgtagagcaagatttcggatgagagttctaattgtcaaagcaatattttcttcaacagaattaataattacttctcttatgatctgcatgggaactgttcgatttagaatttcgcaatggagtgaaattgttcgaatgtgaaaactaacagattatgtatgaccagccttttttttcttttgaagctcaaactctaataatgtcatcaaacaaagataaaccactttaaaagatttcttacatgacggatatcagatagcgagccctttccgagggaagctgacgtgccggtgaaatcaagaatatcatctatcaattgataagccaaaccctgtaacaaaaaatatacagatttacatcagctaagattaaaaataatatttgtgcataatgctaaaaaaataagtggtatcgaaaatttaattgataaaagaatatttgaagtagattggcaactaataatgatatcgatgagacaagtttacaagaaatttgagttattgatactgatcatccatcatatgatcgaacgatgagaagaagcgttttctttcgccatagcttaagattaccataatgatttactttgtcaaattttaagtcaaccgatcactgaagcagagtagaaagaatatttgggttgagttactggaaaataaattccgaagctgttttcttatcactaatttcttggtagatatttaaaggacatgaacaatgaacttgttaagtacccccaatgataggccagccacccatcagcaaagacaatgtgcaatgaaacaaatataacgaagcatgtttcgtgttagaacgaaaagaattccaagggttcacttaccaaatttttgccgtactcaaatgctagcattgcaacttctgtagtttgtccagcaatgactgcaaccgacttgcaactgttcgaaattaacgatgcagttttgtaatatgtcttttgcatataatattccatactgcaagaggaataaaaaatcagcttaagaatgaaattaaatacatgtaaaataaaacgaaataaagaaaagaaaattgattctgattgttttttctaaatcattttcaatatatttaatggtttttcagatttcctattgcaatcagccccaattattataatttaaaaatacatatcgtttcgtaaactgggcaccccacctaaccctacaatatttggggaccgagaaattacaacacttgctatgtaggcacgggacttgaatctcataccttgagggaacaaaccatatgactaaccggtaaccacccctctagattttcctattcttattcttcagtcaaaagacttgaaaagaatcgaaacatcagttttcctcgctaagaatctcctcattctctctctctcgctctctctaatcctatcaaaattcctctactttctctctttgtttcttttgttcaacatcactgcactggcattgacttgatttaatctgaataatgcagcgattctcacccgggagcgagctatttatccaaaatggctaaaagtactgaacataacgtacccttcaaagccagattacgttatcaattttcttgagcagcttttggcacaagcactttattccacttttgtttcagtagtattacgtttccaactaatgtcgagcattttcctaattctattcttagagcatattgctcgataaatcttggtaagtaagagaaggagaagaacaaatagattctatgagtttgaataaaaaaattctaggttctagcatatggaacagagagaatgaaatactaaattaacgaaagcactgaaacttagtacctacaacgttgttcagatgtacatgtcatttgcatggtttcacctgtcacgagctgttctagaaccgtggctagtagcgtaactacctacagattaaagacaaagatcgcatgattattgtctaaataatcatgatttaaaaaagatgtatgcacttctgtatcactgttcaatatcacttgcagaaggtagacatacctcggtattctttaaagctgcgagggcaacacaagctcgagaaagcagaaaatctcctgctaataccgatacctgtaatgtaaaaggacaagaaggagaagctaaaaaattaagctacagcccagagcacatgtatacacattcgtctcctatatatttaaactctaaccaaccaacataatgtgaaattgatagacccccaactcggtacgcatatgctagtagaaagaattaggaggggaagggaatatgcatataaaattttactgggaaattttcaaaaatacttttttttttatgttttatttacaattttacagcctaaagtttttaattacgagaaatactcttgtaaagttttaaaattacaaaaatacacttcgttcagcaaaatgttaaaaaacaactaatacgacgagaaatcaacctcacaacaactataaaaaatcaactataaaacagccagaaacaacctcatgacaactataaataaactataaaacaactaaaaacggtttattatttttactgaagaggtatttttgtatataaaaaagttcaaagagtaaaaatgaaaaattttctgtgttgacgtgtttttgtaatttttttaaaattttttgtctattaggtaattttttcgattttatctattgtatcaatgtgtttgtttgggaagtttctcttttgatatttgttttgtatggagagtttacgaattgaatagtctgagagtgtagggttagggtatgcttattctaatctgtatcgaaccttaactcttgaagagaaactgggactctcgagcttcctgtgatataactaaactcgctctctattttctcagcttgtctttgcttaccttacagtataataaaaactgacaacaatcatatcagctacagaatgacactcaatctaagattttctatcctcacctgaattttgggcctcactaacagagaaggcttgaccagcctagcctcttgtctcaggatggacgtagaagcaaaaaaccgataaaaaatcaagcatggctgatatattaaggtagttaatcttaaatttaattacatacaacttagctagcatctacaagctgaaaaggtcaagagaatacaaaagattctttcaatgcaagaacaaaaattaaaagatcaaattgtcaatatattcactcctaagctgtcaatcttaaaataaaagactccacatcagcaaattcgataaaaaatagtttctcttttctaatctcgaagtgggcatcttatggaaaatattacaagataaaacaaaaagaaaggcaactcaatgaacgaaaaaataatgacagatataccttgtttcccataatgcaattcaacgaaccaacaccgcgtctagtttctgcatcatctaagacatcatcatgtagtaggcttgccacctaagacaacatagtcatattaatataattagattttcatacaggatcaagctttcgacttaaaaattggaaaatcaacaagatgaaacagttctgccttcaaaaataaccaaaccaatgtaacgggaaattcatggttcacaaagtgtcacaagaaaagctttccgaatatatcatttgatcgcaaaagctagggttaagtatgttacccgaatgctacgaacagggatatatcctcatttttcaactacatattaatgtctttttataagtaatagtcaaaagtgaaaagatatggaggttacattatcgcaagaattgataaacattggtcagcattcattgaactatttgattgtgcaagcccttcttaagtcacataataaaaatgttcagataaaagatggtcgaattcatcaaacaatcatgtttaacatgttcaagcatcatctgatgaacatttgtaattcttggacttttcaaataacagatttttcatttaacatattcaaaagaaatttacaaaatactttaggggctcacatggatcatctctgttatttctgcaacagattgctgccttgtacgtaactcgggtgttaaagtatctgctaacgctttagcaggctcgggaaccttaacatttaatgctgttgccattaacaataatacctgcattcaagaaaagaaaataagagagaagaatgaactagtaattgtaatttaaccgaaacatataaaaagataagtcacactcatggtgaatcacacatcactgactctataacagtatgtaaagtcaatatcacaaagaaaatggatcagtaaacaaacctaaattcataaagtttcaaattactgttaaagcattatgtaattcctaaaatagttatacatataagtaatacatactttactttttttagaaaagtaacaaatgattaccaacagtaataagaaattcactgtagaagaacaaagtgaatgaacaatttgaaagtgaagagtttgatttgattgaacccaaataaaactaagaacaaatttaacatttttttatgaaactataagattctcaaatgggatgtatattctgtttaccgttggacgaaatctcttcccctccacacccattttaaagaagtactcagcagcagaagcaagcttgggcacctgaattaaacaaaatgagagaaaccctttatataaatctgatcaaaatgtaggaaaaatcaaaacttgatcctaatgatatgaacaaaacaccaaactattattccttccaagttcaaatcaaacatatacctcagcaactaccatatcccttaacctattagcaacaagtgagagttcatccgcaacaagagaaaaagggtctaattcttcctgaaaaagaaaaatcaaatgctcaacatttgaaaatggagtaactcaaatcaaaaatgaaagcaaacccaatactcttacctcaactaaggagctactctggtgatgaatttggtatctagagccagcaaaaccccagaaacgactttcttcgaaaccgccaaaaatctaccaaacaaaacgaaagccatcaaaacaaaaaccttgattaaaccccatatgattgaaacaacgaatctattcattagcagtaataataaccttgtgggttgaatctctagaacaatgagtagtggtctgtgactgtgagtacccgggtcggtgagagacgaaccaacgggaaaacccattgaaggtggtggtcggaatccgacgaaatccccttgagaatagcatgatttgatttgggaatggagaaagatcagattttgaaacggtcaaatgaagaagaagaagaaaggtaacgtagccgactttggtcagaactgtaaataatgtgaaatagtgtctatatctaatgacgacgccgaagctccgccatgaatgaatgaatgacactattacattattttcttttattttattttattttttccattattcattaatatttcttttttaagtaaaaaaacaaaattgtaaatattttagcttagttctataataattctttttcaaaaaacaaaattctataataattggaaaagagaaattttaatgagcacttttaaaatgttaagcattatcaaaagtgacacgcttggctgttggtgttgtttgaggatgttataattttattgtcttaattttttgaatagttttatctaatgtggctcgcgattaaaattttacagctcatgatttgacaaaacatgtccttcgattagacgatgagctatcttagttcgagaaggtatcgtcgccaattgtgaattgttgtatctttaattatgtgtgattttaatcaccatgtcaaaaaaaatgacacactgatattgatacaatttaaaatcgaatcttaaatattttgattatataataatataggaaatgctaactacttacaaagcgccacatagta

SEQ ID NO: 295374 - DNA, 6375 bp, Cannabis indica
agagagagagagagagagtatgtatgagagaggttgcagaaaagcgtgcatttctcctataaatgtatacatcttagggatcttgttataggttcatcataatctatatctctgccctactattaattatgaaccatcatctctaactgctattattagttagattttgtgacagaaaaaagtatctacatgggttaattatgaatgtctttttaattcgtatttgctcaaaaaatttcttgttaagtaaacccatatctgattattaataaatgttatatattcattttaacaccaattattacttttattaatattttaatgctgggagtctgttcggttgcaatatatattgcatggtttggagtgtataatataaagaagatatatagcaaggtaataatcgttcaaagtttttgaccctaaactggtcagtttcgcacagaagggtatagtacatttctgtatcgacttacactgcagcaataataaatgaaacgtctgcaattggatttccaatatgtgaaaacagtaaactaaccacaactaaagttaatttattacattatttttatatctatttacagatttgattgcaatacgttacgtatatatgtagtcccctatcataggcaatatatatataagttgatcatgtctttaatcataaacttggttaatgccataagaaattcttgatcaaattaattttgtataacatatatagtatagtattatattaaaaaattgtttgtgctaccattaatgcacacatagagtcatagaccaccgcaggtatattaagatgcagaatttctcatttactgacctaggatattaataaagctgaagactcttttgactttccgaagactaatattccttttgcataaatagaaaaaagaaaattaaaaagaagaaatgtgttccttttgagggttggatgaacttttataggggtattactcttttttagttatggaagagtgaaaagagagaaatgacaaggagatcaagcccccaaaaatggttttagttgttggatcaacctaactttatgttaaactaaattaaaaaatacaaaaaaaaagaacaatattaggtctctaaaattgaattaaaaacactattatgttgaagtaattaattattgaaaaataaaggatgaaaaaaagagaagatctgaataatcatgatgaagcttattaattttactgatatacccgacaagagctgttgtgtcaaaacacctctcatctacttataacttctcactgtgtcattgaaaagaaaggtgtccagccctgcacaactccaagctagcacactttgcattgaggtctttcttgtcaatatatagagagacagcctaagactttcaaacccaacgaaaagaaaatataaaaatggaaagagagagatatgaagaagcagtagagtggtgtaaaagtagcctctcattttcacacgtgcgactgatgtaggatttcttgtcaaagagaagagaaataaggacaactactaatatttaatactgaataatggaggatcaaacttgttcaaattaaaaaaaaaaaagccatccttaacgtcagtcagggttgttaactacttaaaagcatactctctctttctctccctcttatggagtcagagacttatacactacaaaggctctgagttttctgagcactattgttaatttcctgtttttctagcttttcttacttcatcacatctcttacctcttcctttctttctttctttatttatttatttttggataataatgcattattttcaccatctcttttttccggctatatgagaagatgacttggaaacagtagtgccatatttatcatccgtggatagtgtcagaggaagaaatgaaggcatggccaaccatcgtgttatttatagtagagaagaaaaccaaaacggtagcagtggtagtagcagtagtagtggtaccctcagttgttactcttcttcagtgcgaatggtttatgcagatatgggatctctctctcttactcccaacctgggagtagtttcttcttctacttcttcccacgatagctataacatgtccaagtgttctgaagtggaaaataataataataataataatcataataataatggaagagctttttggggtttccctttgatggagggtagcaaagggtgtgatgtccgtaatagcatcaacttattagaagatgaaaatctgagtgagaatgtgactgagaaggagactcatgatagtaatggccagtcaaaactctgtaccagaggccattggagacctgctgaagatgccaagcttaaggagcttgttgctctttatggccctcagaactggaatctaatagcagagaagttagaaggaagatcaggtagaattatcatcaaaattggttttcctttttaatttatgtaatcttattgattaatttctcaacttatgcacgtctattaattttattccgttaaaaggtaagagttgcaggctaagatggtttaaccagttggatccaaggattaatagaagagcatttactgaggaggaagaggagaggctaatgcaagctcatagaatctatgggaacaagtgggccatgatcgccagactttttcctggaagaactgataatgcagtgaaaaaccattggcatgtgataatggcaaggaagtatagagaacaatccagtgcttacaggaggaggaagctgagccaaagtatttacagaagaatagaggagaactccaactttgttgtctgtggagaagcaatcccgagatcagatcaacaaccattatcttactgcactagtcttcacaataataataataataataatctcaccaatggtggacttgggaatctgtctatttacccttttggagcttttcatggtaataatgttagcagcagtagtggtggtgttggtggggtttcttatggcctgacttgctcacctcaaatgaccatttgtggagaagcattaatgtccaacacaaatgttcattctcctaattatggtggattctgcccccaagaccctccttttgaattcttccctggtgagtgtctttttcatttttcaccactttccatccctactattcactcactaaatgatgtgtatagttttttattttcatctttatgaagttcagttttcgggttttggcgctttccacattgattcccatttttattattcgcttagtctatcttcttcactatacgtgtgatccttttccttctagtactctcattggctctattcactggtcatcaatgttaaaatgataactaagactattcttttttcagcctctagatcgatcagttcatatactttcccttaagtgttgatccattagttatgttttttacaggcgctaaacatacaagttgggagcacatgaggcctaagattgacgaaacactaacacgaaccggtggccttcatcatcataactcaaactaccaaaacatgcatcatgagagcttctccaactcaacggcttcaacttcccaagtctcagttggtgatcagcgctcatcctcaagcaccgctgagcaaaacgccaccagccattttcagaagattagtattagtccaccgtcgtttatagattttcttggggtaggagccacatgacagtgtcccaacttggagacccagaatagaaaaaaaaacaagacctgagaaaaagtgtttaacttccacatattaatcatcaaaagggcctcaatgtggttgtggtccaacaaaactaaggaaccattaggggtaaagaaaaagtgtttgttaatgttttagtttttccaggacctaaaaaaactacttcaaacaacaacaacctacctttcacctatcatgaccccccttgcaatcttttattttctttttcttttgtaagttcccatatcacatgagattctgtcgaaaaaggtgaacaaataaatcagttataatttaaagtatatgttttttttttatgtctttcaatctaatatttaagcaaaaggggttttacttttctgttttgtttagttcttcagtagaagtgagctatagcaactcttgttaatcataaagtgattattgagtgggtagataattttacactttcttctcatatttttcacatagaatgattgtactgatgcgttttctttcaattttcgtggtgaacatgtgttctcaaaatcatataattagctgaagtagaggaagagggaaagtgagagtccacatttaaacatcaatcagataaaaaaaaaaaagtgtgacagggtacaaacaaagtagatagaaaaataaaatgaggagagatggggttaattggttgggttgagtcgggattagggttcacttttttatttttattttgaaaggaaaggacaaaaacaaaaattggaactattggaaacatccttttctcatgggcctgcaaaagctcaggcagaaattctgcaactgaatacacccactaatctcctatacacattcatgaaaggaactgttcaacatccttttccccatcaccagaatgagaatcttactccctcttcctcattaattcatgccatccacatggattacaaattagaataggagtgaggactgaggtggccccctctcatctattttttattgtttcctaagtttattttactattttcattcaagattcatcttcacaatttcttccacctcttaatcccaacataatatttttgtaatgggataaatattttgtttagtatgattaattaaatagattcatcttctcaatttcctaattaatcaagtattttaatcaaattaaagactatgtatataataagtaacattgtatggatcatttctgttaattaaatttttcaatatgacgagtatatttatgtacttctctttttgaaaaactcaccaaaacacattgggctaaatgtgtcataatacatgatcattctgaatgcatgctgctttgctttccttcacgctcacctgtattcagatatattattaataaatattattacaaaatataaacagacagctgacctatctgatgtcacacagctgacttcttttcaacatgtcattgcatttgcaagagccaaattagatgagtagctaccgaaaatattgtggcttcatttgcgttgtaggattttcattttacgcggttcatcaaattaactcaaactcaacacaaggatttgattgaggaaacagtccttttagtactagatcttaatacttaactgtgaaatttgaatctgtgatgttgtaacttttaacctatgaaaaatagttttgagttgcttcgtcaaagcttaatagaaatattatattagttagcggttcaattggaaagacaagctttgtttgcttgtttgtccttttctgatatgccttacgaacgagatatctctctccccttctcccatgatgataagtatggtatgaacagtatcaggcctactttgtttgggccttagtccgactatatgactatccccattcctcaaggttttgatgtgacatttatctaatacaatgtttaaaaatgcgtttttgagcatcaagttaaggtgtttaaagagtgcaccaatgtctgcaccttgctgaggagaagagaggcgtacaccttaatgggtgaggcgctagacataagagacatgcgtcttaaattttaaaagtgaattgggctattcgagccttaagaaaaggcccaaattgttattttaaaatgagataagttgaaaagtaaccctttttattacacattaaccaaatataactctaaaataattttgattgataaattcactcttttataatcaaattaccaaatataacctcacaaaacttatcaaaattagacttcttaatgcacataatgagaatataacttataaaagtgattataaattaaagagatgcaaaataaaggtaaaaattaaaatatgaaacaaaaaatgggtatagagtataattttctcttttaaaattttatatttctgctgcccaacttaaaaaagggataggttgaaaaatatctcttttttgtatccattaatcaaaaatatcctcatattatattttattaaaatatacccacttttttgagtgggttgcccaatataccctcactctttacttaaatctagcatatgatttacattaacctaagagatctaatagatatatcatttataaaagtggatatatcttaaagaaaatgaaaataaaggtaaaaatcaaaacaagtaaagtaaagtgggtattgttggattatttattttaccaggatcttagatctactcacaagtatgttgtttaaaca

SEQ ID NO: 295375 - DNA, 4426 bp, Cannabis indica
ttaaagttaaagttacttaaagttactatgtagtaaatttttactttttaggttttaagtttttttttttttttttttttttttttaatatatatgagttattgtaaagttttagtttttttaatattgataaaatagattagtaaaaaattagttatttaacaaagtgtaagtttttatttaatgttactactttatgtggagaagaaaatggtgagcaaataattttaaaaaatactaagaaagtcgactagtatatgttatgttaatttttctttcttatagttatagtgttggacctcttgaatagatgaagtataatatgttaaattaacttataatttgaatagatagagtataatttattcttaatgcattgaacatttgactcctctattaagttaaatttagctcaaattatactttagattattctaggcaataaattaacaagcctaagtaacctatttaatttaggtcacatgctttatcacaattaaaaattattttgacataatcaatattcatagaatcattaccaacaatttacaaccctaaactattaggtgaataacaattttaaaataacaatcaatcactatagtatcatattaagtggtcattcaaataagaacaagacaataatcataaattttaaatccaattactaattagattggattggatcgaattttaaagtgatcagatgatgatttttttaaatttaattactaattgaattggatcaaataaagaaaaaaataatcaacattgcatcaaacacacaatatcaattttcctagcaatgttttccattctctttcttactagttactcctcaaaccctatagatatcacttagaagatttatgagaagtcttctctaaaatctgaaaacttgtaaatgagaatattcttttttatttttttttttgagtgtagtctgtaatggtattctacaatcaattaatagtttaaaggtcttaagttcgaacccatgacctttccctcttttccatccgtccctcatcaataagttaactttagtggattcttctacagaccttcagtttacaagactgacgctatgggccttgtttgtaaatgaaaaaattgagtctcaacaaaatgtgaaaatggcccattcactttttatttatttcgaatttaacattgaaatattgatacatgtattggtgggaaaaataaataaaataaaaatggtacagaactttaaactttttaaaaagatactattactaaacaagggtaaaaaacaaaacgaaagctaaaaagtagaggagatcctatcctccaaaaacgagactttcaaacatcactatcccattcattaatggacaaggacaaagggtggattcagtttcaatactaggaatggcccacacatgtgatgtccagctttataaaccaaaaaagcccaacccaaaaatattcaaaacacattctggcttttacccaaaaacgacaaacatccaatttaatccaatcaaactgaatcatcatctttacagaaataccataacaaagtttgtcctaaaaaccattcactcactcaatctatcttatgatgttgttcactcacaatagaatcattccaagagcattcatgaataaaatctacacataaaaatttataatggttcctaagaataaagtgaaatgattgtcagatgactcagatcctttgttttcttcaggaaatggttttttttcactgtagcccccacccacaggtgttgtttttaccaaaaaaaaatgttaataaaatgacataaaagaattatgcaaaagataacgtatgccgcgggctggctggcacatgcacaaagctgaaaaatcatcaaacccaagtcttcaaattaaattattaattgctcactaaacaagttctcgaacataacaaaataggagacaaaattaagtctcatgtactcaacttcgtaaaaaagcttaattttatctaaacgaaacgaaaaatttataacaaagctcaatctattattgggttgctacaaacacaaaacacactctgccctaaacccaatctgtaattaaaacaaagctcacaacttttttagtctacttgaaaaagtagcccccaaaaataaaagggttattaagtaacaacaacaagttaaaaaaggtgacacaatttttatgacactcttcactcattttcaatatcattattgtataaacttttaagctcttaatataaagtgaatatatatatcttcttgatacaaaaccattttatgtatacagatgaaatatgatatatgatcctcaacaagaagatgcacataaacagagaaactttccctctttactcgaatagcccatgaatcaataccaacaacaataactttttctttatataaattaattaattgattaatgaacttgatcaaagcactaattttatagattaactcactcaaatttaattgaattgatcacaccttcgcctaatatctccgtctttacttccggtcttcactccaagaatgctaagcttctccattgctcgaacaaaatcctgaaaaaacctttcttggtttttcccgtacaaatcaacgaaaggccttgttcttggatcactgtggagtccgtgatccgttttcagaagccctagtcccttttgtatgttctggtaatacatgttgtcgaacttgtttggggtcataatatcgttgaatacagagagagtagggttcttcttgtaatcggcacaagctttttgcaacccagaagcgaatctagggttgtattggggatcagtcgacgcagttttgctgtagttgtagatcccactactaaattctttgcaatgcgaaaacccaatcgtatgagcaccgctcaatgccaccatttcctgtacagagaaacctctggattcaaacaattgaatgattcgcgacatcgaatcggtcgttcgagggaggtgaccatcaacatccgaagccctagatacgcggccgtctcttcggccgagtagaacgttgtaatgaggcccgccgagcatggtgacgaggtcacgggtagcgacggcgaggatatcagcgcaagagactgtgttagggcaagctagctcgagtgcggtcttggcccgaacgacaacgtcgaatgcatcaccgggaagagagagattgatatcggcgtcgcgctcggcggtattgaagggcgtagatgaaatgagaatggaggcgtcgcaaccgtttaggaggcaatcgtggaagaagagccggagagaggcagcggcagtggatggactggagatctgtttgttggtgactgtgtcttggatgatttgctcgaatctagggcaggttcttcggtagtagtttgggtatagcttggtggacctggactgagcttgcgagcttggaagagctaaagaagtaacgagaatgatggtgataaggtggagcagtgaagccgccattgttgagagaaagaaagcttagctcaactcctcagctttcactgaaagagaagacagagtatttttagagagagaatgagtgggttgtgattatagagagatagagagagagagtggtaaattttagagagagaaagtgagagtggggaaactctttcttatttccctccaatcacgggaagcgtgttgtttggagatagggcccactttaatctcatggcgcgtgggttgatttattttaggttcgtgtccattaagtcagaattttgttgactaattgtgtttatttatttattaattaagagctttacgtcgtcgtttcattcaattttgtgttgttttacttttttggttttattcttttacttaataagctgaacgttcgaggtagcgagtggaatgcgtggcgcgtggggttacatttggggtatcaatgtatcatcactcatcagaaatgtgacacgttaacaaagagaatttataaataactaaacgtcgtcgtttgaaaggtatagtgattagttatggagaatcaacatctgtcaacgtaaaagttaaaagggttcatattgttattgcatgtcacgcggttggctataatatcttttttttttttttgtaggggaatggtaaatctcttttctagtggtaatttattgagtcaaaaaattagaatttaaatagcttagtttatttgtctataaaggagagattcgtttaaagatctcaaagatcatctatatttatataatttatgagcattgttatttaccatatgataactaataacattatatttttgtagtggtgtttgatgttgtttatgtatttttagattttttttaaatataatttaatatcaaatcttaaatctcttacaagcagggccggccctgaaaatatatgggcccaagacgaattaaattttggggccctcaatatataaaaaaataatcaaaa

SEQ ID NO: 295376 - DNA, 1441 bp, Cannabis indica
tggcactttgcctcgaaatgaaccccctgttccagtttcatgatcagacaaatagatcgccctgcgtatgaagacatagatctccatagtatctcagcagagcagatcatcttggtctggcactcccaacaccacttctcatcaatttgaatttttcagccatggaaacgagacttcaaactctccattggcatgcgaaacaaaactcattttcttgaaggtacattacctcaaccaatccctactgattctcttcacagttcttggacaaggtgcaatcaaatgattatgtcatggattcttcattctgtgtctcacgaaatcaaaagtagcataatgtatcttaacactgctgctgagatgtggacagtgctcaacaatagattcaatcaagtaaatagtccaagaatctttgaactcaataaaacctttacctaccttcatcaatgtgatgaatctgtgagtgcatactttaccaaattaacaacaatgtgggacgagattaataaactcatgccttggaaataattgcacctatgttgcatcagctcaaaatcaagatcaccttaatcatgatcaagttttgtagtttctcaagggattgaacaaatcttatcacgccattcgtgattaaatcttgcttatcaatccttgtcctccccttaacaaagtgttttcaatgtttattcaccaagaaacacaaagaactttgggacatcgcattacacctccacctgttgttactacaaaaactcctactacaacagctactatccttgatgtcaatcccactgctaatcaaacttcaagaaacaaaagacctcgtccttattgtactcactgctaaaagtcaagtcattaatataaggataaatgctacttttttcacaactttttacctggttatgacaaaccaagatcaaatgagccttctccttcgaataatcaaaaactagagactagatccacatctcgcaatgccccacagaatttacaagtctctattccaccaagagatcaaaacactcctcaattaactcctgatcaatgtcagcaattaatgtccatgatcaatcaacaactacaacctagtcatgatgcttcaactttagatggtccaaccattaacaatttttttggtatccttgaccctttctctcctacttcttggattatagatagtggtaatactcaccacgtttgttgtaatattagatgtttttcctcaatacacaaatccactacacataccaaatgctacaacaattcaaattgaactcataggcactgtcatactaaactctgctttaacactttataatattttatctttgcctaaattcaaattaaatttactattagttagcactctaatatatgacagctccaataatgtattattcacatctaacacttgttagacttttatttgggcttacat

SEQ ID NO: 295377 - DNA, 5817 bp, Cannabis indica
attttcaactttttttaatgaaaataagattattaatataaattatctaataatagagtattaaactcaaaacaaatagaaaattcactaaaataatgatacaggaaaattagagcctcttatcaagaaatgagacactttattaggagaatgtttaacaaaatgttaaaaaaacatggagaattactttatatactatttttaattttttaaaaaaaatttacagtttgggttgtttcggtagtttctataaaagttgctatgtggattttagctgtgatttaaattgctctgttggttgttatgtgtatagctatcatgagtgatcttcgtcctatctcactatgtaacgtaatctataaggttatctctaaagtcatggctaatcagcttaaggtggttcttcattttgttatctcagacactcaaagtgccttctttctaggtatgcttatttatgataacattgtggtttcttttaaaattatgcattatcttaaacgaaaaaacaaaggaaaataacgttttatggcgattaagttggatatgaataaagcatatgctaggcttgaatggggttatctttgggttgttttgctgtgtatggggtttggtggaaggtgggttatcatataatgcagtgtgtatgttcggtttcttacactatagttcatggaggacgagagttgcgacctattgttccaggtcatggtattcgtcaaggacatttgatttcttcatacttgttttatcctgtgtgctgttttttttttacttttattaggaattatgaatcgacaagcttgattcatggatgtagtgtggctagatgagctcctaaagtgtcgcatatgctctttactgatgatagtaatgtttattgtaaagctaatgatccaaagatctctgatgtgttgtctttgttacatttgtttgaagaggcatctagtcaaaagattgataaatcatctgtgatttttagttcaaatttggaggatgatatgtgtgattacctttgttgaatgatgggaatttatgaagttgatgagaattgtacctacttggggttgccgaatacaatgggaatgaaaaagactgttattttggcttcttaaaggataagttgcgaaagaggatccaaagttcgaagggtcgacttctttttcaggttgaaaaggaggttttacttaaaactgtggctcaaactttactaaactatgtcatgagtgtgtttttttcttccttttcaaacatgtaaagaattagagaagctaatggctaagttttggtagaatatcagcccgttttaatataaaggtgtgagttggatgagttggaagcgtttatgtaagcattaaattccaggaggtttgggttttcgaagtattcgtaattttaacatggctcttcttggtaaacaagactggtgtttattgacacgaccttattctttgactgcccacattttgaaggcttgttattacaaaaataattcattccttgcgattgagattggctctaatccgagctttgtttggcgtaacattatggaatctcaatatttggtggatgttggggttcggaaaagtattggtgcaggttgttcatttagtattttggttgatctatggatttctgatgaggattaaccttatgttatctccacacacccagctttagtacgtgtctagccttatgaagaccgacgttcgtgaatgggatgtcgagctcattaatgatctatttgaaactcaggatagggactttatactttttattcctcttaattctaccattaataaagataattagttttggcgttttgaaaaatcaagtttttatactgttaaaagtgcttaccgttatttggaggatctgaaaaaaatgatttttcttttaacaattttgttggttattggagaaagctttgagccttgaaaatccctcctaaggtccgaaactttctctggcgtgctgtctcaaatgtgttgccttcttgtgtacaattagtgattaaacatgtgctaatgcaccagttgctctttgtgtaatagtagtgcagaatccattttccttgtgcttgttggctgttcttttgcctgttcttgttggtcctgttcgtgtgtggacgttgttggcagctagttggatactgagttttcatcgtggtggctgtatctatgaagcagggtaggagagggtatgttagaggaggcagctatggctgcttggggtatatggcaagctaaaaacgccatgatttggaaccaaaaattgtcaacaactgcaacaattgtcttttcagttagacgttctcttgatccataccgatattcttaatctaaaaaagatgattttatattgttattcagtgagaatattaaaattgtcgagcattggactacacttgttaataatcatatcaaggtcaatgtcgatggtacaatttttgagtagtatggacattttgtaatgggttgcattgcttgtggacacgatggtaagacaattgtggcttttaacaaaggcttcaagggttgagttcatcctgagatggcagaagttattagtacgaaggaagctcttagttggattgatcactttacatggaatacatggaataatatcgttcttgagacggatagattagtgtgtgttcaaactattttgagttctttttctatgctttttcagtttggttttattgtaagatttgcttaaacgtttgtcttttgtttctttatgttttgttaaaaatctgcgaacaaaatcactcattatatagcgtgggttttttattttttcactaaagtcttactatcgaggagggtgcttttgataattggattatctttcttgtttttgatagatgccaaccatcaatgacatgatgtccttgaccttcttttgcttaaggttttttccaacaaaatagtaataacaataatttttcattatgtaaatatctttctatttatgtaacactagagattaagatacatgtcacactgttattattatgtacattttagaggtgtaaaataggaacgttcctataaataaataaacactatttttgttcatttataaataggaatgcaaatgtaaagaaaaagaaacactattttcgtttttgaaattctttacacaaacgacatgtcgtttttattaaatacaaaagttttatgtcgtataacttggaaaacacgttaactgaaccccactctcgaaaaactacaacaacagcagtgaacgactgtccgtccatccccacacagcaattaattaatttctttttttttttttcacaaataaaatcagtcatccgatccaggggtaatttcgtaaattcaccaccttaacggcaaagctacaacacactactacatctcgtatttacagggagaaaaactctgtctctctaaaaaagcctcctttcttcttcgattccacttcccccgaaggccttctcattctcagagttcgaatcacctggatcgctagggtttcctggacatcttctctcccaagcttcaatagtctgcgaaaatggtgagttgaagatctatgatactcccctaaacgtaatcgcgtcttactacatcttagatctggtcggattttgctttgatttgattcgaattttataatctttgatcaatttcgttagattttagagtgttagttggaattgtttgtgttatgtttggttgttgggaaagttagtgtttcggagctctccgttctgcttctcctaggcaatcaaaagatccgtccattgggcacatttcgatgggatctgattttttgcggactgattagaagttcgtatgaatatttagattttaaactgtcattgtgattttaccgggaaacaaacatgttattgtaagaatttgaatttatcgggatttcttttttcacttttatttggctatgatactgactgtttaactttgtctttggaacgtctaccagcctctcagactcgaaattaaggtactttgctcgtttcttttatcctcgtttctccatgtttaatagatctcgaacgcttaaagattatgattgcattggaaatgttgagtgatcgtcttaatgtctgttgttcgctcagaggaaacttgctcaaagatcagaaagagtaaagtctgtggatctgcacccgacagaaccatggtaatgctgttcaagatcattggctttacacaataaattttatgtttctcataagtgatttgagaatttcttttatttttatttttgctagattgtactaatcacaattgtcattgcaggattttggcgagtttgtattcaggaactgtgtgtatctggaattaccaatcacaggtatatggtagtaatagtgatctttaatttatagtatattgttctttgtaatgtgatcatatttaattctgtttagtgaaactgttaaaccgtgatgagtttgctttgaattagaatttatatatacatatgtatatatgtattgtcaatgtgagtgacacctagaagctaactcaaatctacttgttactgctgcagaccatggctaaatcttttgaggtcactgagttacctggtacttattcttactgctacctttttcagctcttctatggtgatttcttctgtgaattttcactggaattttcctgatacaatatgctttcatgtgtttgcagttagatcagccaaatttatagcacggaggcaatgggttgttgctggagctgatgacatgtatattcgtgtttacaattacaatacaatggataaggttaaagtatttgaggcacatacagactacattaggtgtgtggcagttcatcctacacttccatatgtgctgtcgtcgtctgatgatatgctcattaagctctgggattgggaaaagggttggatttgtactcagatttttgaaggacattctcattatgtaatgcaagttacttttaacccaaaggacaccaacacctttgcaagtgcttcactcgatcgcaccattaaggtatatttgcaattttaggatggtactttggaagctacctttaggtcctatactatcgggctgtatatgatgatgctaaatgtgtggtctggttatgtgctgtttttcagatttggaatctgggctcgccagacccaaattttactttggacgctcatcaaaaaggagtgaattgtgttgattactttacagggggtgataagccttatctaatcactggttctgatgatcacactgccaaggtccttaatttgccccttttcttcatatttttgtggttatacatttgtgaaatgatttggaaagcattcttacactattttatgtaagcaggtttgggattatcaaacaaaaagttgtgttcagaccctagaaggccacacccacaatgtttctgctgtatgtttccatcctgatcttccaattattataacaggctctgaggatggaacagttcgtatttggcactcaaccacctataggtagcattcattttgtatttttgttctaaaattaaagagttgctaattagaagattgtaatctactcatatctaaatggttacgcttgaattcaaaattgtagtcctcatgactcatgttatttataattttggagaatgaatatctagtgcattttgtttagtcaatgataagctttatataactacttatttatgtctgttgtactggctagtggtttcatctagatgaacatgtttttttagtagtaattacagtttaatataatgtttaaaacttatgaaggtgatcagttcttattttatttttttatttttt

SEQ ID NO: 295378 - DNA, 1905 bp, Cannabis indica
tctagactcactgctaggaagcttgtgataattgaagatgaaggttcttgtttggtaaaattgatacccaaatatacacaattgaaacaagtaatataatgataaataaagtatcgtttccacaaaaatttattatcaattaccaatcaattaattctttagttctatttgattaataaaaattgttagataaaaaataaaataagacaaagttttaaaattttttttaaaaaaacaacaataataaagacatagattattaagataccaactatcatttattttacttgtcaaaaatactacagtagaatctctatctaagaatatcttatgaaaaatttgattaaatatccttacattaccttaaaaaaattttcaacatatgacaactttattgtttttcccaaaataccttccccaattacatcaactcctctcttcccacccaaaatactccaccaccaccattttttttttcttctcttcactcatttatacactacaagctacaagctagaacactacaagctcctatatacgaagcatcaatgggtaaataattccgtttttttttttttaaatcttgtttgttgttgttatatttaatttagaatgttattttgttgtttgatctgtgggttgtttgctgttattttactattttgtgtgttgtaatgttgttgtctgtgaattttgaattttttctagtttgtgctttttttttttcgcctggtccgatggggtccaatgcccatccgatggtggtccgatatgctgtgaggttggatgatagggataaaggcccgatggtgacccgatgtagggtccgatggggttaaaaaagggggttggggcaatttttttagtatggtccaatgggcccgatgttagtccgatggggatcagaaaaatgggtttgggacaatttttgtagtctggtccgatgggcccaatttgggcccgatgttagtccgatggaggtccaaaaattggatttagggcattttgttaaatgggtccgatgggacccaatggtgtccgattgttggcccatttttggtccaacatggttttttgactttatttttaacgaggtcaattgcagctaggtacaatttctaaatatgagaatgcagattgaagatgcctcctgtcctttatgtggggtgggtgaggacaacttaacgttccacttttggagatcttcccctggggcattatgctggttattaattcaagtgctcgagtttaggcttagatcaaatttttatgggacctgaagtcaaagagtgtcagtatagataagtggtttctttatgctatgactatggtggatacgatatggcgggcccgtaaaaataaagtacacaacaataatataagtagcattaaatattatattgactctatcactcattgcaattgctcttgttttttctccttctcctctagctgattcagtttgctcctttggtctccacctctgcaatattagatcaagattaattgtgatgttaaaggatggagtgagaaaatgtgtgtgacatcattagatagagatcacttgggaaaagtttagtagcaagttgctaccaataggctcaacttttttgatctctttatcggagaagttgtaacttgtcttttagtatcggagatggcattctttgaatcaccattttgtgatgatagagaacgattttgagaccgttttcaaaatactctattgctaaataatagaattgaaaattacaaatagtgatggtgatatcgtaattgctttcttttttctttttcttttttttttgttagttggacaataccaatagggaaatttgattttctatacttagaaaatcaaaaaatttgatttctaaaccaataatttaaaccctaaaaaaacta

SEQ ID NO: 295379 - DNA, 3020 bp, Cannabis indica
gtttctttttgtgtgtatgtgtggtttaggtgtaaaaaaaagggtacggtagtggtggttggtggtggttgtggatggtacggtggttggtaggtaatagtagtttcagtagattggtggtggtggatgtcgatcatatgaagaagatgaagaataagaaaaataaaaataatgaagaaaaaaaattgttggaatgacaaaattaaattattttacttttaatttttaaaatatattttttttattttaaatatttatttacgtgagtcagttaaattgtgccacgtgtacactgtgtacacgtagatattctaacatagcacttaacatccaaaaatgaatggaaatgttaaactgctaacataatacgagttttggggattttaccactaaaattttaaaattagagattagttacaataaactaagcacttgttgaagttatgccacaaattactcaattcaatatatggacaatcgccacattagcaaaattgaatgaaattagataaaagtatttaaatctaacaattttaatagtttagaaaaaaatttaatgacttaaaaagttcagagacatgatgtggtatatatcaaaaatcttaattagtcttattattattattaaataattaccatgtttgtaaactaccgaattgtgccacctatgatatgctaattgttaataataaccctcaaataattgcacttacaataatgtggtcctaaaattagtgatgtggtaatgtaaatttggaagataaaatagtaggaaaattattatagagaaaatcacacttttactatagtttctttcccatggtggtcagagtgactgagacaatgggtatggcttaaaagtttaaaagttgagaatgggaaagaaagtactgctaaatcaaagaataaatgctcccaaagaattagagtcgaatatcatccaacactagatccaaaaagataataaaagagacattgttttgaattttcaacacaacactcaaacaatcaaattcaataatgatattgccatacccaaaagaaagatattgggacaaagcctttctaatagccaacgcttcagccacctcaagcacaaaacaaccatccaaatgtcagctcgccgaagcacgaataacacccgaaacatctttaataaccatactcaagccactacaaaaactcgaagagtttatagtctcaccagtgttaactttgagccttccaataaggggcagtccatttgggagttgtcttagaaaggtgtcgtaatggaggtgacccggaaggatcaatcattgtcagcgggataagatgggtaacagtcttcagtccctacccattgtgaaatgtccccaaaagattatgagcctaatgaacagctatagttggagacaaaataacatcattatggacctttttatagcgctagaaccagaacctccacaagatcaccataagtaattcaatgatatcttttggaagtggattaataaaacgatgaataaagtcaagaaaatccacacaatgaacaccaggatctcccaaggaaaaactcacataatttcttacactaaagcagagagttgcaggcccaaagtgcgtgaagagtagtttcatcttccaacccgcacaaaggacataacccattagataagagaccatgtcgagccaaattgatttgtgtaggacaattatggaaaacttgccaagcaaaaaagtctaacctttagggggagattaagagaccaaattttcttccaccatcctaacaaacctccaaaaggaggagcacgaagcacaaccaagttgcgaagagtaagctaataaccactcttaacataaaaccacctacacttctcataattctaaataatcttatccggcgcatcgaaagaagactatggaatacaaagaatagcctcaacttcattagccaagaaaccgaaacgaatcaagtctttattccaccctcctgaaacatccctcaacaaagagaccttgcttgactcatcaaactgacaagggcttgtcaaaacaaagggcgacacagagggaatccaattatcagtgtaaatagcaatgtcatttccatccccaacacgacatatcactcatgaatcaaaaagctcctcaccccataagatattcttccacacaaagaatcctcacttagatttcgtaatttcggcaaagagcctatttcaaaagtataaaccttttaacacagggctagccaaggagtcgagaacactgtaaatatgacaattgtttagcaaccacagtcgagaacattcacatatcacgaaaacccatcccaccatccctcttatgcatacacagtttatcctaattacaataatgcatctttttttttttaacatcattacctccccacaaaaacgaagacacatacgatgaatatttttgataaaagctttcggaagcttaaagaggttcattgtataggtaagaatggattggatggttgccttgataagaacctcacaaccagtcatggagaacaatttcaatttccatccattgagttttttctaaactctatcctgaatgacgtcaaaaacaaacccatcttactttgtcccacaaaataaaggagattcaaataactctcgtgacaatcaaccccctttacttcgaaaacgtccaccatattgctattttttaacctcaatttttttatatgtcattaacttctcaccatatcatttatatctattctattttttaatttattatatttattttaaatggcaaaaaaaaaaaaaaacataaaagtctttcgttggtggagttgatactttggccatttgtaatactcttaactatttttggatttaaacattgtaatagggtctccaatatcatattgactctatttcaggcagttgcacaatgaaaattttattattttcaataaaacaaagaaaaaaaaatcaaccatatgttaggtttataatacagtaccctagtgttttttggggaccactacctattta

SEQ ID NO: 295380 - DNA, 9432 bp, Cannabis indica
ataataaaataaaattataaattacatatttggtgccattttcagaacatttaatgtctaaaaaatccttggtaataatgatacaatactgcatgatgttgacatttatttatttttatggcaattcaaaagctctctctctttttctttttcatcatattcttctcctctaagtcctcttgatcttatgaaacttttgctataaatatcatgtgatcatccatactttaatgtgttattatttatttattttttgacacaacttggtattgctacaagaaataattacataaggtataatttttttaaaaaattatatttttatgtttacatttttataatttcttatagaaacaatacgaaaacaacaaaaaaattacataaaaataatttctaaataacatcaaaacaacaacaaaaaataacatacatataacaaaaaatcaataacaaattaacaaaagtataacataaaagaccgtattttctgtaaataaaataaaaaaaatcgtaaaaatatttgaaattctgtgaaattgtatttttgtaatttttttattgtttttgtgtatttgtaaatattcccttactataaaccacctctgatacttagtactacctaaatgtaatattttgtaattgactaacaatattttataatagtttttaagagtgtataaagaagtaactgtataattattaagtagtataatactagggtgataattacacaatctagtaattgtactatattttaaaatacaaggtgtgtttgaagacatagtggtaattatatatgaatatatgaatttactaattatttttgtttttgtttggcaaaatagttagtaattacacataaaaataacattttttaacagttaatatttaaaatagaaagtttttaataattacacaatttaattacactcaattgctattagagagtctcacaatgttaatgtgtagaaataaattgtcatatataaaaataaacgagttacttctcccattgccaattggttttgagatagaatctcattcaccttatcccaaaattctaacatggtatcagagccgcttgtaattctttgtgagcccaaagtaccgctggtccaaaaaggcgagccaaattaaaaaactttcactgtttcccttttaatctttattggaacctttcggtcaatgtgtgccagttttcagtgttgagatctttgatttgtttcaaaatctacaaatttcccgaaatttgacattgtgagattctttcaaatgtcacgtttgaccatgtggtctcataaagatcgttatttatacccacatttatcaggcctaaatgtgaggggagtgtattagagttagtcccatattactaatatgtacaaataaattctcatatataagataagatacttcttctattacaagttacttttaagatcaaaaccttattcacattgtcccaaaattctaacaattaccataagaattagagtgtaatctaaaattccttattccttaattacctcaaattacaccgtataacttttcaaatgtatcataaattaaattatacgagactcgatataaaattacatcaataacaatataaaacatctaaatataaaatatagtagacaacatcttaattctaatatgtcataacagatttgtcttaaagtaataaaataatactaataataacaataataaatcatataactgctacacctgctaactattaaactttataattattattattatatgttaaaaaattatttttgaatcaaattggaaagttaggaacggtttaactgacgtcaccggttcaaaacgcaaaactccaaagtccaaaaccaaacaaaacgacatccactctctctctctctttctcccgtctgtcaacttcttcacttttctattctctttcttttttcttcctttacactttccctcatattttctctctcattttctcaccaaccaaccagacccttttcctcttccctcactcacattatcacatacaatttataatcaaatataaatgtatatgtatatgttttcttctccattgtctatgtaagagactctccgatactgaaaccgacgtcgttctacccaccgacgatctcggaggagaagccggagcttcgtaagccgccggttcggtcggaatggactcgagcgatgtcaatacagtaaggtcagaaaccatgaaggactacgctagggagtttatgaaaggcgtagcggagatgagtgtggagtttggaaaaggatgtagagatatattcaaacagagcttggcgaatcgtgattccttcttggttaggaagtttgggaaagagtcgtatattgggaggagaatcagtggaccgtgtgagaagattcgtttaaaattgaggttctttaatgagtacttgcccgaggacaaggatccacttcactcatggtctgtgatcttgttcgtacttgttcttgcttttgcaggtgcgtaagtaattgctggttctatttttctttgtttgtgaggttagttaatggagtggaatttgtttggtttactggaaaatgcgacttgctctgagagaatgtcagagacggagaaaaggaatcttgagatttgagcttttcattttctttttaaattttggagactgacttaggtgacttttttagacccttttggactggaatcacgaaagaaaacacaggacgcttttgtcagtggcagactttttcctcgttttcctccactttctcggaaaccaaacagtatttagaactcatgttttttttttcttttttcgaatccttagttttctcagttcggagatagaagggtcagagagatgtgaatttggggtattcgaaacagattaattccactcaatgcctttcccaaatcccaaatcgtttatttgtttagtatctctagttatctgagcatttgggtgataaatggataaaattttgattacttttctctattttttcttagattaaggaagctgttacttccaggtcccgtttgaatagagttattagctgaggaaattggatacccaattaggtggtggatgaacttcatcctatcactaatcactctcttttttattagggaagcttgtcttggtcccatttttcaatcagttacttgccttaacccaatcaaggttacgccagcttctattacaatgttaggtgttattgatgggggactaactttgccattgttatataaaaaaagtctcttgtttgagttcaatgcttatggtattggtggtacagtgcaaacaataggttctgtcacaatcattcctaacagatggctgatggggttatggcagttaagagtgttagacttttgccagcaaatttattaggaagtagtcttctagagtttgacaaatggtactctgctgaaattatttgcactaagttcatatagactcagaggatttggtggaatctttttttgggggggatgattattgaccactggataaataaatagtaaagaagttaatatgaaacagtagtacctactccagatcttcaatgcaaagtttcctagttttaatttggttctataatttatattgcataggttctagtctattattatgcttggtttcataatagtacacaataaatgttcatttattttatcacctcacctttacctgtctctatctccaccatatggatgtttggatttttactgaaatggcaaacaaattatgcagtcttgagttttaccatggaatccaaatccgaatactcttcttctacggctcccactcccaccccagagactaagaaaatatacctacatcctcctagtgccagtcgtgtggtgcttcctgatggtagatacatggcgtacagggagcaaggtgttcctgctgagagagctagattttcagtgattgctccacatgcttttctttcctccaggcttgcaggtttttataacttggttgttgaaagtacactcattttcttcagctgcaatgtgtatattttattctttcctcttatttctggtgtcttttattctgttaatttagggatacctgggcttaaagcatcactacttgaagaatttggtgttcgctggttaacatatgatcttcctggttttggagagagtgaccctcatcctgaaagaacccttgaatcttcagcaatggacatgtcactcttagctgatgctgttggtgttaatggcaagttctgggttgtgggatactcaagcggaagccttcatgcttgggcagcgcttagattcattccagaaaaacttgccggtatcaagctcttcttctctgtgagaatcctttaatctttgtttgcatgcataactgcattggatcagcttatggcctatgatctattcttgaatgaatttttctttttccctcaaaagaaccttttttgcttcggaatttatagttataaagattgagaatgtgtctgcgactatatttaggtaggttcacacagtggatggcaaattttcttttctagtcaaaatagcaacctgattggctttacaattaggctaaaattattactgttagtaccatttttattttcaattcaaaatagcatgagcagatccactttgaccagcgctcttaagttaataatctgttaaagaataaagcaaaaaatatttatcattttgtttgaaactaatctatgtttactgctctctaggctgttttcagaactcttgggtcaatggtcatcttttacctatttcctaacaacataacatgaatgttctcatttagagagagagagaaagaaagaaaacaataggggaaagcgtcatgattttagtatttacacctacattgcaggtgcagcaatgtttgctcctatggtaaatccatatgatccaaccatgagtagggaagagagacgtaaaacatgggaaaagtggtcaagaaggaagaaattcatgttctttttagctcgaaggtttcctcgatttctcgcttatttctatcatagaagcttcttatctgggaaacacggtcagattgacaagtggttgtctatgtctctgggaaagagggtaaggcattttctatcataattttgtagtttgttttccatttcttttcactactgagctggtttataaactttacactgtcataagcttttatgaggttcagaagagaaggttatactaaggtgcaaaagcttttgctttacattggctatgaatcacaagtgggctccaaccttttttgaagtgaaaagtcttgaactttatgtgactagccaattaagactccaaataacctgtttaaagccttaatgaacaattttcttaccttctccaggacaaggctttaatagaggacccaatctatgaagaattctggcaaagggatgtggaagaatccattagacagggagatgtaaaaccctttattgaggaagctgtaatgcaagtttcaaattggggtttctgtcttccagaacttagattgcaaaagaaagaaagaggcaaaggtttgtttaattggcttaaatcattggtcattgaagagcaggaagaatacttgggctttctaggtccaattcacatatggcaggttagtgtgatctgcatcaaacattctttctttttacttctgattacatctatagatcccccacttctctacagataagaaattggtaatgttaggcagataagtagaaatttaagctatgtttggaagttagactttggtgaagaaagaaaaatgtaaggaaaatatagggaaaaacatagtgtaggaaataaaagaaaaatcaattttttttatgttcgatgttccctataattctttctatgccaaacatgagaaattgttttttattttccatactttttgttttccctaattttctttagtctccttcttttctccaccaaaatgcaatttccaaacacagccttagcaaaacaattgttagtattcttatttatttacaaaccgagttgtgatcttttcctctctatatcccaatgttgaacaacagggaatggatgacagaagttgttccgccatcaatgacagatttcgtgcaccgaattctaccaggagctgcagtacataaactcccatacgaggggcacttcacctacgtttacttctgcgatgaatgccatagacagattttcaccacactttttggaatcccacaaggccctttgaacaacaacagcaacaataacaccacattagaactgaatcaaagtcccatagaagatgaggctgaaacaacagacgaaatggtaacaacaccagttgaggaaagatttgaagtttgatgagatttaaacttttcctttttttttctacttgaggaagctactgctgtacataccgtagctaattcggctattcgtccaccacagaatcgaaaatagaatagaaggtgtaatattccaagtgttcaggttttaagcttctataggaaacattgccaatacaacaaaaatataatctggtttttaattgtaatgatgagccattgatatctgtttatgctacagccattgatgagcacattataaatgttgttacataaataaaatcaaacaagaaataatgaactgagatagtaacacaatttgatctttatttataaattatcagcaaacacaaacttcttgtgtctctgcaattgaagacatgtcactatgtcatgcctcttctaagagcaatcaatcccaactgatgagctataattgttctacagctaaatgttctatttttggtgctaaacatattttaattatttatttatttctctcttcaaatatgttaatttattttttattatttaataaataaagatacaatattttaatgatgtaaagaaaaatatagagaagttgttgtagggtgaaaggtaaaagtttaaagtaaaataaaaaaaaaatgaaattttaatgagatattttaaaatatgatatagagaagttgctgggagtgctctaggtacacaaacgagcaaatgtgtaccatgcaaaatttgactttctatgtatttattgaattaaaattatttttctaaacttaaattaatccatactgatagaataggctaacatttcataaaatccaattttacctattctatttcaaacaccttaccctctcttcctcccttgtctctctcactatttgaacttaccttaaggacttgacccacgacccacaacctcgatcccttctctctacgaccactgtgaccacggacccaatgacctctgcggacccaacgacccacagactcaacgacttctccatcaaccacaatttctccattgacaatgttgtcaaaggtaagtatcgtttttttttttttttgcatgatttttgactttgggttagatttaaagttagaatggtcatcaaagataagtctttagagtttctttctgcttccaaattcgtctctcaaaagtgctaaaagttttcttttatatctcctcattaggatttaaaatcctgggttttacaaaatcaaatagtgggtcgtgacactgctggagcatgctgcgactcgtgtctctaatcatgcgcttgggatttcaaattttcacctagcgagcttggacattcactccccatgtcgtgagcttgaagattgaaattgggtagcaagtttcaatcgctccaatgcctcaacatggaattccaatgttgaggcccgcctggacacattcaaaacaccatcttgttgcctatcttatgcatcttagcaccctggcattgaatttccatgccatggcgctactctagattttctaattttttaacttcaagcgctccaatcacactgaatcttttaattttttccttgaattaatctttggtgcactagcgacaatatttgtttctctaacctagttaaaaaaagaagaagtaattaatatgattgccataatcttacacacaaaaaaaactcacataaagccttcataaaatccgctaaaaataaaacttaatataaaattctttgaaaactatgtatcaccatataaaataaaaagaagaagaaccaaacaaatttaccattttgtttttgtggggtctctttacatcatttctactattaaacaatacctttcccatttgaagagcaaagtgttgtagtgttagaatatgttaaaacccaaaaagcaaataaaagtcccttattgaaagaaaggtattaaaagcttttctttttgttctcttctctaaaattctctaacaagaaccccaaacatgaattttgggtatttgatattgaccacaataattgggctttcaacaacaaccatctcatactttgttgtgagcccaaccatagagagatggcaaatgaagcaaatgagaaaagagaagctaaaggtgataaaagaagcattggaagaggccaatgaaagagttgaaaggcttgagaatagacacgagcgtattttgagtcaattttgtggctattacttgacacatgcagagcttgaggaggctgttgtggcagctcgaaatgcagtcaaagaggcacttgtggtcacttctacactcaccaaaatgcaaattcatctcatcaactctctatctactgattattatcataatattgatctctaatttatttttgagtcttccaattttcttcttttttatatattttatttactatgcttcactcttatgacttcagtggattaggaccactttcgaatagaggtggattttgctttcttaacacaaacaagggtgtcggaagaataagaacattatatatatactttgagtctcaaattatgaaattatgcatgactgtaatatataaaccattaaataaaaaaaaagtaataaaaatcagcttaagatatttattttgattattgttttagttacatgaataaagtaaaataattttggttttgtttttgtttttatggttaaaaaaggttagtttaataaataacataatcgcataatagttttcattattttatattctgattctagtttagtaaacatattattacatttggttggagtaatgatttttaccatttaaaagtaatacttaacatacaagaacaagctatgtttggtgatttatcaaaaatataatttatgtgtctttcttctacattgtttatgtggtgtttatgttacacactagtagctaacctcttaataatttttagttggataactgttttttttttttataatttttattcaattaaataaatggacttaatattaaattacacctcaagagtgctaatcatcgtgagagcgctttttagtatttttttaataaataaaatataaatagttattttttttaacaaaatatataaatagaggaacgatattaccgaatgaagaattctgggtt

SEQ ID NO: 295381 - DNA, 6718 bp, Cannabis indica
ttttttttttaaagaaataatacaattttattaatatgaattagctaaaataatagcttgcaactcattcgggacatcttctcctgtcggaaagacgagtatgattagaattagaaaaataagtaaatcaatcggccgccttattcttggatcgtttgacaaaataaaataaaattaaatctgactaaaaagagagcagcatcgcaattaattttaaaaacatctatattcagttgcttctacgactcaaaagacacaacagtgaaaactgttgtaggagattcattcaactcaacttttgtgcaaggtatgtaattgcaccactaacagccccttcagctgctgaaaacttgttattttcaaccgccaacaacgatttgatgatgagccatcgaagaacaaataatacgaactaacaatgaaaaaaaaaatcatgtcacagagataagactaatcacagtaacaaaaatctaatcgtagtagcaaaacccgatcgacaatcgcagaagtgaaactagaaaccccaaccaagtaatgcctagggaggctcagcgggcttgactcgagaaaaaaagcaacttttggcatataaggattaaggaacgagaaaccctaacaaaagatataaaatatttggaaaaactctaatgttagaatgtaaatatagtttgagataataacatttataatattcttaaatttgtagaaaaagaaaaaagaaaaaagaaacagtttaaatctataaaatttccacttcttatgactaatgactttttgtgggtatgtacattttattttattttatttttctattttcttttaaggaaagtagatatgtacattttgagtttatactgaagtggtattacatatatataaagtatgaaaaatcatatacaattctttctttttggagggtactctcgactgaatagtaaggagttgagagcatacattcattgtacgaagacattaacagttgttaatttataggacaacatgaactggatagaagaagaaacaagtagtttgggttttgaagagggcctataattctatatactccaaccactgtgggcttcacagcataccatatataagaaaagctaaccaatgtgggtcccaccttccctacaattattagctcatcagaaaagaaaagaaaagaaaaaaaaaagaaacggttttttaattttttagacacaagaaaagccaagccaaaccctccacgcggcggaaagcttcctattctattctacgttacctcgttattatcgtgtacccctaacattctttgaccaatcaacttcctcttataattataatcaacggtcctaaatcatcgactagtagtactccacttactgtttccatgcaccctcccgtattttatttatttctgaaatttttagtaagctttatcttttctctctctcacacacacacacacaacacaaccccctagagagagagattcttcttcttctacagatacagcgaagaagcaaacgcatacctcgtgagagcctaaaactcatttccctctattctttctctctctctctctctctctccctctctcctatttgggttattaaaatcacctgctttcaatagagagtaagaccgtggagggattaaccggagctgaaatgacgtcggatggtgccacgtcagcgtctacggcgacgcgcagaaagccgtcgtggagggagagagaaaacaaccggaggagagagaggaggcgaagagccatagctgcgaagatatactctggtctcagagctcagggaaactataatctacctaagcactgtgataataacgaggttcttaaagctctttgcatcgaagctggttggaccgtcgaagaagatggtactacttatcgaaaggtactttttttcttagcttaatactgtgagctttattggggtatttttcttttttagattttttaagttagggtagatctgttatacattttgttttgattttagtttcattgtttagttcttgatttatctttggaaatgggtgggtatggtatagttggatcctgttattactgttctaaagttgactacttatattgggatattactttgttgaatgttaaaatttactgtttggtctaacctctcaacagctgaatcttaagaaacatagtgagaatatgagaagttagtgtgttaagatctgttcttggtttctgggtagactacttaacacgtccaaagtctcaaagaaaaaaacatgaaatggtcaaagtattatttttctattattgtcagctttttcttttccgaaaattgagcttagaaattttgtctaatttgagtactgatatataatcttttgattgatcatagggatgcaagccggtcccaatggatgtggcaggtacttccacaagaatcaccccttacgcttcccaaaatccgagcccaatgtcttcttcctttccaagtccaatcccttcataccaagtgagtccttcatcttcttcgtttccgagcccttctcgtctggatgctggtggctacaatccctctaatctgattccttatctacggaatgccattccttcatctcttcctccccttcgaatttcaaacagtgcccctgtaaccccacctctgtcttctccaacctcaaaaaatccaaagccaatccctaattgggaagccattgccaagcaatccatggcctctttcaattaccctttttatgctgtttcagccccagctagcccaacacgccaccaaattcacatcccaggaccaacaatacctgaatgtgacgagtcggatacgtctactgttgattctggccaatgggtgagcttccataagtttgctccttctgcttctacgatgccaacttctccaacctttaatcttgtgaaacctgctgctcagaatatttctcacatcaatgttggtcccgatgctgtgagaggaggagaatttgatttcggaggtggacaggtaatgccttgggttggagagaagattcatgaagttggaatggaaatggatgatttggaactcacactgggtagcgggaaagctcgaagttaaagaaagtctaatctggttgcaaagtgtgttatacaaagaatatagagaaaaggactggttttgctgatttcattctagtttcagcttattgttgaaagactttaagagcattctagttctctatttaaatcaatcccattcagcagaaatctacaaatcttgaaccttattgggttcttttagtaattgatttccatggagaattcttgttcatttttttatttatcatccttttaagttggttcattccttaaaactcagtttgaattgttttacaaagtactacattacattgtagatattgtgcaccttttcttgtcgccattccccctttttattattattattattatatttaatttttgtcattaatatcagtagactcagaagacttcacaatatcaaatatatatttataaaaaaaatcactctttggattatcttgccaattcctttcttcgttgttgtctggttggactgtgaattttgcccccagacccataaacggtggctgttattataatgacaagggccgacataccccatgttcttcttcgtgcatttacgcgttttgacacttaattaaaaggtgaagaaaaaatatatttagttttaaatgacaggagcttattatgggcagagccacccgacctagccaactttgttgtcatatggggtcaggtagaactgttggttcgacagtagtacttgttgtatgttttatatttatatatagcaaaagcaccaacattcccacatataagtattaacccatcatctaaagacactcgagacaatcatgctgaccagtaaaattaagaaaaattcatgacattaaaattttattatacaacaccaaatgaggaacataacaattagcaaattttaacagtactgcttaaacaaacctctacaagctgtactcaaacacaattatggatatttgttttcaaattaataaaatatggaaaagtaaataatacacaactaaagctacagctgcacaaatctaacgtctcttttcatcattttctagtcgtgtgggaaatgtgtgattagtagtaagaaactaaagtaaaactcagtcgagattcagtcatcagataaacatgtcttcttctccagaacttgatcacttggtctctctggctcctcctcagttttaggtttcaaatcctttttcacgtttaagttgcattcctcgtgtctgaaacaatttaagaggtgatcgttaactatcccagctacttgcatgaatgagtaaatcactgttggccccacacaacgaaaccctctctgcatcatgtccttgcttatgagatctgctttaggtgacttgactggtacttgacgagcatagcgaaatccattccttattggcttgtggttcacgaagccccagcaataactgctgaatgaacccaactccttctgaacctgcataccagaatgaatcacatgcaaacatttatttcgagaaataattcaaatgtcctcgaagagaggaaactttcctttttcagcagcttccattacataacatagatcagtaaggaagccttataattatgaacaacaactattatgtgtatcaatcactagttgacatgttaatatacaatcacatgtatcttgattcatcaccgcagcttaagttcatactttttcaataactttcttttaatgtgttgtggattttggaaaagataatctatgtttcatgtaaaatccaatgaattcctttgttcgagtgttattgaaggtttgcattttctttctttccttttggtcattacggcttttaccttgagcacttgcttagcattctccacgacggcgcgaagcttcggttcagataagactaagtagccgttaacttttaaagacaacaacttcttctcactaaactgtgctactgatgatggatcgaaatcttcaaacagtttcctgccataaatgaaaaaatgtttgaaaagagaaaaactatgtttaattttgtatctttaccaaaacaaatgagtaaatagatacctgaacaagtctctcttttttaaaattgctggccaagtgagttctgctaaagcttgtgaaaagacaagcaattcaaacaacttgttatcctcgtggactggaactccccattctttatcgtggaataaagtataaattgggtctgtgattcattacaaaaagaaaaggaaaaaaaagatcgatcgtgtaagcattataaattataattgaaccaccccgacaaggtcaaacgtgccatttttggacaaacataagacatgagccacgaatatctcattacaattatctattcaacaagttacattttttctaatttctaacttaaaaaacttataaaactcgaatcttatcaaagatttaaaaaagtgggaagcagggtatctaaatttcaaagactcaaccttttaaaggtggaacagactgacatctaggcaaagagaaagagtttattgtcaagaatggggagttcatcaaatttaaacccaaattttgatgaagttaattgtgttagtttgaggaaatattcccactgacaaatgcttagcttttctaataaaacacattaaacagttctgttgcagcattagtctaactcaccgacaatggaaaatccctgtatatccacattaatgggacagttcggaattttactatttttaattatactccataatttgaataatcagctaacatcattttccaccaatttttattattagcttacatttaagactaatatagtataattagaaaacaaaaacaagattaagaaaaaaaaatctcttctataaaataactaaacaattaagtaaagctgacataccagaattaggtgtgatccagtcacaccgtttaggcggacctaaaatcttcggtgacgtagtcccggcgacttcaacgctgtccggtacaattttcgccggcctcatccctttacgcctcagggtcttcttggaactcactgttttaaccaaagatccactcgaagaagaatccgaagagcacgaactgtctaccgaagcattgttccgtacaaccgtttgcggcacttccgtgaccggctttctggtcactgtcgttgtcgtcgttttctgtggttttctcaaggcctctcctttgcgtttcgggtcctcagaaaccctaactctgttaccgccgggtcccaaaatcgctcgaggctcacaaatgggcgactgaagcttagttgccacagacattgccatgaaaaatctctaaatttctcgaaacttaaaagttctctcaatcgacaaacacttcggcctaacttctctggttcttgaacttagtactgagatttcctaaataaccttttgatatccaatggtgtaggagaaaactaggggtaaaagggtaaaagagaagcttagtggtgagttttgaagcagagaacagaggagagtgagtgtggagtttatattgaagagaagaaaaaacaggggacacaaaacgacgaaagaactaacgggtttatgaagatttaaaaaatgggccaatggggttaggtaaccggttacagccggtgacactgcttgcgtgtaggttgatttttaccgtttttggtttccaatgtaaacgttggtatt

SEQ ID NO: 295382 - DNA, 5331 bp, Cannabis indica
tatattataatagaattattttagagtaaatataatgttaatacatatattacaatttagaataaaattattaattttatgtaaataaatttacaaaatatatgtatatattttattaagatataattattcttatatagaggtatactttattaatacagaacttaaaaaaatgtataactaattacaatttaaaggttattcttatttataactggctcaaattagaatttattttttttataacaaattagagattattcttgaatagagtactcttaaatagaaattttactttattaataataatattactatttactatactttattaataataatattactatttactattgttatcttattcttattattttgaagcaacttaattaaaataaatgaaactgacattttggtccaatatgaattgaataatattggttgtataggatgataattcacatgaatttaaagttaaatacaagaaaaaaataaaataaaataaataagatagacctaattgatttaatcccttcaactttgtcatttaatatattttattattatacagtctctgccaaaaaataaaataagtgactgttttaataaaatttcacattaattcatatcagctgttatcaacactggcatgtactatcaattttattttattttattttattgtgttttctttattattaaagtttttattgtgtttttttaagctacagtaaattataattgagacaaaatgaacatttttcacaaaccagatccatcaaattgcatgtatccaaaaattcacaccattacaaatatttattgtccatatatatatattattttattatttaaaaaataaactgttattctgaaatatatatgggaaagtgtaaaaattaaaaaaaaagtttaaaaatgaaaaataaataaataaataaaacaagcaaaaaataagagatgttaatggatgacagccaactgattatgacagtggtttttagtccacaaatttgtcaaaatactacccttcaaaccatgttggtgatacatattaaaagataaaatctttgactttcttgttatttttattttatttatttatttttgaattttttaaaataaattatagagtgttattatcattcttctattacaatcttatagttaatttttgaatataaaaatatatgtttgaatatttttttaaaaatcttttttatgtttgtgtttgttatgttacaatatcattcatgtaaaatttttttaaattttttaataatttaaagggctgaaaaataaatttaaaaatttttaaacacaagtaataaattagaatattaaaaattttattttcggtactgtaaattattaaaaatcttttaaaaatttacagaggtcatattgtaaatataataactaccattataaaaaaaatattcagacatgtgatttcaaacgtaaaaatttactaaaagaattgtaatagagaatttgtaattagcatttaatatatatcctaattaccatgcaccatataagtataaagtacatttattaaaaacaataaagattatgccatatagtttaggaggacacagaacaatttagactaatattttaatgaaaaaaaaaaaaaaaaatgcaactagaaaatttaattgggtttatgaaattactatcataaatttaagattaaccattataatactcaacttccatattgaatgattttttttattatttatttatgtatggcctacactcaataatgtttttagtacacaatgcttctattttcttcaagaggatatgctttgtaacaaccaaaatttcaatatttttattttttctttgaaaaaaataaattaaaaaatatatatatttttattttctttagtgttgtgaacccatcaatatattgtttttggcaacatttttgtgggtatcataagaaaacaaaatgaaatacatggtgtggtggtgtggtccatagggagccacatagttttttgcagggtatggtctttttggagtgtattaaatttcaaacatttaatcaaagcatatttagtacttacttacacttcactccatctcttcaaaacaaaataatcaaaaggaagttggagcctaaaaccatcttaatattagatttagctatgcaattattggaaagtttataatttatacatgcatgaatcttctttttaaatggttggaatatgagaatcgagaaaaaatcgtttaaaagatctaccgagatagtagcataacggttgggatgtctgtttgattctcttagttgcttgagatcaggtccgattttgggcataggcaggctaggcttatatttaaggcccacctaactcaggagcccaaaaaaattatcctcttttagaactacatattatttttatatttttaaaaatatcacattttttttttttctaaataaagattaaaatattttttttatgactcactaaattataaggccgaccctgtttgagattgttgttcgatttaagagagaaaaaaataacattagttaaaagattgaaactaaaataagctatattgtttgtactaagaatgaaatcattccatttctaaaccatgttaattaactatacaatcatcttaaatttgataatacaattatggagaattattaaaaagatttatcgagatatatagtactataatggttgggatgttgttcgatggaagataaaaaaaataaatttatttaaaaaaaattgaagttaaaacaagctattgtttattcaaagaataaaatcattccatttacaaaccatcttaaattagtcacatgaaatttgaaaatgtccttatcttctttattttcctttcactaatgcaatgtcatcatttgtcagcaaatcaccaattagtgatatgttttgctaatcattcaataagattaattaatcaatataagtggtaatacttgcttaaacgttattcaatccaaaaataactataaatactcattgaaatatcttctgagtcatcttttccttaaagggaaaataccctttttccaaaattggaaagttcattcattatgattgatgcaatgccaattgcccatttcatatctggaaaagccaatcaaaattttcagttattgtaaggttattcaactggtttcagaatcaaagaattatgaggttgagaaaaaagaattgaattaaagaaaaagattatttcagaaatacacaaaaataacaaaaagattacaaaaataccactatatagaatttcaaacatttttattgtttttaagattttatttatagaaatacggtcttttgatgtttgtcatattatttttatgttgtagtattattatttgttgtttgttttttgatatttgtatattatacttatatcgttttgacattattttttgttactttcgtattgttttcttgttattcttgtattatttttataaaaaaccgtaaaaatataatatatatttgaacgtaaaagtataaattttttaccgaacatagtattttgtgtaaagttccttggttggaccttaggcaaaaaatactaagtcctttatcaaaatgatatgtggcatttttttaaaattaaaattgggctccaaacctaggtgagctcaaggtgcaagcccaaccttacaatcaattttttaaggaaaaacaatgtgataccaaagtgaaaatcactaactcaatagtcaatatcaaaaaatataactaaagaatgtttgttaaaaaacaccaattttaacatcacctgaatctttgcattgactaccattttaatctattttgacctgttaaacaaaaagtaatggtatcaaattaactagttcaactcaaaagtttgattaagaagctaaaatgtgttgttcttgtcattgtcagtgagtatcaaaattcagattatattggaattgctccaatccaaatttacaaaactggtgaaatcttaaccttctccaataaaatcaaatgtatgctgctcggtgaattttcgctcggtggaatcaccgagcagccgttagagaaggtcttggtcgatctggttatcaccccgagtaaaaccccggggtgaaactcaatctcttttctcaagccagctaaaaccagggcttttatgaacatgtttctccttcataacctttcttaaactctgtaccttttcccactctccatgagcagcataaatattcgataaggttacaaaagctccaggtcttttcaactctaatttcaacagatcttcagccattactttagccaaatcccttcttccatggattttacaaccactaaagaaagctatagcaattgactctgttataaccattggcattcccttaacaatttcataagcttcttccatcttccctgaccggcacaacatatcaacgacgcaagcataatgctctttactcgcctcgacaccatatctcgctttcattgagctgaaaatctctaaacccttttcaactaaaccgctatgaccgcacgcagacagaacacaaaccaaagtcacttcatttacttgcattccttcttcttccattctctcgaaaagctctaatgacaaatcaaccataccgtgtttcccgtagcaaccgatcattacattccacagtgcaacatttttgttatgaacactgtcgaatacacttcgagcattcttgatgccaccacattttgagtacatgtcaacaagagcacatccgacataagtgtttatatcaactcccattctgtaaatcaatccatgaatttccagccgtgtttgaactgaacccgtcaatccacacacggggagtaatcccgtgatggtgacttgattaggtttaatccccgaaactatcatgtttcggaacatttctaaagcttcaccgacatgttggctttgaacaaaacccgaaatgattgcattccaagtaaccaagtcaggaacatgccctcttcttcttctcatactagaaaagagctcagtgactttatggatatctccacaccgagcaaacccgacaatcattgcattccaagtgaattcatttggttccaatccttccaacttcatcccctcaaacaaatcaagagcaagctcactcttcccaccattgaaataaccacaaatcattgatgtccaacaaggaacatctctttcaatcattttatcgaacacgttacgagcataacacaaactcccacatttacaatacatatcaatcatagcattcccaacagaaacatcattttcaaaacccattttgtaaaccatagaatgaacttctcttcc

SEQ ID NO: 295383 - DNA, 747 bp, Cannabis indica
atatatatatatatttatactatgaatatgattcagcgttgggggctccattatactcttgccatgcattgagtccttaccaaaaggcccatagtatagtaatagtagtacttgccttcccttctatgaattattagagagagaccctacaatattatctctttctatctatctatatatttgttttgaagaaaaacaaaaaattggtccaaatttgtttaatcaaagttttgattgtgtttttcaaataagtttgattgtatttatttaatcaaatgtattgggacgctttcacaaacagggcatccaagtcagtcaccggcaaattccaaagtgtaattgatagagacaatgaacactactaaccttttgcaaaagcaagaaaaataaataaaataaaattattgggcctaaaattagactacgttatttaaagtaaactgcaacaaaaaccaaattaacatatatactattttaattcataatagacaaattaatgtatttataactatttatgtatagaataagaaaataaaggatcgacctaatgttaaagcaatgtcaaattttagcaatgtcaaatgttatgatttttctaaatatatagtaagatgtgtaaaaattgatataattagtacctccataagttatctagtgtaaggtttctaacatttagttaccactagaagaatttaaaatctaaaatcatttcaaaaaggagttcttacaaaaaaaaaaaaattgtta

SEQ ID NO: 295384 - DNA, 903 bp, Cannabis indica
cggacttactcgagggtctgtgcttcctggccaaatttattgactggatattggtgtgtctgtgtggtacatcctacacccttatccttaatggtagatttcatggctttttccaagggagaaaagggctccaaaaggagatccaatatctcctctcctttttgtgctggtcatggaatacctcactcgacttctaagccagttctcagatacaaaagaatttgactttcaccccttttgtaagtctcttaaacttatcaatctttgttttgctgatgacttagtcatctattgtaagggaaatctttcctctcttcatattgttcaaaaggctttttctagtttttgtgatgctacgggtctagtagccaacaaatctaaaacctccatctattttggtggtatctcggctgatctcaaaaagagtcttttagacattgtaaatatggaagaaggattatttcccttgaattatcttggagttaaactgcatcctaataaatggaaatatactgactgtgttggtataatgaaaaaaattcaaaaaagtcttcatggaaggagcagtaggcacctttcttttgctggcagagcttaattaatctattcagttcttttgggcattagaaattattggatgtacatggattctagctgtttccatagtcttctgcatgacgaccattatatcttgcatcctcctattttgttccttttgcgcgggtagttcagcctcatgatcagccaccttttgccttagggccagtagttcggtataactgccatcgtcataagcatcatacccttccttgtttcttcatactcatcgtcatttgtttcgtcttcttctttagtatccacgtttactcatgaagctgcttcttcgtgttggaaattatttta

SEQ ID NO: 295385 - DNA, 1463 bp, Cannabis indica
agtgtgaactaatacttttaataattctctatacataattatttacaaacctccaagaccccagccacttgatctacaagtaattggccatttggcctacctagagtctttaaataataattaagtagttatatatagtactaattcaaggtccaatacattcatgaaggcaccctctacaagaaagagtagttcaaaataacattgttataggcctacaattttggaacacaaccatctgtattgttgttgtatatacaataataaaaagacaatactaaaagttaaaacatagaattaggcacaaaaacaaagagagagccttgggaattacaagggcatagcaaagggggttgggtgtcctatatatatatgtgaatgtattaggacatgaatcatgatctgatggcataggacccaaagggccaagggccatgcaccctttgttggaccatatcaattactatattggtccacatatcatactgtctttttcactgtccatttttattttgtttctttaaagtaccatcaattgtgtggtttgtataccttcatttaataaagacactattttgccaactaatattaatataaagtgtgtacttttcttatggttataatttcaaatctctaacctgaccaataattaattgagttttatatgttgtaggtttggaaaatgaaccctttttagattatatatattttatttatttatattgtatagcttggaaacagacattattagtaggtaaactctttggaaattgtagataaaataagccatttttacggccaattttaataatggaacaggttaatcaccatgaagaaaataataaataaaaatgaagatagacatgcctaatgccttggctattatatggtctatatatgaaattccaagctagagatgagaaaccaagtgcaatattccaaaattgagctttcacaaccccactttatactaatttatttatttattttttctttgatcatgttctagcttcttggcactagtagtgtgccttgtaattgtataagactagttttaggtgtgtgtttttatttcatttgttaaaaaagatggtccatagtttctaaattggaccagcccagtctgggtgggtaacaaaagtccggcccatactgctcacacaataatgattttatcctcaaatatcttttactattctttaggaattactacactgtgtacttatggcaagttgataattgcaattacatgtaataaaatgtagctataattttgaaagtctcaattgctaatatattgaaagaaaatagaatatataatatatatatatgaactatttttctcattttaccaattaattttgaaataaaatcttatacattttacaaactttaacgcatgcaaaaaataataatttaagaggtgcaaaaatatatttttaaaaaaatccaaaaaaaaaaaa

SEQ ID NO: 295386 - DNA, 3241 bp, Cannabis indica
ccttacataatgaaatatataaaacaagatacactatagtgacataggtagataagtgtaaagtataagtgaaaatgatagattagaatattagatattgatatattgacataaaaaatcagtaaagaagatatcattttctttattaattaagaataaaaaaaaaaaaagataagtcgaagattatatactctgtatataattttacaagataaaaacacattaactacctgttctttaggatagtggtgactatagaagccccatgaataggtgggctagaatacatgggcctaatcacaagtttcagctggctctccacattgctagccacttttgctgtcttacacacctgaaataagaagtggaatttttaaaaatacctaaaagattttgggaataaaaaactaaaaaaatacgaaacatatataataaattatttataaaaatacagaggagtatattgtaaatagaatgtttatttttctgcagaccaactttataaatttgtaaacatacttttttgtttggtaacttaagtttataagagtgtaacaatgttgtaaaaaacatttaaaagggtaggaaattaagatgttaagagttttgtttggcttacaatggtaagagcaccaacacgttctggataaagacccatgatctttgaatatgtttgagcaataagacactcaccaccatcaccaacgaataaccttacagattctgcatcttcttccaggcttccactaactaaaccctacataattaattaacaaaaaccatatgtaatgtgacatccacattctcatttttatataattcacagaagagatttttatgtatagtaggaggtactatactttttactttttttttttttgaaattataaaccaatttctttaatataaatattctacctacttttaagaaaattttaaataatttattgtacttaaaacaatggatttttggctattttgagaaaaacagtagaattagaatgcctacttataatttctcaaaatgcagaactataatataatattatatatgtatatattaatgttatattgttaaacctgataagcagaatcaaaaaaaggtaataggccttttgatctaattaagtgtcgtatttggtcccactgatgaatggttggatcaaccccagttgggttatgaccacttgcgtggaaaagcacagttgccccacttggcacaaatgaaaggtcttccaacaaacctgttatatattaatttatttaattattaataacaataaaattaagaaaaatcataataaagagcaagtaatgtaattaatggcatggaccttgaaagtccaatccatttgttgctgggtcgtagtaacgataggtcttcacagccatacccaccgtagagaaaaaatttgggtggttgctatacgtttgtttaggaatatataccatcttctgcataattaaaataaaattatgtaatttatataaaaaccaatcaaataattaattgatgataataatatttactttggtgtaatgttgtgccaaaaattcagctccaactctcagtgcgccacaaccagccacgcattgaacggtggtcactctattttctttaatagcagggctgcatatattatttgagttttcatttgatcatcaaaaatcgatttaattaacaaatcatttattagtgacaaaagaaaattgtaataaaataaaatgattatatacctgtcagcacccaaaatgagcttagcgctcaactcattgaattcaggtattccagttataggtacatattctttaaccacacacctatatatttatatatatataataattaattaatcatgaccttgcctgttctgttcatatataaatatacgaaattatattacttgaaaattaatacagtaattaatttataaaaacatacgggtcattgagtagaagctgctcggctcgatttactacgtcgaaaacgaaaggttttccatcctgttaatgaaacaaaaaatttcggtttttaaaattcaaatttgggtacaaaatcagtttcatcagcttcaatatacaatattattactattataattataatgaataatgattggatgagaaataattagattagaataacaagagggtcgttttcaaatacaaaatatatttaattctttttcaggtatatatggtatcagtattagctttacttttcgaactacttatatagtacttaattacctctgttctataaactccactccctaaattgagttttaaaggactggtatctttgctataagcagccattacctgttgttaaacaaattaacccaaaaaataaataaaacactaattaaaaagtgatgtatatatattctattttaagagaaaaatgattattaccgcataggttggggtttcaggaacaagaggaatatgttcaaaagcagactccccatttaataattgatcacaaacaagtaccttcttctttgttccattattagggctcatcatcatcacacaagactccattaattatacacttgtcaaacaaaataacacaggctagtcttcctttggtatatatatatagtactaaccaaaacccttccacaataatagtgtgttggtatagttagttgccttggcctgccctatcatatatatataaatatatatatatatatatatataaatatatataaataaatgaattattaatacgaagggggaaagcagcatggcatttgctatttcatttctaacccctttttattttgtttgtttggttcgatcatattattattcgatccatgcatatcggattacaacatggtttcttcatggatcatggtgtggttttctttgtctctttctttaatattagtagttgtatatttattttattataattggtatttgttacagctggtggataatataatactccattaagtaaccatgagacatttatagatatcaatattaaacgtaattgtattataactatttttttttaaaaaaattgctcaattcgaataaagaaacaaacaaatgatcaaacactagtatcactaatattgttaataatatatatgtatataaattggcctatccgtaaaacttttgggcaaaattgtatgaatattctttgggaaatttacatagtatactaacttttgttatttttttacaaaatactgctagacggaattttttacttttt

SEQ ID NO: 295387 - DNA, 5226 bp, Cannabis indica
aaaatttaaccgcactgcttcttggtttttgcttgatttgctttttgttggcccaggtggtttgagtattggttgcccagggaatgctggagcagctggaacctactttaatgctgatttacttagcctcagagttggtaatgacaatatcacaacagaaactgaaacccctctgctcgattttccaaccagaccattatggtcacatgtttttgtggagaataatgctaaagtgttggttccactgctatggaccagagttcaggttgccaaatttagagaaattcattagtttattttatgacatgattaaatttcgtgtttgtgttgtaaaacgaacaaacaaacgggtcacatagtatttctgggatgcatgcataattggctttggaatcatctcttgtttcatttgctctagtctttagggagcttgaatgagattagttctgcgtgtgtttatattctcgtaagtgcagagagtgaatgaaagatgaagcttatatattattattttgttgctatttttttggtatttattttgatttgtctacttcaagtttttcccagtcctcctttttataattatttttattttctctcttcttttatggcttttgagttagagtgggtggaagatgggtgaaagctgttatattattcttttttttttttgtattagtctcctttgtactttgctactcaatagtatactcaaatgtactttatgatatgcattcttaatctatgaacataatttatggcttgcgtatttactctttgattatgaaggtgagaggccaaattgggttatatcgcggaggcagtatcatttttggattgtcgaaattcccaatttcagaatttgagcttgttgcagaagaacttttgatgagtgattccaccatcaaggcaagttgctgttgtccttcctgtgtttctgtagagtccatttatatgaatataaaaggaaaactgaaaaggaagagtttcgaagaaatcctaattttcaatagcttttgagtctcattgatctaatcaaaaaggcataagtcccacaaaaaagaaaaaagaagatatcgaagtagctaaataaatcacgaaaatgagacttttgcctactttaaactgaataaatttgcccaaaactgttgaaaaagaaacatcagttgtttgttttatctaaaataaaaaaactagcctaactccatgcgtaaccatacagtatttgaggaccaggaaattatagcaactcaattttaatgtttatttactatgactattttcttttaagaagacttaataagtgtaacagaatttgattggatctcaaagagaaattaaggccgtattttcatataattccaagtaattaagtaataaaatgaagttctgttatatgttaagattttactcttcaatactaaagagttttgtgtaactttttgccttgatctaaacatctcttttatataaacataggtttttggtgcatttagagttgctgtcaagatgttactcatgtggaactctcaaattcaaattgacggaggtggaaacactgtcgttacgacctcagtctttgaagtcagaaatttggttgtcctgagggtaggatttgaacatcaactttacttttactaagcttggttttacttatcttcttgttcgtggaaaatttaagagcttatttggtaaaccatttgattctttgtttctgaattgtacttaactattttctttgttaatacacccttttcgtttctttttgttctcccacaaaaggaaaaaaaaatataattcattgtctcttgcagcaaaactctgtcattagttcaaatgcaaacctaggtgtttatggtcaggggctgctgaggttgactggtcgtggtgatgcaatcaaaggccagagactctctctgtctctgttttacaacataacagtaagccattggtgtaactcatatccgggtcttactttgactctgtatacttgttatttttcttttattttgaccaaaaaaatagtaaacctataaattacaatgtacttaagtccatgcaaaaacttcttcttcttctctgtatctatctcatttcactaatcttcttttttattaatattttgagaaatacaaagtgaagagatcatatatgaccctcagcgtccggaaacaattattattattaattttaccaagagatgatttgtggtgctttcaatgctaactttcaaaataagtattttctttgatttctgttttgaatgtgattgctttgcaactggtcatgtgacaggttggagacggttctttaattcaagctccattggatgatgatgcaagtagactcaagtgagtgggaaccttaggtcatagctctcttttttatgaactcacctaattaattgaaaatcacatgataaataatgtcttctgaacctcttattgtcaggataacaaaacccctgtgtgagagtcagacttgtccaatggatttaattactccacctgatgattgccacgttaattatactctgtccttttcaattcaagtgagtattgtcatctggttctgattggtgtgacacagtaaatatttttgttgtgctattttgtgggtgtcgtaaatgtttgcatagagtttgtttattatcatgcaagtttgtaagtcagtattactcttgaatatttcatggactgcagtttggccatacattaacaacctacacttctctgatctctcttctatttaatctacagtagaacctctatataggaacaacctttattttattataaaaaaattggtcacaaatataggccaattataaatcggaaatatttacaaactgtaattagtaatatatatttgaactcttgtgttcagacaatatacatttttgtagtaataagtatatgtacagtgtctattttggctactatcactttgtatgagattaattgtttgtttatatggtaaaaattaaaaaacaaatagaaatgttttggatgaccttgaggagggtagcacaaaaatagaaaaagtttcatgccaaaaagttttgaacatgcttgaaaaattagaaattttttagatttaacaagaaggtggtaatgctagtgaagttattacatacccgtgagttcaaagatgtgctaacaactctaaagagtaaatgaatatgctggattactttacataaatactttttgaataatagttattagtaagtatttattgtattgttgttaaagttaaaaaatttgggtgttaggattcttttttgtaccaataccttcaaccttttatttagaattagatttgcttggtcccaatgttttttaatgcaaagattttactgtatatatttctagttcatttacagtgttgtctaggcttgtgaatgaaatccacttttgcaaactttattacttactagtgctttgtagtgattatgcaagcttttcctggcagtgttgcattacattctgattaatgatttcatctagtagttttatgtaattaattgcagttgttttttaagcctttcttgtgattttagcttttaggtttgatttcattctgactcccttgtatattatctataatgtaagttgtgcataaaagcaaattttcttgaaacattcctcatgattttgacacgtgttcatatcttccttgtagctaatcaagaatattgtcactgcttactagattttggtgtctagttagaacttagaagtgaacatatccagattatgtgtggggttgagtaaaatttttggggcaatatggaattatgggttttataggtttgggggttcatttttgtgttttgtcatggggaccttatctgttgtaagttctctagatagtacaaagccttgttcttattataaaagtaaaagttacatgtgttagaagttttttgtaactatgttagtattgatgctcaaaataaacaaataaaaatgttctttgagctttacagatctgccgtgttgaggacattcttgtcagtggccttgtcaggggaagtgtcattcacatccacagggcaaggactgtaattattggttctactggtctgattacagcatccaagctaggtaataagaatataaaccaaacataccgtaattgcatgttttcagtttcttattagaaggtaaccttctttttcaggatgtagtgaaggtattggaaagggaaactattcaaatggagctggaagcggggccgggcatggtggaagagggggctctgggtattacaatggtaggataagcaatggcggcaataaatatggcaatgctgaccttccatgtgaattaggaagtggagctgagggacctgaccattcgtttaacaatgttgttggtgggggaatgatcggtaatgttctctatacttcttacttgcccattctagaatcaatgtcatttatgttgtaatgtacttataattaagtgagaatcggaaataaatgaatgtaaactaattgaaaattggtaggggatgtgtcaggctaaagttagggaagcatgtggatctaaaagacaaatcataaaattaaatgacttagaaacttaagaaccatgacaaaggccttattaggttcttttgtgaatatgtgccggtaataatcaaagtaagagtcttgagtggctgcctatacaagagcactctcatcagcttgtctattctatcattcaaaatacatcaccaaaatctcactttctctattttttaccttaaacttttacattacaccatacatcaacttctttaaaatacatcatcaaaatcccactttttttccaaaatttaatatattttattcatttcaaatatataatattaatgtatatacatatccacattaaaaggaaatgttaaaacctaaaacaattaatgaaatatgtttagaacaataaatagtattctataaatgtagagcagaaatagtaaattttaaagaggaaaatgaaggactttagaacatcttatgtagtgtttttagtgtggttcttcaaatatttaaaaaatctctattttatagcatttgatgtgagtgctctaaaatgtttatcatttttatttgtgttaattgatttatgtttctcatgttgtagttatattctacttcatttttatttactttaacttttttttattattttttcctctcttttcttttttgattttcttcttttccatcattcc

SEQ ID NO: 295388 - DNA, 739 bp, Cannabis indica
ttgtcaatgtaagctgtttgagagagagcaagggatcacgtggatatgtcaacttaggcgctcagggtgagtgctcctattgtgttgagcgcctagtttttcatctgggcctttaatggttttgtttgcttattgaaaggacttatatcttcaccttcgacgaaaataaggaaaatgcttgggggacttctccgaaaaagtgtactagagtgccagtggttgacctatgtcaacctaggtgcccatagtagcttgggagctatcactaggagactaggaggggaaaaagtgctaggaatttaactcgttgatgttcacttttttttttgggggaaaagtacttaatggacttcaattttttctaattttcacgggtgttactcagtgaagtagatttggggcccaagttgcaatgtcaacttggggtgtttatcaaaccgcttaaaccgctcaaaccgcccgcaccgcaaaaaaaaatgcggtttaaaattttttgcgatgcggtcgcggtttgaagttttcctaaaccgcgcggtgtggtttgcagttttgaattattaatatgcggttcaaaccgcaccgcaccgcatactataaaataccaatttttatatttatttaggtccaatatgtgaaggtccaacctaagcccactaattattgtattgtgttaacttgaaacttttttttatatttattttcaagccttattgtatttttgacaagtgttgctcaagct

SEQ ID NO: 295389 - DNA, 5975 bp, Cannabis indica
tagttttttggcaccgtgtttttggcacacacgctcctacttttctaagcttttcatggagtttaatccgttacattgtatttttaattctccttttgataattagtggtgtttgcttttgtctttatgtttcaaaaacttgggtttgatgcattatcctataaattttatgtttcttgcctttggtattcatatctaacatttattgggcaactgtgcatgtttgagaacctcctgattataaatgtattttctggtctatttattatgctcgtagaaactaattaaaactttcataaacacacgtcagtctgtattcttgagaccacgatctctataccttaaattggaagttattttgattgcatagtagctcaagactctcttgagtgtttctttgtccttgcatgcctgtcctttttcaactttaggatgcaatttatctgttatgagctttgcgttgttgatgtcaacctctggatcaatttttttttacagttgttttccaattttctgctatttcttcagcaacaagatttgcacagtcaactatgttgaaatagttgttgtcacattcttttgtttcaatttctctttcttcttctgctagttgttccagtgtgaatgattcggttgttggcgcgttgttctcaatcattccctcaatttgttaaacttgtgttgttcttgattcgaatacaggtattgtacgtagcagttgttgtgttgttgttctgtgcgttgacgcacaatggatacgtggtgaaatcaatttctttgatctttagttgcaagtaaaagaagaggctcgcatcgttgaatatgttaatcggtggtatttcatattttatttggtactggatttgcagggttatttttgtgggttcgcacgccaatgaagagagaaaaatttgtacaaattgttcatacttgtaattttttggtatgaattctccactaacctcgtaattgacatatttttttctttcttcctagcatctattgctcttcaagagaactggtatagattctatgtcttataatattttgacaatatttcaacaatttaacattgtaaaaaaaaaccattcacggttgttctttttgttacggtagtccaacttttatttgggtgcccatttattatgtatatccctgatatttgcaatacactgcagttaattaactaagaacaactaaaactacgttgaatttattaaaattaaagaaaattattaatagattttttttcaataatactgtatatgaatttgtaattatttcatcatggatatatataaatcagatttcagaagcgacaaattgtttttataattgaattcgagatcatgtatgagcattgttaatattttcagattcaaataaataatttgtgtgggtttgagcttcttacctttttgatctattgatttttggtattgatgaagcttttgagttttgttttgacgtcgattttaatgtttttgtttcatctcacaggaattaatggttgttttgcggctattctgatgttgctctagtcgttcctatggtaggtcttgagaacgaagtctttctctttgttttggcctctatacaatataaaagaaagaatttaagtttaggacagtatttttgatttttgtatatttgttggtgtggcagtataaaagtaaacttccccttatttagagtatatttgtaacttcctctatatttttagtttttatacataaaacgctagaagctacttcttttcaatatagaacattccttaaagttttgtcctgatttttcttttctaatagaaatatggtcatgttaatcatgaatatagtgtaattgcaaaaatgaattattagagattacataggaaaaatattttgtgtatatgatttcaaaatcaaattgcagatgatttaaagaatgtttgatgatatagatatagtttttatattttttaatgaattcttacttctggattgaaaaataatgccaagaaagaatattatcttttatatcttttctttttaatttttattattatttaaaataaaataagaaaatttaattatttaatatatattaaataataatataatattattttaataatttttagtaatatttattattgaaatattttagaacaaaatgtgtcaaaaaataatatgaaagagagataaaatttaacaccgttaacaaatgtgagtataggaaaaaattgtgagcagtgaaatctaaaggacaaccaccactatatatagcagctgatttattataaatttataagagaggaaacagtgagagtccacttttaattgaatgatcataaacatgtttgttccatgcatggatgatattaatcatctataatcacctatttggtgtggttgttgctgtagttatcaatctattttgacgtatacgttctacatataatttcacttaaattaagaattaattgattatgatcatttctttttctttttctggtcaattaaagagggtactgagactgagagcaattacttatatttatagggttggtgatggtattggacattggacaaggtgggtaggcagtgtttgtagggttaagatgtttggtgttggacttacgtacgtactcagactgggccgctatgtaccatgcacttttgttcttgcaatctagccacccacccagtacaatctaatctatcacctaacactacttaacaaaacatatagttataattaatctcaaataatatcacaattatattggctacgctatcaaataatgcaaactttttctgattttgttaactatatatattagcttgtcaattcaagggaataaccatcgctcgggaaggggtcatgttaagtctgttttagacaatgaattagtaaattagaagtagatcaatttattttcgagagttgtcttatgttcatcccggacgagtaattctgaccataggcccctttgtctttactttggtggtttagaaccaagatttaaaaggagtcttaaatttgaggaaggttggactcgtgatgaaaggagtaaattggtggtggctcaagtctagaactccttggttcatcattgggcccttgttagaatctttaagaaaattggtgctactcgcacgggtggcccttcgtcattggaataggcaccagtttgaaaaatttgactccatcatcaaagatctggaacaaaagctggataatatgcaaaaattacatacgggcactagagattggaatgtggaaagtgaagtccgacaaaccttgaatgagatgctagaaaggaaagtgttatactggaaacaaagagcacgcatctcgtggcttaaggaaggagacaagtgcttaaagttctttttccttacaaccactattagagggagacgtaatgtcattgagtccattctagacaagaatggcatttggctcacgagacgggacttgattgggaaagaatttactgatctcttaagtggtatcttttcagggactaattctggacagcctcttaactgtaactatctcatccatgataggctctcttccagggatcaggaggagctagtccagttccctaatagtaaagaaattcgaaaaactctctttgccatgtatagtaacaaagcgctaggtccagatggaatgtcagtcctattttttaaacattattaggacgaggtgggtgaagatttttatgatgcagttattgatttttttaaagggaagggaatcctaaagtgtagatataaggattcagattcttggttccaaaaaaatgtggtaaaaacaaatgaagtcttaaggaaaggaacctgtaaagtggtgtcaggtggtaaagatactagtatttgggaggatccatgggtggcccatgggaagtattttctcccgaaatctaatggatcctccacttttagttatactaaagtagttgaactaatagcagaagaagatggggattgggacacccaaaggttgaactgtccgtttaaaaaagataccatctctgccatcctgaaaagtggaagacatgctggtcatggaaaggataaatgggtctagactaaagagagtattgggtggttctcttgcgaatcgacctatctcttgcaagctttgcatagggcccctcagtgtgaagttgctccttccctttggaataaactctagaatagtaaaattatggagcgccataaggtcctttagtagagcattctatctaatgccctcctaatttgatctattattcacaaaaagtttcatattgatgatgtgagttgccctatacgtgggtttaaagaagaatctatagaatatttattcctcaattgtgatttagcttttcatttgtggcgatcctcgccatagggtattttccctgttttaggtacaggtatctgcacatgggactgggtcaaatttatctagaatctaaattctaaaggagtaaatgcagatgaggtctttttgtatgcttcaattgttgttgatactatttagagggtccagaatgataaggtacacaataataatttagataatgtgaagcgttgtattgactatattcatcactcttatgcagactatcaaacttcccttcttcctactcctactcttatattggtgaaagcatgtcgtcctccccctcattattggattaaactgaactgcgacgtaaaagtgggtttaattagaaaccatgagtattgtggtagtagctaggtaccatgaaggtgaggtggcttgggtaagtacggcaaagttggatttttttgatgccctttgtggtgaggcggctgcgtgttgtttggccctagacaagaccgaggaaaaaatatgcatgttcattattgtggagagcgacttaagggtagtgatcaattctctcattttagtggggccaaatattttagtatttaaagaaaatataatttttattgaaaaactacaaatttatgtggataaaaataaagaaatgtgggaataaaaataaaaaatttaaattttttaaggattacaaacaaaaatatatgggataaaaataaaaaatatatataaattttatgagaataaatataaaaatatataaaagtagattaaaaaaaaatatttttatcatattaaaattatgtaaaatatccaaaaatttataagtgaaatttatattataaaaagttgggggagacaaataacctctcatgccctccccttttttgcagctagtatacccatctctaatagggaagaagcggtgatttatattatgaacttactcggttattattataattctatttatttatttattattattattattttgtattaaaaatattattttttaatttattaattcataattttttaaaaaataaataaattaacacgggcataagggagccgtatctcaccccgcctcgccccatttagatccctaagttaaatcctctaaattaataatttataatattttttgaaagagagaggacatcgatgtgccgtgacgacggagaaattatcggctctgtatgcaatcaaggcgaacaggcggtcattcttcagagaacgacccgacccgacccgaatccatttgagagcaaaatctcattcttaaactaatgatgccgagaaacgatgaggtctgagcttattttatacccaataataataatttataacaagtgataaacaaatgcaacttgaatcaatgaatttccgttgtttcacattgactcctatcttgtaattaatgtaaattagtgtataattagtacctaatgttgatattgaaaacttgtctaatcttaattactaaaaaaagtaaatcaccgagttcgatccttttcttttccaactctattctcaatctctatttctcttctttcaataatattttcacattaaaaaaaaactaaaaagtaaataaaaataatgattatacaaaattttaaata

SEQ ID NO: 295390 - DNA, 1952 bp, Cannabis indica
tcatagagtcatcacaaccaccattaacacgctggaatcaactaccaacaattaaaaaaagaagaaataggttttaggtttgaaaaaagatttagctgtccgatcctaaaagtagcgacatcattgcatccaaatggttgaattcaactgataccgaccctatctctactgtctcacacaatattcaatcatgtgttgattccttacaagcttggcactctgcaaagtatggaaaaatgaagaaacagatcaagaattatcaagctacagtagagaaacttaataatattgatacccgaacccctttgcaaataaatgaaacacaacaagttgcatctattcttgaagatcttcttgaacaagaagaaatatattggcagcagcgttcaaaggttgaatggttagcttgtggggatcgtaacacgaaattctttcatgccaaatccaatgctcgtaagtccaataataggatcaagttcctactcaataatgcgggtcaaagggtgttctctaaaggggagagtgatgctgtagttcacaattattttgaagacatctttaaagcatcggatgttgatgatcttgcccttgcctttactttggattgtatcccagccatggtcctggatgaacacaaccaaaatctcaccaagccgttcactgtgagtctgtgaccgaagttgaagctgacttaaaatcaatgggatcagaaaaaagtccgggtatcgatggaatgtcagctatgttttgtcaacagaattggtctacagttggtgatcttgtttcaaaggctgttcttaatattctcaatgagggggctgaccctactagtctcaatcgtactatcatcaccctcatccccaaaattaagaagcctcaacaaatgaaagatttttgacctattagcttgtgcaacgttatctccaagcttgtcacaaaaatgcttgttgcaaggttcaaggaggtccttccaatggtaatttctcagacacaaagttctttcttgcctaaccggttaattactgacaacattttggtagcctttgagttggttcatgctattaaaaataaagtctcgagtcgtcaaggcattgcaaccataaaacttgacatgagcaaagctttcgatacagtagaatggagatttatgaaagaagttaagaggaagatgggtttcgcttcacattgaatttctctcataatgacctgtatttcaatgattagcttctccttcctcattaatggtgaactaactggccatttaattccttctagaggcttaagacaaggctgtcccctttcaccatacttgtttttgatttgttctgaaggattatcgaggctcctactacatgaacaaaatgttggacagctgcacgacttcaagcttacaagacgggctcctccaatttctcaccttctttttgccaatgatagcttccttttttgtcaagcagatgaaagctcatgtcttgctatcaaaagagttctggacacttaccatagggcctcgggacaagttctaaactatgacaaatctgtcatgtccttctcccccaacacgaccttagcagctcaaatcttcttccatagacacttatcaatgactatcagcgaatgtcatgagaaatatctgggactcccatcatactcaggaagatataagaagaaactctttagcaatatcaaggaaaaaatttggaagcttatgcatacatggagtgagaaaatcttttcagctggtggtaaagaagttctcctcaaaactatggttcaatcaatcccaacatatgcgatgagctattttctccttcctaactatttttgtaagcaacttgaatcaatgatgtctaatttttagtggggaatgaatgaaaatggctccaaaatacattggcaatcatggaacttactttgcaagaagaaaggggaaggagggattgttgggtttt

SEQ ID NO: 295391 - DNA, 2348 bp, Cannabis indica
aaactttggcatcaaatgttgttttgtaagtacctgcaagatccggatgcgtttgagtaagcctaagccaatcgacctggctataccccttctcaaaaggaaccttggcacgagctgcaggcttctttatcttcccaacatctccagaaactcgctgtttcgacggttgacttgcttgtttgggagacgaggcatcaataacattaaaagttaaagaaccaaccttatcttgtttttgagataccgtagtatttggtacattgcttttccatagcaaaccaccattttgaccactagcacttgcaccaacagttgataacccatctttaatgctgatattgtttatatctactgcaagctcccttgtctcaagaccatctggttcaaccggcggaccaacctacaagtatgaacacagttaatgagtttggggaagattaagatacttatatcaagcacatggaaggagccaaaactcaaaacagatttgaacttgccttacagaaggtgaaatcattatcattgtccatctcaagttgaatggtgtgttgattacttcaagaaatttttcctgtgaatataatccattaagtttttacattgtcttatacaaatttggcatgcataatatacatcgaaatccaggacattacttatgtgttagacagcaactttgttcaaaacattattcagaaagatctttaacaaaacaaaaaaaattattgacacatatatatactttcatcaacacattgtataatgcccctggtatgttctccttctccaaaagacagactgttaaacctaaaaaatctacaaatttttacaagtgagaatcaaaattttatctacacatagagaagatatgtttggtgaaatctttgtagtgttttttttttccttcctctgattagattcattggtactaacaggttgatgaagagagttgcatcattcgaaaagtgccacaaataggtgtttttgacaatttttcttcttatcccataaacactacaaattccaaaatcaaagtctcaacttgcttttatctctctcatacacttgacacaaattcacatcaaataatttgctaactggacaatgtattaccaaagcttcatttttacttctgatatttcttaagaattttaacaataaaaaatgtctcacaacaaactcatacaaccagagattagttatcaattagaaaggaaacagagagaaaaacaagtcatgaatttgagacacaaaagaacaaagactgaaagacccaatttttaacttttcttaattcaatatatgcagaatgaaatagcacccattgactgatcaatcgactaaaaccgacccagaatcaacaattaatcaaattctcttaattaagagttacccaataaacacagcataatctaagcaaagcaaaattctttatttcttactaaaaactttctgggaaagcaaacaataaataaataaggaaggtaaattgagaatagaaatggaaaagaaaactgacagaggttgaagacgaagtatagagtctacgatcgaagaaccaaacagatcccaactctcttcctctctcgtttcaagtgaataacgtataacaaaaaaaaaaacgcaaatctttattcagaaataaaaaatggaacctggtcaaaattgtacgaccataataaatttcttataccataaataacctttaactatataacatattaacaaattagtccttcaaaaataactttttttgctacgaggaggatattagcaattcatcatgatatattctttttatttctattgacaagtttgattaggttttaattgctcatgttagaatattggcaatagaagaaataatttatttggttagagagctcaatgtcacatttaaaagaaattcacaaggctaaatcagaaaattgaaaattttgtaggtgcacaagttaagaaatttgtaaatttttgaaacagatcaaaaataacaatacgaaactgacacattaactgaaatgtaccaaataaatgtcacaattttttgttgtgacttaatatgtatatattagtgataataaaatttatggaattatcaaaaaaaaatgtacctaaaaatatctaagttctccctttatttttaatgttattataaattttttaactacggacattttagtcacaacgtcggttacaaaaaaattataactaacactttaggtcatgacattttctaaatcaagtttttttgtagtggctaaatagtactggtttgacttagtacaccctccaaaattaaataattttcttttattatgtattttttatttttttttacatcatttaaatat

SEQ ID NO: 295392 - DNA, 1062 bp, Cannabis indica
aaactggaaaagaacaaaaaaaaaagccaagcagttaaatacccacactaaagaagatagcaagagtatagaagagtcatccccagccggacccagaccttggacttgaaccctgaccccgatccagacctaagactagaacctgaaccttagacccgaaccccaaatccggatcccaaccatggaccccgaccctagacccaaatcctaatcccggctcggaccccagacctgaatctgaacttggatcccagctccggtcccagaccccgaacctaaaccccgacctcggccccgaacccggtcacttaaataaaatgaaaaaatgaaaataaaaaataaaggtacagaacacacttttattttctgtttttaaaaattgaaaaacaaaagtagttatagaacacatttttatttttttataataaaattttaaaaacaaaaatttattttatttttttgtgattaaaaaatttaaaaataaaagtgttaccacacactatcttaatttatcacaaatattcaatatatcatgactaaaactaattaatcatataaaatagaaatttagatcaaaatttcttctgttgtgatatttatagcacttaaagaatgtttgtttgatccaatcttatatacacgcacttaaagtggtgtttagttggaggtagtgaaatggaatggaatagaaaagaaacaattttcatttcattcttttgtttagttgcattttaaagtattagaatagcattctaataaaatgttttttctaccattttggtggaatgactattccattttaaaaatgaatgaaagactattctaatgtaacaagagaaaaaatttaatgattttttttatcaatttttttatgtattttaaattttattccattcctattctcattgctaatcctattcctattcctacattttcattccttccaaccaaaccccacctaatagttgtcataaatataagttgtgtttggtaatatttttctaattaatttttgttttaaattaaaaaaaaataaaaaatattttctaaaattattttcac

SEQ ID NO: 295393 - DNA, 2630 bp, Cannabis indica
aaagtaaacttttttgtagtgatcttaatctttggtgaaaacggagaataagacttctcagaaaaattccttgaaaatggcccaagttgacaaagtatcaacctgggtgctaggccccaattttgacttctagatggctccatttctttcccgaaagtactcaaatcttaattgttgacgaaaatagaaaatattctcggaagactttatctaaactgttgatggaagtggcctaggttgacaaagtgtcaacctgggcgctgggttcctgttttagcctctaggtcgatatgtttctccctcaagggcacttgtcttctcattttggatgaagacaaagaaaattcttgagatagttcttcagtattgtagttggaagtgccccaggttgataatatgtcaacttgaaagtgctccagttttgattttgttgcctcaaatatatttgtgataggtcttatcaatgtcccagtacaaattttaactcatttgcactaagatgggcccaaaaaccaaaaccctagcagggttgtcaacctggtgttgggcaccggggtcgacttccgggttattatttcggagttcccggagtcaacctgggcgcagggctaaagaccccttccaagttgactgtcatgactcgggactactcaagtgcaagatgtctttttttcttgccacgtgtcaaacattgatgtctaagtcactagggtcaatttctgggtaaacatatgtataaatattagatttttgaaatttattaaatatattaatgaaaaattaaatttaagttgaaaattaatgtttaattaattttagatcaacctaaaataagcaattttcacaatattcatttaaaatttatactaaaaatggaaaatgaattttatttattttttagataattctaagttagtaatttaaaattttaaattatatttagtctatctaaattggtaatttttgtcaatagattaaaataaagtaataataataaaaatatactttttcttcaaataatgaactttatttaagaatatttgatcttcattgttagtctaacatgattcttattctaatggaaccttgaaatgctttgaatttgtcaaatggtaaggaatgacttaacaacgttagatattgaaagataagtatttataaattaaattcttgtagatttactcatacgatgactactagagttggatttataaatatctaaacattggtagaaacacataaaataagaatgactttgactcttacttagccgaacatcatttaaaaatttattttgatctgataacgaatgcacagtagatcactacgggaagtgactctagagatgacaaaatcaaattttgaaccaagaccattcaataactgaagaatgacatcttgatcaggaataggtgagcctgctactgcaaagagaatctacaatcgattgggactttttctacataatatgaaattgtgagaccccctttgcgaacattagagaacttaactgtcaattgaaaaaggcaagccttcgattaacttgaaaacttttgttccagagcatgccatggagaataagagatgggaaaattagaaaatgaggtaagaacaccttcagtcattaatgaacgcagtcaagacaataacaggtgatccttgcgtttccattggccatgttcagggttgggatcgctattgatcaaggttggcagtggaggaatgtcaacgaacaagatttcatctaggtcgtgcgcaatcacggtgggagccactttatgatttctatgtgaaaaagttagtgcggtcgagtttgatcatcaaggttgaggtgatagagcatgaaaaaggattctagatggaaataatcagaattggcgttgcagttgtggcgtgagtgaggaccgagcaagttgcaagacctttgcgagctgttttcgaattaatggaagtatattccatgagcgatattagtcaagagcagctaataccataaaaaaatccagagttaaaattcagagaaaatcaaggaaatttagagagattttgctcaacaaagcttaccttattaattgaacaaaataatgtatttatacaccattacaaagacttacacaagaaaagttaataagaaagctttaacagtaaattgaaacagttaaaactaataactaacttcttacgaaattctaattattatttgtatatatatatgtgataaataattatttaaattttactttttacattatgaaatatttaatttttttaaaaaaaattacatgtaatcctaataactaaaacacaaattctcctgcacaccaaaataagttaggatctaccaaaacgatctaccaaaacatcttttggaatatggtatactacaaatttgtctagaagatatatattttgaaaatttataaaagaaaatagataagtgtttattaaagaggaaattacactctatattctttttatattgccctcttttatttttaccctcttttttaaagtttatcatttttatctcttttttttaaatattgtactaattttgtccctgtcactttaagatactctccatgtgactctcttatattagggtattttgggtacaatacatataaaaa

SEQ ID NO: 295394 - DNA, 2495 bp, Cannabis indica
ttttaacgacttaaaaatttagggggcatgatttgatacatgaatcctattattcacttttaagtaattttatttagcaatgatcattttttcttcctattataaatcctttcaacattttctagagcacctaaaggtagtaagttatctatatttattcacaaaaataaaataaaatttattacttacttaccaaaaaagtgaatagtaagtgtaatatattttaaaatattggtgttaatatccatatgaatgaagttgtttttgtttgcttaggttggttgtgtaatatagttagattgtaattcgtaacatatgaacttgattgaaaagaagacatctcttgtatatagttagctgaaaatgggctttagaaaagcccactagagccatagcccaacttcgagttaaatattttgtaaggtttaccatgtctcatgtgaaactgtcatagcattaatatttaattaaattgtaacctttgcttaattttttttcctcatatatctccccaaatggaggacttttccatcccagaatctccatgggagacttgttgctgaaatgtgtgattgttcatcattggaggcatttgttttgtctcattacttccaatcgatgatgatcatgcataccattcgttggccttgactctccaatgcccatgaaatcaaccattattctatcaccatcaccattgccaccaccaccaccaccaccaccaccggtctctgcgaaccttgacaaccctgttatattcctctctgttgaaaattttccatgcatggaactagaattagtactactatcttcttgttctagaatagtagtggcactagtattgttcaagaacatttgactatacattcccatgtcatggctattattaggaccaaaagaatgtggtaattcttgttgacttttatgagtaggattgaaccctccttctctaccgttgatgtcaaccatgctggatggatctgatggttgagattgaaagtggtgatcgtaagcagggttaatatgatggagttgcatctgggcctgggcctgggcctgtttgacatgagagagttggtcatgatgaggaggaatatgtgggccagccatgctactagtactactgaagctcttttgtatcattggagagtttatactgctactgcttgctgtggctcccatttgggccgctttttggagtagggccgtggcagacatatgggccgatccagctgcaagaattgggccgctcgcatttttgttgtcttggaggtaattaaagccagaggagctattggagctaagctggagactagaggctgaagatgtggaaatgcctcttgggcttccaaaaagtgggcctgagctggtggaaaacatgcctccaggggccatattgttcatgggcttattataaggcattgggataagctcttgaggaatggacttgaaatcagaaagcccattaatggatgtgttagtagtcaagggcattgatggcataagatccggcatttgtgtctgttgtgataataaatttggtcccatattcatattgttgttgttcattagtccttggtttactttgttgttttcttctgctaatgcatcacaaaaggccctgtgggtaataaagctgtctctcctgtacaaaatagtggggttttgcatgagaatgacataattatatctatataaataaattataaacaataatattgtttatttaaacatccccaactacacacatatttcttttattaagaccatttcatatgacatacgcatatgttatgagtaaattaaaaagaaaaatatttgtcattatccaattactaatctagctattctgaaaagataatttgtattattatattattttaaattataatacaataaaaagaagaaattgaaaagttggaagacagaggagaaaaaaaaagtacataaatttgtcggccattttctttgtaaataattaatttcacaccacatattcaaacttcatcataaacattttactaacttcgtttgtggccatatctaatgatttcccaatcaagatatatctatacatatctaaaagtattccataaaggatggcatgcatgccatatatgaattgatcaaaatatttaattaagaacaaatttattatgttatatatacctggaaaaaatagtaccacagtcacatttgtattctctagtgccacaagtcttctgatgagccttccaatcagattgaacagcatatttcttagaacacttatcacatttccattttttctcaccatgttttctgctgaagtgttttttgataccagtgaggtcacctaatgctcgggtcgggttatggtgaacacatgtgggctcggggcatatgtagacccgtttcttcacctctgttgtcgttctctgccgaagcttccatggaagattatgacctcttctgtgtaactgaagattttggtctctttgaaaccctttgttgca

SEQ ID NO: 295395 - DNA, 8951 bp, Cannabis indica
aaatcccttccaaaaaattacaaccttatgacgttggttctttaatatttgccgaaaaaaaaaagtgcctctaaaagcttggtttgtagtagtgattagatcggatcggatgttggatgcggtgtccaaaaatctaatacatccaacatctaattgaactaactagtattttcatttattttggatgagtaattagattttataatgttatacgtaaaatatacatgtacatatgaaagtttacattttttttttggattcgatgtatccaaactaatccaatatatactggacttaaaatattggatggatttgattcaaaaaaatactaagtttaaaattgtaatgaccatttgattttatatggaaattaacaaataaatagggatttatttaatcttttatcatttttatgcctcttagtagataattaaggcttattgtcaaaaataggctgtaaattattatttttctcatttatggagatatatttaaattctaaatatatatattatatatgttatatatgaaattttatattttatgtttagtaacagtgaaatgtgacgatttggccaaattgagtcacttagatacagtggagtatcttagaattagcgagataaaatagttagatatttagaatatcgagagtattcaaagattgtagtttatactattttacccctaggcatttaaggttacttcatagtgaagtaagggcaaagtgtcattttgccctaagttaatgaattcttgtttttagtgaattctagcattttctaagagatttttatgctgattgtattcaattaaaaataaacattttggtaaagctagattattaaaaataatcaaaacccaagccttcttatttactctccctctagttcagccaagaaagaaacacaaccaacactaacttttcctccatttctagaccaagattcaaggattattcagcttagaattcaaggttaacatagccaagccaaggtaagtctctttttctttaatttctaaggttaaaagttaggtttttcatgcaattattggggtttaggttctgtatgacttgggaatgcttagggtttgtttttggaattgttttaaaattaactatgttgttgtatgttggttttgttgactatagcagggtttgaaaaaaggtttaagcttttaatctcaaagttgggtctttaatggtgaaattgatttcatgggtttgtgactgctattagatgttattttatgtttgttgaacctaaaatatgtgttttggaggtttgtagaagatttggagtagttttgtagttgaaataggatttttagaaaatctacagtagaaaatagcatactatttttttagaaatggtctaccattttctctagtagtgtcctagaaaagtagcttattgtttttaaggaaacgacctactattttatgggaattttccccagagcctcgatttagtgtttcatcgatattaattagagtattaccacactgtttattgattggaaaacttttagttggagtctaagtccccaaaaagtgatttagtgtgtcacttattagatttatgcaatttgtgacttaggactttaaatcgtcaagcagcagtttctactgaggttgattggcacatcgaaatttagaatcaagataagattagtataatgatatgcatacttacatgttcagcgtacatgttttataattgcctattagataacatatcagtaagaatagtattagtgtacatagagttgcactgaatatggacggatatatgttaggcaaattctaaagccattagttttgcataacagtggtgtcgatgtacatagcgttgcattggatattgacgaatatatgctagccttagttgtacaaacatttcaaacttagtacgcgtcagacatgagatagtatcgtgactaggtgcatgggagcctagttacaatttggtttatatgtttatgtttatgcttttcttactaaatctgtcgactcacaaatattatttacatgtgtaggtaaaggcaaggaaaattttgaacaacagtgattatgagcaagatgaagattgtatatatcaaggcagttaaacctgggagggttcagatcttggggacagttagactttattttggtagtcgtagtcgctagacgacaatttttgtagtacatgtatttagtaaaaaaaatgaaacttttaaataggatcccaaaatatgtacttatatatatctatttaagtttgattttatttatgaaattttttaattattcatatttttaataaatcctttgattagaaaatgagtgcacattaattaagaaagcatgatagtgcacctaaaatagtagggcgttaaaatttggtatcaaagtcgccacgttgtcttctaaatatcatcgcgatatgtacaatcatcaacagagataagcttaactcacggttcataagcctctatatattttagtagtttgatttattagtatgtgaataagaaaagcttgataggatgcatgttagtagcctgatagttgaatcagtgcatgttttaaattctcaagtaagcggtagtcagatttaatcttgatcacgatctaaccaagctaactcatggtttcataggctagtctaatagaattgataccaggcaaaacacaagaagccaaggcaactcggtcagatctagtgttgttaaaaaggtcagaatcccactaatgtttgtggctaaggtggagggcaaagcggtagggtttgcggtcgaggtaatgttaacccactgcaggctgcttaggattgggaacaaagatttgtagaaatgcaagccaaaattaatgagcaagatgaagagatttcaagcttaaggcaacatggtgctcctgtggtgcctgctcttgaagaatcgatagcccctgctcttgtgtttctagtggagcaggtttttgttggtaatctcatggaacctctttacgaaaggtttcgtaagcaagcacctccagtctttctgagaggtctgaatgttatgaattttgagtagtggctaacagtcatcaacaaaatatcaaactttatgggtgtcactgacaacgactgagtgacctgcgccaccttttagttctaggagaataccctagtttggtggaatatggtgtccttcactcgagacgttaccaagattacctaggaagagttctgggacttgttcaacgctaagtactacaatgaggcagtttgtagtagaaagaggaaagagttcacctagttgacccaaggggagaatatgtcaattacgaaatataatactcaatttgacagattgaccatattagcctcgagtgccaaccaatttcaataagaaggaaaagtatctggcaaggttgaaccccaaaataaaacattatttgatgattaatatggatgacacgactacctatgcttttatggtagagaagacactgtgagctgaggttgtagtggagtttatttaggaacccccgagggactcaaaatgttggtggggccactgctcctcctgttgaccaaaattcaatcactcacttattatgatgataaaaaaatgtttaattattatttgttactaatattttcttgatcattttgcaagtaaatttacaaagtatcaatattttctcagtaaattcaaacatattcaaagaagtgaattcaacaagtatatcaactacttcatacttcacaagagaaaaaatttcatcaagagatcaagaatttcaagaccctatccaaaagaggactacaaaagccaacctgaaagtcaaagtcaaagtcaactctcagaaaaaagttaattttagatcaaaacatacaaatctagctagaaatctcatctacatcaagactacacacaatcaaatggtataagtttacacacaatccatcatagtgtattagggtttataagttaaaagtttggtatatcagccatgttttgagttgagtatcgacggatgtccctccacaattcactcaaaggtagtatcccactcatgatggatgtgtaccttccttcctccaccaggttcttgaccttggtagcttcagtcatgaatctttaaagatagtctttcagaggttccactgacatcaactaagtcttccaggctataaggcattttcttggaagatgataactatgtgtagaactctcttttgaaagagttccacgaattgaacctttcaacagcaagtttgggaaaccactgctgtgcagtttaagacaaggttattgggaagatttagcaatgggtatcaacctcaacattctataaatccatctaaatttcaaaatatttaatgtgagtcaagagatcttctttccctatgtacatcccccaagtagacatcttgaactcggtaggtaagggcagcgcattgatgtgcgtagagaaaggtgactcttgggtcctgtccaactctaagttggaaagctttgggccaggcaggccttgtgtcatgttcttgacttgatctagttgtgcttgcactagaggatcaacttcgacttactcttgcttgaccaaattttaacctgccagcccctggccggccaggctgaccggtaggtggataggaaattggctggccagccccctgttgggttggccgggtttggtctattctgccctattggtggagtgttcaggggcacgatgtattcgtcctgagaatttattcttcggttcaagctagctcgaagatctaacttgacatgagggcccattctagcaaacacaaattatgtgggccttgggttagaacgtgtctaaccattacatggtggaattgtcattgttgcgcccaaatttttgagctcaccaattagtgcacttaccacttgggtgactagtggcactatcatcattatgattagggtaagactccctactatgagacctgctttgaccttgtattggtgggatgtacccccctccttttttgcctctacgcatgccttgaaattggtcagtcctaccacatgaccttttaggcaagacctggccatcattgggctaataggatggccttatttgggacacagttagccctcctggccttgaggtctgcccatgatcgcttgggcgcttagttccttctggaacatagggaccttttcccagatggggatcccttacgagggagggctcttcaacttgagatccaactctctctttgaatgacctgatcaaagtcgttagcctccctattctgacggttcagctctgcctgttgggcttggaggatcgcggctagccgatccatccactcctagtatttgcgtctctactgggcaaaaacattgcccacagtagcctgtgtttcttgttggtcatggtgcaggaggttagtataaccctgaacttatcctacaacctctctcagcctagcaagttcagtatcatccccaggtccacatggggttcgtcaattctagggtcgccaaccgtaggtctagtctcaatagcatagacacgaggtcccactcctatgctaagaattttagttgtggactggagagtgggtccaataggcacttgctctccttgacaaactttcgtggtggaagttccagacagctggccggaacatggtggcagttttagacagctggccagaacgtggtgaccggctagccaggcttggattggtcacaacaagtggcacttgcacattaaggtctgcgaccatagggtctcgtggttcagtcgaattttcacgccttgtgacaaccatgcagaagatgagagcttcttgaatgagaattttagacccttaatgaaagcactaaaatattgactatggatttagccaatcgacacagattccaattaggattggatctcgcttatgactgccacgtgtggaacaataataaatgtaaaaaagactagaatttatagaggttcaactcattttgtttatgtaatgacctactctccttttagttgtattcactcttgagataaaactaaacagattacaggctgaaaccttgtaatttctagctaagctctctttagtattacaatatgtttggcaggtgagaagtatgagaaaagagagaggacttgttccgatagtgcttttaagcgtacttgcctcataagttttgagtgtgtatattgcccttttttatagtagtaaagcttacaagctacacatagagatatcccgagcaaatagaaaagttaaaacgtatatttgaattacaaagtaaataataattaattcctaaagaataaggttattatttgttgacggagagtccctatctttgtgggcagtttgaacttttcttaagtcgtggaaatgttgagggtgagttggaaggctcgtgagaaaaatacaagtgttggcaagttcctatgtacttggccgaccagccctactaaaggttacccagtgcttggaagttgtcactcctggctggccagttataggtctggtcaggacttcgctggcagggttgtacatctcatttttcttgtgtgtaccgtataacatgaaatcttaaaggttaagaagctacagggcaatagtcctggcaggttagtgttgacctatctccaacgtatatttttatttttgccacgtggaaggaccacgtcaaatgaacaaactttgggataatacattcttattggaatttctcttagggtaacgagttacctgatcctatttttctcatttttttttaactttttttgaatttttcctatgaaataactttgttgaagaaacaactatatatttttgcataaattagggtaaatactattttgaaccctattaatgggatcattctcttttaaagactttatttttaaattcagatgttagaaaaattcagagtattcctctaactttatttgatcagcaagacaaactaatgtggcatcatgagtcaaatggaatgtacaccgttaaatctggttatgctttggctactcttatggaagatcaacaaccttcagcaagcgtcattcaaacacatcaatggtggaaaaagttctgggcactgtcaataccttcaaagattcgttttttttctctagcgtgctatttatgattgcctttcagtagctgatatactccacacaggacatattagtgattcggcaacctgttctttgtgtaattgtgagaatgagagaatatctcatgcactcttttttcgtaaacgacttcgacgagtgtggcaactctcttctttttctcttgatgggttattatcgaaccatacgaacctaagggaattgcttcacgtttcaaagtatggttctctttgcagctggagcaatttgcaaccatactttggagcatctagagtgaaagaaacaacgagaaatatagtaccaaactaaaaccacctgatgtgcttctttactttgctatctcttatttggatgaatttttttctgctcgaaatgtcatgaacaatggaggttcaggtaatgtttcttctgcaaggtctgtagcacgggattctcaatggttgaaacccctttcggggtgcctgaaacttaacacagatgctgcagttgacacaatgaaacatacttctggattcggtgatatcttacgaaattgtacaagagatattattgataccatgtcggttccctttcgatgatgctttaaacgaaaagttatagaagctttggctcttatgcatagtttgtaatggcttcattatattgagactgattctcttttagtggttaaaggattgcaatctacccaagaactagtttttgatttttattatttgttaaataatatttctcttttagtgtccaatttctttggagctcaaatctctcatgtgtacagatctacaaataatactgttcatttgttggtcaagtttgttctttcggcagatactaaatattcatggttggaaaaaatgcctctacctctttgcctattgtattataacttcttagtttaatttaatagcattttatctcaaatatatatataaattgcagcttacactcttttttttcaactcactctcgtagctaattagataatattttcaattatacgacttttacatttatagtttgcaaatgtataaagaattctttttccaaattctatggatttttttattgaaaaatttaaaaatattgaataaattagtaactactaaaaaataattatagattaaactaaattgtgtaaagaaaaaaaaaagtatatgaatactgaagtcataaattaaaaatttaatagcaaaaaaacctttatacacaaatcttcttataaaaagtcacaaaatttgtgtcctaacagatatgatgggctaggcccaaatatattaatatcttctcccttcactagagagatttttttttatttttgcagtcctacactattgcttgaaagaataataactttttaagtaacaataatctctcttcacccatatatttgtattacactcgattgatctatttcatattataatttatttttccattttcaaaattgacatgataacaactagttatcactattaaaataattatttttttgatgtggcagggacgtgtatgatctatcactattaatttgatagtttattagtaatgagctatcactatgaaattagtttaatattttcagtgttaataaaaaaaaatagtttaataatttcagtgatgtactggtaattgtttatcactatcaaaaatattatttatttcattttcatgatacggtagtaactggttaccactatattaatatataatttttttttcataattgatgaatattccatattttagaaatttatttccggtactacctataagtttgtggaaatatgtttttgtttatgtttataagaatttagtttaaatttaggaaaacttacaaaaa

SEQ ID NO: 295396 - DNA, 3432 bp, Cannabis indica
gcagcccattatctgagttctgtgattcaaaagctggggcagatcgttctggacatgattctcatgaaggtaaatatatcttttctttttactttattttatttattttattttcgcttttccttttggtttaaggtattcatcttaatcgctagtctaggagtgagtaattcaactgcatccaattgttttaaaaatccaatttatcttattactgtatatgcgtattagtgaaaacaattaccagtcttgaaaatgtaaaaatatgcttatctttgaaaatattagtataagtatatattttttgttagcaaggtttggctgcataaaattaaactgagccatctttagtggggattctgtttcttagatacaattttacatttgattgtgcttcttttgtgctacagcaacaaactatgtgctgagctttttctcaattatattatgttttgtacaggaggattatggggcagaacaatccattgcccaggtagcctcttcacccccgtttttttgtgggtctcctccaagcagggctgcaaaccctgtagtccatgatgctcgattcagagaagagaagcttgctcctgttcatggatttccttatccatccccatcgggtttatcttcaccctcatcttctgcacgcaaaggaggatgtgttagaatgaagtttgggcctaatccagccgcagttagagtagaaggatttgactgtcttaatagggatcgccagaactccagcatccctgccatggcttgaaattcctgcaattgtatatagaaggaagctgaatgccaccaccacatttcacaaaaaacaatagtgcacttaaccagaggagatattttttctggatatttttggagagaattgagatctgttactgtaaatatgatgatatgttttttttcgggtgatcgtctcactgctaatgtctataagtagtttgagtgtataacggaggcaaatcttttgttcaagagaatgtttgaacatgctaaaggagcaatgctctctttttgtaatataaaatggcttagtagtagagtactagggaaaattgtgtctactatatcaagttttgatggtcactgaatattctgtataaagtcctattggtgttgtagtattggtcatgtaaatgagtattgttaaatgttttagaaactttacctaatgtgttggcatgtaattattgtttttattttggaagctcgttaaaaaccaagggcatggtgaattgaatcccattgaatattaatcttgctgccttttatggatggatgttaagagctaaataaatttgttaacgaagtaggtgaaggctcataaaatagatattttgacatttggtaccgttttttcctgatagaaaataaaagttcaatctaataaggagataaagagtgtcttttggtaccttccaaaagacaggcataagaaacacacgaatatatctgtaatctatcaaagagtcgttagtgtaatgagagttttagtcaagttattttaccatgttttgaggtctcttacttaactaactgttctaatatttagtagttaagttagttggtgtatgttaattttgttagattttctgtgttagatcttgactgtgtaatctctgttgctataaataaaggacttacctaactcatttgagttaatgcttttattcaatttttgctcctctattttgctttttatctttttttgttgctctctagttaatcttactaaaggtctccaccttctttatggtatcatcgtccatttgactcacgtccaaggaattttctacctccgatcctctagctacgcttcctactactcatgctactctgaacacagcctgaaatccatttttccaactccctctcttcatcccttaccctcaaacttgatcacaataactttttatcatggaaatcccaagtggttcccacggtaattggtcatttgatcttgaccaaatcttgttctccgatgtctctcccccggccaatctggttactggtgctcctaatcccaaatatgtgcaatggaaaaagaaagaccaatcgctcctgtcttggctgcgatcatcaatgtcaaaacccattttggcttcggttaccaccctcaatacctcgtatacggtgtggcttgcgcttaagagagattctccagccaaacaaaagcttgtcttctccagctcaaaggtcaattttctcatctccaaaaagccaacctcccaatctctgactatgtcgataaaacacagttgaatgctgttgcgttgtcaatcataggttcccttgtcaataatcaagatttggttttacaactgctcaatggtctgggtccggagtttaactctgttgtcttacgaatcacatctcgcagtgatctgctatcatttgaagaagtgccagcccttcttctctcacgtgaaactcgtctagaacatcataactctgttgtcgatctatctgtcaagctgcaagctaatcttgcatttcagtcgtcaagaaatgggaatcctcgctcctatggtcgtgcaactgatcgtggaaatgccattgacaacaatcgaacttgtacctatggtcgtggcactggggcttgttttctttgccaagtttgtcttcgaacagggcatacatcaacagtgtgtgactatcgctttgacaagaattgggttactcccaaatatggtaatttcaatccccaagctcatttgtttaaatatgatattccctatgatccacaggcacttctcaccactatgatacccgagcttggtgatgatgagtcctggtacatggagactggagccactaaccatgttgctgttggcacaagcaatcttgatgctgcaacaccatataagggtactgaaaccatagttgtgggtaatagtaagaaatcagtcatttaaagtattggtcattctaccctaccttccctattagatactcaatccttgcatttaaatttagttcttcatgtcccttccatgaaaaagacattattagtgtttctcaactaacaactcataatgacgtatttcttgaatttcataaatcctactattttgtcaaggacaaactcacactcacagtacttctcaaaggaaaggctaagggaggtctataccagttggatgatgcgtccaagtcctctgtccagtgtcatcttacaattgcctccaatgactctactgagaattgtacttgttggtgtaattgtcattttaacataccagttaaatcatgtactagtgaagaaagtaataaaaaccagttcttgttcctattcttctgatttccctagtcaagtttttcatgtttctaaaaccaatgacataaacaattggcattgtaaacttggccctgttgggttttatgccctaaataaaactctttacaatctgattagttatc

SEQ ID NO: 295397 - DNA, 2289 bp, Cannabis indica
atgcaaacttgcccacgaatgactacccgtgtcatctcgtgttgagactaatggccaaggcacactacgtctcttggaggatctagaccacgtcccgtgcaagcagcataccagcaagctaagagaaacgtactagtaaacctctagcggcattcttcgacgcactatcaagtcagccagataatgttcatgagtactctaactcatggagacatatgagtccatagctgacaccaaggtgcttaaaaagaattctgagcttttagccttttaccaagaatatacataattttggctctatagacatagagtcaaatcgtaaaccaaatcacctaattttgccaaaccgattacacaattctatttgtagacccaaataaatagcatataaactaatatcaccagcatgcaccactacttgaccaccacttggccaacttttgggcatcacttaacttgtaacgtgccatcataacatgcacgtaacacttagcaatgtcccggtgttgtcatcactgctttcacacatcagtttggaaggagaacacaaaggttttagagttaattagtgttcctgatagttttgttacaattaatgtgaacttaatttatataaatttcaattgtgctgcgtggcaaaggagttgttttcatttctgttgaggtggactctaatatgtttgcttaatagttcatcaagaaaatacgtttgtaatgtattaaaaacctgcttatttgatgtcatcgatcatacccacgtcttgttaatttgaagtaacaaaactgagattttacacaaatgtgaacctcaaatttaagattagagattataacaaattttacaggctcagacacgcacaaatactgtcatcaaagagcaaagtacgtatactttgccacttgtttatgtatatttgtcaaaatatacaatttcaggatcgagaaatgaaatttgtcatcctcgccatatctaaaattcaaatttacaagaaattaaaacagccaatgtcaaattatacacaaaaaattttacgaaacaaaaacaaaataaatcttcaatccaaaaatgtaactagaattaggataagatagagagaaaaggagaagcagctcaaaagtgcttgaaacaaaatcattgatgcttctcagtgtacagttgaatctgttttatcatcattgctacactttccttttcttcttctctatccaccattaattcaaataaattcaaaatcaaacccaaaatacataaatttagaaacaaaaatctaaaacaagatcaggcattcagaatgagtaggaggtttgtgttcatcaaagtaatcagaaaaacatttcatcattatgcctgacatttctctaatatactatgcaaagataaaccctaatttaatgaaaacaaaatgatatattgaggaagaagagatttcctctcagacaaatgcctcgattgtcctcatgatttttaagaatggatatcggactcgtcatctgtgttgatcatcaatgagataaccccttcatccacaatatgcatataagcatgtataacaaaacaaaaaaacaataaaaagataagagatttcctctcagacaaatgcctcgattgtcgtcacgattttatgaatggatatcggactcgtcatctgtggttgatcatcaatgagataagccctttcatccccagcaatatataaatttaaagcagagaaaccatttacgattgaatgaaaataaaaaatgagaagggaaagagaaagagattgcctctcagacaaatgcctcgattgtcgtcacgattttaagaatggatcggactcgtcatctttggttgatcatcaatgagataatccctttcatatccaatattaacaaagatacaaacatatacatacatatagctatgaaattagcactaagaccaacacacctgagaaacaggacacaaaatgaaagaaggcggaagaagagaagagagccacaatggtagctttgcctggtggttcgttttatagatggccttcgactctgcttttattagggttagggtttcactctttgctcttttctcttctctaatctcagactcggactatgggctttataacatggcctgaacatagatttgctctttggatcaaacatgggccaactttcataagcccataatttggtcatgaacatagattccctgagggataagttgaaaactacctctttttattacacattaatcaaatataaactctaaaataattttaattgataaatactctcttttataatcaa

SEQ ID NO: 295398 - DNA, 2076 bp, Cannabis indica
accaacggactcacaaaatgtcaccttggggactattaccgccaatttttgaggttggggactaatcggcatcaactctaagtttttggggacttttgccacaattatcccattatatataaggtattccatcactatagtgttaaaataccagcaaatagcaatgatctcaacaaagatgtcctataccttatttaataaataataattattggtttagtgggtgctacaacttaataatgcatataatatagatggtggtgtttattttttaaagatgaaatgagttaatatgaacacaataatcttaatttatttttctaaatattttagccaattaattaattaataaagcaagaagatttgatatcgatacatgcatgcagcctttgaacctagacgaattgaaactatgaacgaaaactagtggccttggatttatggtttaatttgatgagtaattaatttgacttagtaactaattaagcaatatataaagggagcttttatagttcacttcacccaccaaaaattggtgtattcatacacctttttcatgagcattgttattagtgttcagtaatttttagaagtagcggtttatgattagtgagcgatattctttaaaaaatattatttcaaattatatgatctctgatacttaatcgtactaaacaactatataagatatgacaaaagtgttagacactaataacaccttttaacatttctccttttatgtttctagtatttttaattagttagtaaagatatggaattattgaaaagttcttcgaaaatagaatttaaataaattattttacacgcatataaaataaataaatatcttcatgtagtaaattatttaaatattatttttcacacatgtaaattattttgaattttttaaaactttataaaatatcttaaatatataggatgcacattattatatttttatatataaattagaatatttatactatatatgtggatgctagaaaaaaaatgcatcaaacatcaatatatattctattaaagaaaaagaaaagcatgtttgtaaggttgcaattaatgatatggtgtataatgtgtgggagacccgcaataatgcttgttagaatactcatcaagttggtaagattaaatcgtcttacggtttacgtcagggtgaccctctgtctctttatctattcatctgggctgcagaagttttatttaggcttctggaggatgcccttaacaagggtactattaagggtataagactcaacagaagaggtccagtgctctcctatatcttcttcacagatgacttaattcttattggtaaagcaaatttaaataaagttaaagggtactggcaatgtcttgagcggtaatgttcttgatctagccaacaaattaatatgctcaaaatttctatattttttagtaaaaatacttccaatggcatgaaacgagggattaatgaagctttggggattgactctcttgaggacaatattaaatacttaaggctgcccctatttagagttagacaaaaggatactgacttcaatttcatcttagataaccttacttctaagttgcaggggtggaaggccaaaaccttgtctaaggcgggtcgtgctaccctcattaaatcagtggggttgtatttgcccatgtatgctatgcaaactaccaaactctctaatcgccttgtgaccaaaattgatcagtattattaatatttataagaatattattaatttagtatgtttattatgataatattttaatagaaaaaatataatttctttttactaaaaagtcataacaaattcaaattgaggtgtgtaattagacaaatctaaatgtttgacaaagtgtagaagagaggcctatattgctattttgaatgtataatatttgtgaggcaagaaataatactttatggaataactaagtataaggatataagagtttgggcataatcttgtagattttgcctagaggaaattacgtagaatatggcattttttctttaaatttcataaatatggaaaaattagagatttacttaacttatgg

SEQ ID NO: 295399 - DNA, 4520 bp, Cannabis indica
ttaatatataggtgtgtactaacaatcagaaagtaattaggctaatgataattgtcacagcatataagtatggcccagtctcaccattaaaaataacagaatgttttctggagatctaacaggtaattagaaaggctaaatttgcaagccaaaagatctaacttagcaccatacatgccaaaaaagaaaagattttgttttttctgcctttcactaaaacttaaagagtaagatttgtgtggtttaggcgggttggtgagattattcaaattgagatgtgccaaacatgccaagggtacagtaaagcattttcagctcttacattagatctgtgctaccaaacagcaggacatcatgactgttacttacagtaagtacagccgtctatttctgctgatgtcccatttcagccatttattcctgtgagtctcacgggaatgggcattgttgattggtcaaacgcttcactagcatctgaccttgtcaacacggctcaaatcatcaactgccacaaactgattgtgatcagaatgttgtgatataaccaaatacttgataattaattttacaaaggaacactaatatttttccccttgtttcatcatcagcagccatgacatttgatatcaatgctcagttttcagaaatatctcaatatttccattcttgtccaacggtccaaggtagagatatactaaagtccagttcaacgaaccaaactatcaaaacggaaaagcaaacatgatagaaagaaattcagggagttaaagatgatattttgataattaactcctactgtttattccgtcttacactattcttcgcaaggcatcagtcatcattattctaggtgactacaggagacatttttcacaaagttatggcttccagctcaagagttagaaatgataaatttaaaggctacaactacaagagaagtagtaataacaaaaacaatggtttttcttgattattcttgtacgaaaaatcaatctgtctaatataataatatgtattagttttacctagagatcttcgtaagctaataaaaataaaattatctttgtttaattaataaatccagtaagaaactgcaaaacagccaaaattatgtaaggttcaccagaactacaaaaatcatggttacaaactcaagtaattattttatatgaagcagttctgaaacttaaatcccagatgcaatatcctcaaaatctcaaaacttagatggttctctggagaagtggggaaagggatgaaaatggtggtctaacgtagccagatgccacggtataaggaaaaataaataaaaaaaaggtctcagaagcatagcaaaatccttgctacttttattatgatcactaacaaatgtaatgttgttttgaaaacaattaatatcacgtccattgtatgccttacagggcataaatatcttccttcaacctatgcagacagcagtctgtagtcagtagaaagtttataaaatttcatctttatattctcagtccaaggatgcaaaagcattgatggccagcacttaagaaaatgaggagctattggcttcaaaatctctagtcatttatctactttccaatatcaagcatttcatagtagtggctatgtatatagtttttactttccaacggtgatagtttgtaattgaaaaatcagaagagcaactaaatttaaactaatttgcgaaattgatccccttattagtacatcttaatacttcactaaaacgaacaataataaaaccacataattccagcaaacaatagataaatcaatagtagaaaccaatgccttccacaatacttgaagtagtggcaccaagctcacttcttgttctttgcaaatgtttccgtttgtagccaagacatcaattttaataccaacatagcatgaaaagatggcaatgatgaagaccaaaaaacaaaacacgaaaacaaagtaaattcaaatgagaagcagcgcaaaccttctgtcgtctcagcttttcattctcttcttctagtcgagagaccttgttttcgagttcatgtgtatacgcctaaccagcaacatagaaggatggttgagcaaagagggaggaaatcaagatgaaactagcaaaatcactaatagaaatcaaagtctcacctgtctccttgctcgtgaccgggctgctgattccctgtttttaatcattctcttctgtcttctctctacagttttctcaaccacgtcttcaggagcaactctttttcgtccaggcgtctgggtatctgagagagcacccatcaaagaagatggggacattatcatttggttttcagagtatgctgcttccaacataggattcccactgtctggaagaggttgttgaaccgagtggccttgcataaaaacagccattgaatttagctgatgctggcgctgtgactgctggactggagggagttgatactgcatccattggatatgttgtgagatatcatgttgtgcaggagcaataggatcaactcctaaaacaggaccaacgcccttctgggatgaaggagttttggcaaccacaccagctttcaccaagaaatcctcaagggtcatctcgccaagagtgggatgtcgatcctgcgctttcctttcattgtcgacgctctttttctgttgaatatccttccaaacctcatcaacagtcttcttgctaagatcagtgaacaatgtaaggctcccttgccgaggcaaagatgatgcagaggcaccctgactggcctgagcgcttgaattatcaacacccattacagtggcctgattagcttctgcagaccacacactcttcagaagctcatcaaggttcatgctacctaatggttttcctaaatccccaagctggttctggacctcatcaagggttagattgtacaaggagccttgcctagtcaaagactgtaacttggggtcttggactgctccgccttgagaccccatcgtctgagttctcattcaccaaccaatcaaccctactatatcttattcataccagaaacaatctttcaaagacctgtaacggaaaataagaacactcaaactctcaatttgaactccatgtaactattaacctaaaattgtttaaaaggcgatatctaagactaacaaatagctcaatggaagaaaacaaaaaagtgtacttttcttctatttggttctagcttaaaaaatgcccagatcagtgtaagccaaccctcaaaaaatttaaaccaaaacaaaatgttgcaaataacgaacttagaaaacctacaaagcaaaaaaaaaaactccgcaaacaatcacatgcatgtagaaaaaatgagcattttcccaaaaaccctcaaaaatttataaaacccagaaactaattttggagttagcaaacaaaagttgaaagaaaatcctcaaagcataagctcatacataaatatttatattttagcttggatagactgagagcaacgataaacaaaatgacccagatcaaaacaaaagcaaatcaaataaattctgcagcccccatactcaaaacgaagaaaaaaaaaataaaaagaaaagcactgagaaaagagaaaggagaaaagaaaaatgtgcaaatcactacatgcatgtacaagatatcgacattcaaacagaaacccaaatatgcccagaaaacgaattttaagagctgttgaaaaaacccaaaaattaacagcttaaacaaaaaccaacgatgaacaaaaataggcccagatcaaaatacagaaagaaaaaaacccagaaaaaaattaaatgaaagagaaaataaaattgttggaaaagaacaaacttaccgagactataaacagcataaagaaagagaaatcttgaaatgaatcgttacatgcatgaagaagaacaaacactgtccagaaactggaaaatgtccaaaacgatatctaagtcagcaaaaagaataacccaaatgaaagtcttcaacttccatagacctcttctattacatataaataaatatacttataatgcaatcgaaagtggtataatttgtaactcccaacattttatattagctttccttaaacgaaataatgagtaaaaaacttggcactttatatttagctttgattttgtcttccatagttataccctttaagggaaataaggaatgtttgattgtgttattgtgctgaccatttgtgttattttctcaaggaggatgggtaaatatgactatttctatctcgtattttgttttattctaatggacacctttacgtttctaatattaatttaaataagggcataaaataaatttacaccaccaattttttattggacaaattacatatcgacatgtcatatctcaccctttttcctttttacacaattggggtaacttctttttttaatgaaattagagaaataagcgacactccgagcgggttcgacctcacttttataattcttttaattattttaatgtaatttttttttactattttatttaaaatataatttaaaataaataa

SEQ ID NO: 295400 - DNA, 4588 bp, Cannabis indica
atgttcagtattgtaacattgaggatagttcttgttccaacatttagctctcttgactccagcaccatcagattgggttggggtaggataaggagtatgaggtgttggtgatgatggagatggaggtgtggaaggggttgtcggagatggagtaggggtaggtggtgctggtgatggcgttaccggtggtgacggttttgggggtgttggataaggtgtcgatggtgatggtgttggagtggtgggagatggcgttgatggtgttggaggttttggagaaggtgttacaggtgatggcgttgggggttttggagaaggtgttgtgggtgatggtgttgtgggttttggagaaggtgttgttggaggataaggtgacggtgttgggacttttggagaaggttttgtgggtgatggagtactaggtgatggtttgggttttttggagtagaaggcgatggctctgggtgttttggagtagaaggtgatggtttgtggggttttggagaaggtgttggtttagggggttttggagtagaaggtgatggttttggagcttttggggatggtgttattggtggtgaaatagtaggaggtgatggtgttgggagtgttggagaaggtgttgttggtgttggagcagttggtattgttggaggataagggatttcgggggtagttggataaggagttggagctgcagcaaccattatttggagtagccctaagaggagggcaatgaaaatgagatgtgggctatattgagccatttgagacaactttctttatgtgctttgctttggggtttatgagtgagtgattttttcattgttgagtctcctccatttatagtcaccatgggtgtacttaagatgatgattgaaaattgggtttcacgtggcactttgtgaaagtcaaaccattttcaataattcatatatagttttaaagttatgttgctttggactgaaattggcatcacttggtaaccaagactacacaaaatgaaaacacttttatcaaatgatacgactcgtctattcttttaacaaatgcaacttgattattcccatatgttgggacctagacatatggatgtatacaccttaccttgctttctatatatatcctgactttccaatcccatttgaagcaaattatgtatcactctgctgcccaagtgaagcattagttaaatactattttaacttattatttagtttgagatgtatgtacaagcaggggcggacccacattgtaggagggggggcgactgcaggcgactttaaccaagaaaaaaaaaatcgagaaaaaaatgtatatgtattttaattagttacaacatatatttgtattaaataggttagagggtaaaggttcaaatcccactaactacactttatattttctttttaaaatttatttacgccccccccccccctccactttaaattttgggtccgccagtgtgtacaagagctctagagctaaaataacttaatctttaaattagaaagagaagattataaaatttaacttctccaacaagtgaattaaactttaactattttacatatttttaataatttagttttgacgatgttaagtgtgattctattaaaaaaaaaatgtcgatgtaattataattttatgtacataccaatgtaagttaaataattaacttggttggctattacttagcagaaaactcttattcttatttttctacaagctgtgtacttcaattaaaagattgtttctctgaagtgcgtcctattgtttagtttcttactataaaccaaaaaaaaatactaaatactaaatatatttatatatataaacgtatatatattaaagtcaaacggtaccaaaagatatgttagtgactaatgaagtcaatattaaaaaatacataatttccattttctaatataatgatatcattacaatatttgaatgtattatagttatttttaagtaatgatacctcaacccaacatatatacgtgaaattaatttatatagtattaacataaaagttttttcaaccaatatacacaaagaatttatcatttaaaatcgaccagctactcagaattatatgccatgtcaaagtgcccataagtgtattaccatctatttgaaactaatcataatcataaatctgagaccatcaattaactccatctgtacatggtcaaaagaaaactcgaataacaaaagcaacattttctcattgcagatttgcacaaatcccacaatttcaatgttccattataatttatgtcactgatcagttcaacgatacagactgcctaagattattctagttgatagtagtatccatcaaaccagtctttatttttatttacatgtgaaaagaaaatgtagaaaccaagtggaatattcagcttcgaagcccgtttgaatcgccatgtctcatccaggagtctagcattgcttcctgaaacaaatttaatatttagtcctaatctcccacataaactttacaatgcctgcatagtatgaacagaaagggcatgaaagttgtacagccaaggatagagatggtccctgattaccaaggtgatggttaaaaagtatggcccttgagaaaaatgtagaacttactgagaaagcaaatcatttgatgagaatgcatcttatgggcgatccttctgcgcctttcaatctcagtggcaaacagtggatagaataaattcctggctgaatattatcaagttttagtccttccacaaggatgatttcctgcagaattggaggtgttagtgctaatcttttcacttatatttactcttgcaccaaaaaccaatttagaaaaatcggtccttttgaagaaataaacccattcctgtggtggaaccaattcttaatgaaacataagaccacacatttaaattggacagatatagcacataaatcatatgtaatgcatttatcagataatcacagtttactctcatcaactgcccaaaattgcaaccctgggtgaaatcggaacactattttgtgaaatttcaatttcaagatgcaaatagaatcaagtggtaaaggatagcaataaaaacacctacacagacacaacaaccttgaaagtaaaaaggtagatggcaaaaagaaaaagattttcattgatagattaaaatgaagtctcaaatgatactgataatttgatcatcttaactctgaagcattaaactctttcttaccctttcttttagaaaaacaagatgagaaggaatcaaatcatcataggcagcaacagataagtaatcaattcctgcatttcatgacagaattagtatcaaatcaagatgaatgatgcgttaaaaagaatagaatagtgaatacatcagaaaatagcattacatggataacatcttatattcataggtcaatttggataagccactagatggttgaaaaaagggattttgttaattgttcagttgccaacttgccatagaaatgatagacctccaatttgttatacctacactaggcagggtaaatcaggcaattgagatgcttgcagctagagtcagttttgtactagtgtgaggtaatgggtgctaacataattccttatggtgtcgttgtgcatgtgaattggggaatttatattcagagtatagggaattaatagagcatgcagaaattcgacttgttgagagtttttctctaagggagagcccaagtctcttgaattcctggtgttattgtcattttccttgaataacaactcccgatttcagtccatcatattgcgttaggatcccacattggtcaagtataggattggttagtacttacttgggcaccctcctctcttaggctagcttttgggagtgagttctacccaagtggttgtatcaagtggtatcagagtcatgcaccctcaagtgggaccgacatcgcggaaggggcgacttgcggattaggcccagagtaggccactatagagtgggccgttgtgaacatcgactccaaggggtgtaatgttagagcactcacatcagctcttttaaaatacctttatatgtaataattgaactaaaaatagtcaaatggctcctacatcatatgagctactttaaagttattttgaagaatggtactatagtttctcaatgtaactacaactattcgagctatacttattttattattatttgactctctcactcctctctcataccatctctttatttattttactgatttttctccattatttaatataaatgtgtattgaaaataataatgtttaaatgatgtggagataaaaatagagaaattgatgtatgatgtaatataaaagtttgaggtaaaatagaaaaaatagaattttggtgaggtattataaagagtagaatagaaaagttgttgggagtactcttaggatcccacattggccaagtatgggattggttagtacttagtagcatataactacttggacaccctcctctcttacttagattcctttgtgagacaacaaattttttagctcggtagaaacaaaatgctttcttaaatctcaatttaaaaagatattatggcagcaagt

SEQ ID NO: 295401 - DNA, 2177 bp, Cannabis indica
gatgttaatgaaacatacttgttattaaatctagatcctggtaaaatattttcaacagtctgtaagtacgtgttatgatactaatagaggatcccacaactttctcactacatatggaacgtcatcaccattaatggagcactgatgctcctcaaatttcgagagatatatatgattgtaatatttatcacataattttggtaagttaacaatagagtcaactacgctaaacactgaaataaaatatcacaattgtgatatacaatcaatatcctcgtaacacgccacacacactctacctttataaatgaggatgttgtaaatggccataaaacacctaaccacatataatcccccataccattacactcgctttgtatataagagaggaaattgtacatgttcatatgacacttaattacaaaatagctcctcttggaatcatgaatgtttatgagtggatttgataatccatgcagcctgtctaattggtatcagtaaaaccaactattatatgtcacaatattagtttatcgattgttaacacatccttggatccataaggatgacagctcaagtaccaatctagcatgcctacaacatatatcacaataggaatgcatatacttgagtgaaccctaggctgcctttaatacgcatatatatatgtatgggataatttcaatactggtttgcttaattcttttccagactacagctcctccaccaagagtaaatactgatccagatgtcgacttttgactatctttttctgattaaaaatcagaatcagtatatccagtaggatttaactctccactagaatatacaagcatgagatctctcgttctctgaagatacctgagaatgtactttactgtaatctagtgttccaaacctagatttgattgataatgactaacaatccctataatgtagcatatgtcaggcccattacacaatattgcatacattaagctcccaactgctgatgcataagggtactttctcatgtcctcttcttcttgaggagtttttggacattgatccttgcatagagtaattccatgtcaagacggtaattgttctttcttggaatactatatcgagaattttctagccccttatttgctatcctaaatttcttcctcctaacgtggcatgtcaacataagccaagaccaagtacacatggaatacagccttgccaatagcagtagaaagtcttcgtacaaggtatggcaaaaccctcaagaagcaagccaaaggagttaaagggatgttgtaaaggagatgtaccacaatgtttggccgaccaaggggggtctataggtcggccaggatgagcttataaggcctgccagggtttgagcagaagttggccgaccaaaaggtgacattcagacctaggaagggtccatttgaccaaggaagcttgacctctacaaggaaaaggtatacaaaggttggcctccacctacaaaggctgacctccacctgcagaggctggccatcacctactaaggctagccaacacatgcaaagacctggccaagttttcacaaagctggcaggaacatgacctgccagaccctggcaagaacatgatatgccagaccctagtaggaaaatggtcggctagaccttaacctgtagcattgtatggctggccagcctacatcctaatgatgcatggctagccaacctttggcttggtaggagtttgatgtgcaattcttattcatggacagcaagtcaagcaacggtttaggctttaacagcccatgaaaaatagagagaaaatatctattttcaaggggaaatttagtcatttttactttattaattaattatgtaaatggtggctttatttacctatttctaatggctattgggcatgtaagatctagtatataaagagcattatccttactctgaaaccctaagtcattaagcctctaagctctctatgctctcaactctaagtttgagaaccctaatcctctcttctccctctcttctacatgccccaaggctctctatatctctctctctctctctctcatgcctccaaaggctctatctctctctctctcatttgatactttcctacttgattcatacattataattgtaacgccctaatactaaggcacgctacagtgctttttcaattat

SEQ ID NO: 295402 - DNA, 2743 bp, Cannabis indica
aaggggagttacgccgtcagactaaatacttatggtagtttcaatacgccttctcccatgcggcattaaatgcgagatgactgttcagataggctttgatacctcccggaggtgcttcgttgtagccttgctctccgggagtatacgaaaccttcatgcctactccgggaagcacgttgaatgctgatccttttgatttaaggaggcttagtcgaattatctcaaagtcttgcttcttcagcccacgtgtcatagtccggttggtccacgtattttggacaaaatcagggcaacaactattattgggcaaagtttgagttcatgaagtcaaacttgaacttaaacttgctcagcacccactttagccacctacatcaactctaatagttcttaaaccatcctaaattagtttaggaaacatcccaaaccagccccaagtttgtacagaggctcccacacaaaaacaactaaccaacctaaacttttctcttaagaaaactaattaagaaaggaagctagaattatttttgttgttccttgaaaatggaggcttgttttccactgaattcctagccatgatgactgtaaatgatgaagaaaatcttgttttcctttgatttgagaagtggtcgagagagtaaaagagaatggactaacatatgttaaaatttgacgtttctaaatgctttgaccaacctttccctcacctaagggttctgactcaaaagccacctcactctaattgcatgagtcaccaaccaccaaggcaagtccaaaatgattaagttttccaaaccaaaagaccaaaatgtccttacttgctacctatgtaagcttgtactctagagatgaatggtctaattccattaccctgctaaaccccaatattctaaaaattttaataatgtttcctcgtcaaatacttgatcaaaactcatatccatatgactcgaacgaccatccatcgaatttccactattattaagtagaaaaacatgaaaatattaaaatgcatatgtatatcatatacgatacacttagaattcaattaaatcttgacaattgataaattataatccaaatgcctatattttgagaatagggcccacatgacataatacacacataatcgtataatgcaattaatcaacgctaattgtctactaattccatatcttaagtatgttcattacaattctggttttacatttcacatgtgtccaactcttgaaaatttcattaattatcaaaaggttgattgtggcattgtactaatgggaaatgacaattcttgaagggtcattagcataggcaagatggaaatcaaccactttaatgatactgtttggatgttgaacaatgttaggcacatactaaatttaaggaggaatttggtgtcacttggtgtactagaagatgaaggcttcaactataaatctacaaattgtcacatgaagatctcaaaaagatcacttactgtgatgaaagaagaaaagagaaatggatgagacattctgtatggtgagacaattatgtcttctaaagctgataccatgagacaccaagaatcagaaatttaggtgtggcacaatagaatgagacatataagtgaacaatgatcaaagaattgaacaaacgaagttttttgggaaatttaaaatcaagttacctcccattctatgaagcatgcatattgagaaagcaccacaggctaaaatttactattgtaatacatgagtccaaaagactattgcaatatgtacatgttggcctgtagggatctcacaaagttggaactcattcaggtaaaaattatttcttttgtccatagtagacgattttagcagatatgtttgggtatatttgcttaaaactaagaatgaatccttcctcaaatttaatgaatggaaaaatgaggtggaaaaaatataatagaaaaatgaaagttttgagaattgataatggcttggaattcattaacgttgaatttaatttgttgtattctgagtatggtattgttggacacaaaattattaggcacacacctcagcaaaatggtgttgctgagagaatgaataggactatgttgaactaagttagtgttgggctttgtgccctaaataaaactctatttcaatgtaaactctgtcatttcattatcaataaagagacagaagtattttcattacttattcaatgtgtcatttggttcatgttatcatttatatatttatttgatttattaattcatccaaacctttatcacattaatattcttgtttattgtgtcgtcagcacagtggaaagtaatcaagattgtgtgattaaatatatattcctaaatttatccgtacacagagtttaactgatatgataatctacaacatagtttgcttgcaccttggataagtgctatgtcctttccaaggcattggttaaagtaaagcttgggttggatgcatggagtatgcattggaagggaccgatattgaactcggattagatatgataaatttaccgtcatatctattcaattcaatatcacctagttgatcctagatcaaatgatgttaatcctgacatggttaggttcgatctcaagagtattgttcatgttctttgatttgttagttaagcctaccttctagtcagggtgatacgtacattttgggaacagtgtagtgcaattgagtggcagcgctaatcataaatatggaatttatagtctctatctgaacataga

SEQ ID NO: 295403 - DNA, 7051 bp, Cannabis indica
taaattaaattaatttttttatatataaaatatctatataatttttatttttaaatacatatatataataatattataaaattaataaaacatattctattaaataataaaatattatgttaaaattaacaataaaaacttaaaaaacatcattaaacaagtattatgttacatgatagatatttgtacattcgttgaaaaagtaaatggcaaaaatagtgtcatttttctatttctagtactatattacaatcccacaaattgctctacttagaggagggctaagcataagaatctttcttttcaagtgaaacctctgaagaagataagaatatacaaagaatggcttatatgggatttcagtgttaacgtaataaaaaccacacaattataacactaatccacaaagtagccattacagaactagaaaaacaaaaagatagcataaatttgccattaaaagataagaaaggcagccccaacacgagaatgtaccaattcctgttttactcctactttatatatccccattctaaaaacaattgcagaaaactgagttttagtattcatgtcatgagtcgatagcgagtttgatgaatccgagatgtagatagaaacttatgtttgagcacatgtgaggggaagaaactaagtagtataaccttcaaaactttgggcggcagctatgccttgatgagcgtatttcatctgggggtaatgtaggaccatcattttggattgccatcgccgctcttcaacatccaaaatgaccccttgaatacacaaatttcattcatgacctgtatcaataaataagactactcagagttctcattctttaaacaaacacagctcagatttaaacttccaagagaaaatattgaagaaaataaattaatgatcgtaacagtttcagcactctgcaatcaaataaacgaatttatgcccttcaagcctaggaagtcatttaacgttttgaggatgcttctaaaagatcttcattcagattaagtgtaaagcaagcaggattatgtgcatgcgggacttttactagaacatcatggagtacttgcaagatcacaagttaaaaagatttaaactaatttaacctcactctaagcccatcccttcttttctaagttcttaaagtactatatgtaaaaagagaacaccgaaaaagccgtataaacaagttcaacagctaaccttactatactcattgttatttatatccctgtttagggatttcttagcagcatcaaaaatttccgcttttttaagtttcgcattgggtccattctggcgtagaagatcaatgacaacattcctgaaaagagcacaatttattttagataagtgaagaaaacacaaatgtcaaaataagataatgatacaatcatcagttatgatgagaaccagctgtagataataaaccggtacccaatactacaacacaacagcaagaatagtaccagaaaaacaatagagcagtagcaaaatatagagaaacagtagattattatgttgaatgtatgagaaaaccaatacaaactatgagaaccctaaggcccctttgatgcaaagagttttactcaatacattacatacccttctattctcttactcacctatacatagtaatctctcactcaaaactaccctcccaaacaaagaatcatttgctttttatttactatattctagcacaccatatttatcctagggcctaacaagttaccactagtttcatcataatcataatctttatagcaagaaaagattacaaactagcatggcagtctcatatgccaactagtatagtcacactagataaaaggtgctaatcaattccaagcagccatttacttcatattagaaatagaaatggggacaacctgaatggatcatattgtggatgctctggagatgacttcaagacatatagatcatgaatattgattgcaacatgatctacaagtttccgcagctcatctggagaatcagtaccatatgctgccgctcttacaaatctagcatctgcctttggaagattcaatttattaagtgccaaatcacgtaaaccttgacatatcagctgaaagctgcaaggaagatgaacattctactattaagtacacacaacaagatagtgagtgaaacttctactaatgacctttatatatatatatgtatatatatcaaatacaacactaatgggagaatcatactacaatatttgcattcttcttttaagctcatttgacaggagaaaagataaatttttgctgctgataaatacctgcaaaccttgtgatcttgtataacttttgggaggacctttgatgacagagcttctcgaatatcatctggaatgtttgtccccatcaaaacttcacttgcaccttttgccactgttgttgcagaagtcaatggtctcacaggcctactaggcatggcaacattctttgcaccacgtgcagattttccgtctccaaaactactcattatacgtctctccacttcttcccaaccctgttcttgcttcttaacaatgtcggggtagagttttataaatgaagtatctgtttgctctttaaatttccaatctttgactttaggtctttcaacagaaaaaaccctcagaaattcgttcaccgcctttttaagaggtggtggattttgtaaagatgatgtggtgataactggactcttccaaaataaaagaagaatgtaatccctagctatacgtcgaatgccatcctctttagcagtatacaacaacgaactcttaggagcccagaaaccttgcactaataaagcatgattctgaagaacatccaaaagctcttctgttgtacaatcaggagcataatgcttaagagcactgaatcggtgaacaggaggtccctaaaacaaacgccttgaatgattacgaagaaggaaaaaaataaatagtccgaaatgcagtgtagctactctaaatgaaatgcaaggaactagcaactaacctcacaaagtaatttcttaatacgctcttctaggggcagtgaaagcaacaacctgaaaaaatgttgcacatcttagcaataaggatcaaaccaggaataaaactaagtaacaaaatgaaagaacatagtatacgaatgaatcgtttaattataagcatgaacactatacatataaagatctccaaaattttaattagaaacaagataaacgcataactagaacgtacctctttgaagggcctttgggcttatcaacattcttgaaggctccaggacacaatgagttaatgtagtcactcctgcaaataatgatcaaaatcaaacatcataagcacatttaatactttaaaaatattataactttgtacaattgaggcgttgtctctaacaataatatttgtaatttattgaattatagttagtcatagtagtagtaatactagtaacaaacatacggggtcattgtaaactgtaaaggtgaggactcttcagcaaccatttttcgtatatatgtggatgaaaattcagtgtcggagccatggtacttgagtggaatccaaccctacaaaaaaattgtgttttatcatactaagattaatataaattagaattttccaatatcgtatcttgtaacaagtgaaaggacaccagccaatcacatagccaattggaagaaagtttaaaaatcaatatgggcaagtaatattttaaaggatcaataacaaaataaattaaaagaacattatctaagaaacaattcagtgtttaaaggtaaaaatagcagatagttaaagttctgtacacggagtacttctaatcagttatgagaaccatacaaaatgtttaaatgagtgaaaagaaagtgtttgaaaaatgaaacggaaatttcacttattatgaatagcaactgatacctccccatctgcagttttctgctccattgaattcacttgcttaatctgcacagagaaaaaggataagtgagaaggtaactgaagcactcaaaatatgcacaagacaactagaaattgaaatggaaaaaatgagtacctgcttctttgaagaaccaacaagtttagattcttctaatttaattttgtcttcagcatctcctgtaaccttatccttccttttggagccaccagaactcaaatgatttagtgatggacgaagctgtgcaactgcatgaacaggattgaggtgtaactgcaagatgaagagaagtgagtgaatatattaaaaatgttggattgttaaaataattcaccaacattgtgtgaagtaaagtcatatcgaacttgaaaatccatacgtaaccatatctaaaaggcattttcatagatatacatactttattacccttcaaaactcccacagcgtagccagttgctcgaggtgtcttccataaactacacaaagtctaaagaaagaaagaaaagatgaaacaatgtcatataattgaaggcaaatcttttttcacaagcagtacacaaggagagaatgacaccagagttatgttgggttttaatgttttatgttttgaaaaaccatatttcttatgtaacacattttattatcaaataaagaagtagagatcattttgtttatcaattgcattgctagcttgttttattacataaataattgcttatctagacttgaaaatttcgttcctacaagtttttacaaggaaaacaagcttgtaagattcaatgacactttctggcagcacccagaagtttcatggtaacagttgatgagcttcgagcagacaaacaaattgaaacaaaatagcgtataaagaattatcaagcagtaaaaccactgatgctacaccaatagagtccgaaccttctaaacttaatttactctccagccaaactggaatcaaattaatctacagattagtttaaaatcaataagtaaaatgataagagacctgctttgtcatttttagtttggtaccacagtcttgatcataattctgggaatcaacatccatggacaaatcgagctccacttcactacttccaggcttaaccctcacctacaaaataagaatcaaacacaagcatagacatttttgattcagtcaccatatcaatagagataaattcagtggcttgcaaattaaggtttgaggcatttctgaattgatgctgatgggtgagcatttggcgctacagccgcaaccctttcttcatgcctctcagcctcgacagaaaaaacgagttttgaagctcaactagcgccaaaccttgaaatcaagatattcaagatttgatcatctacaccagacagttattaatatattgcccagagctctataaatagagcctgatcacttgggtctgttcaagagagcatttttgagagagttcacacaagcaaaaagaatccaaataaaccgaaccctgtgctttgttgttttttattctcagtttttgttctttaggaaatgcataaaaaaatcttgcattgaaatgtacttctactttccaatcagttcaaaatggtggaaaaattattcaattccaatactataaaatgcaaccataatacaaaggagaatggaatgaaaattgattcatttccattctatttcattacctccaaccaaacgcaaccttaatgtgctattgttataggtaagatcaaagatggtattgaatgagattcttcattataattccaacaaagatgaaaatgcaaataaaatcaagtcagaacttaaaaataattaaattaagaacaaactccataaataagtacctcttgacatcgctcatccaattcatacggtctccaacaaggccttaaaggatattgcaaaacatatagctgcaaaagtaaataaaatgaatgaaataaacaaaaacatttctttacaaagggaaaagagagagaaggacatacctgagtatcttcatccattttagggttaaaaaagacgtcaatttctcgaacaacagtatcttctctatcgtctacgtccatgaaatcatcattttctttcggttcttctttagcttcggtcataggctccatctccattttcacatgcccattttcagaaaaaatttcagtcttgggcggcaggacaagttcgtcctcatttttgttcaccttcaattcctgtggctcgtgtttcagagtggggtgttcgaattcgcgcttggggtcctgtggtgtggagtcgggttctgttttgggttttggtttgaacttagaggacttgggagcaaacctggagactcgagaaggagcctgggttggctcatccagatcgtccaggtccatattcagagaagtgagaagtacttcgtcctcctcctccgatattgatacctgttctttgtaaatattaagttaagacttttggagtgtggttgttgttagtatggtccttctttgagtttgtatattaaggtcttttttttttaaacgtttattttagttgtaactcgaacccaccaacttcaagacaccacctacctattgccacttgagctagctgaggctagctcaagtggttattaagttactttttttgttttgtgttgggatattttaggggttatttcactgctatgcaattttttttttctcagatttgctggttttgttaagctgatggaacaagttataattttattttctaaattttataagcagtttatgtaatgtagctcccactaaaaattcagtagtttatagtttagtaaaaaaactttcaaataaaatgctgaattaagtaaaatatctttatgcaaggtgtcgtgtctttggtcccactataagaacataagaatagatttacaactatatatatcgataatacaaaagagtgcattgataatctcatttctacatagactaccaaaaaattaggaccatgaaaggttataggtgaaaaatttctgtgtaatatttgaatgggatgttttcacttgtgtagtgcaaacttaggatatgtagtattaggcttgagttggtagtataagaaaaaaacaataaagcaatggccatattatgtgtgtttt

SEQ ID NO: 295404 - DNA, 3033 bp, Cannabis indica
agcagggtgtaactcttggatacatagtaatactgcataaagagttgctggcctgcttctaattcgttgaactgatctttcaaaattacaaggctttaccagctactttgtaatggtgtcttgtaattccaccagtcattccccttgatgtatacacgatgaatccatatcagctataagctatcttgcttgtttgcaatctcccatacattataaatgttaaaattacatacacgttgtttaaaaagaataggtttatctaccttgccacgtcagcaatttatatcgtggctgctaaagttaatttcaatcgtcgaacgaggaaataggacgcgccaaacaatccatgattctcaaccttcccagcgtgtgcttttcaaaattaaaatcgaaagctatatatttcctcaagtctaataaacgaaaaatcaaactatcaaaccaaatgatatcaaaccagagaactccattgacaaattttttttaaaccacacgcaaaaaaaaatttgaccgatttgagaattggagaagaaaattggatacaaatttgttgttgtatacaacaaatcaatcatcatctcactcaattgatcaattcacctatcatctcataaaaaaaacagagcacgcaacttcacggaagaagatctacgattatatctttgacatcctaaacaagatcgcaatactactgaaacaaataaaatagacaaataatcatgaatcgtattctatatatacgattacaaataactgtttcaaattcgttttctgactttgtaaaaattatatactataactcattatacgattcgaaatactatatacagttaaaatgtatcatattaatatgaaattataatgtggaaaacatgtagactttgttaatgttgttagtaactaaacaaatatgatgtttgttatatttgttaaacattattatttttggttgaacaactaatctaatcaacatatacagtactaagcacctaacatttacaataaactataaacctttattattgtattcactcccctagtatagtttaaattgcatgctcctttccccacttgaagattcacctgatagtatatggtatatgatagtttattcatgctactcttattcttgttttattattttttttttctaatcgtatactatgaataattttttttttctgtatactacatataatatgaaaaaactaaacatttataatataaaagtacccaagaatatggatgttagaactgtgattcttatttataatggaacttaagttgacaaaactacacatgttgactatgaagttgaaggtatcataactccatcagattgttcctattatgacctttctcaaattatatatgatgctttgaagttggacaaaaacaactatgagattgatatccaatttcaagttaaagaagtcattccaccaataagaatcaaagatgatggtggatgcagttttatgaaaaaataagaaggaagaatgtaacgccttgatacttaggcacgctacaatgattttttcaattaatgtgctacctttgctaatcaaaggatttttcttgaaaaaataagaaggaagaatgtaacgcctttataatttttttttttgaaaattcagaatagtttatcaagttcaccaacaatacttacaagataaagtttacttacaaagcttttgttaaagcttccacccactccctatctattttactcaaattcttagctttcaaagagttcactctagcacaaacagtattagcaatacaattaaaagtaaccttaacagtagggagtttttgctcccaaagaaccttgtttctagcaagccaaatggaatatattgttgctgtaatgaaactcaaaagaacctttcttttgcctctagaaacttttgccttccgaatccactttaggacatcatggagctcttttttaaatttataaactttcatatatttatttacataggtcagaaacccgtatttaaacttttacaacattcacaaaatacatttataaattggtcgcacaacgaatacaaaatacaatcccaggtgtatcgagactgaacactccaggtcgcgtcgcctcgacatgtacaatcaccatccaagcccagagctcactcccgttcaaccttcgcctttaatttatctacacatgaaagtagcatttgtgagtcaacaggctcggtaagaaaagtttataacaaataatataatttcgacatgcatttaagcgcccacacaccaatctacggggcttaacagatgagtaagaacgttctttactagggtacaaccactgtaccacatatactatgcaccggtattatacgagcatcgatagggtttgtttcgtacccttggtaccactaagtgttgtactacacacattccgtacatgttcgtactagttctggtaacaccgtaatgtactctttacatgttgtacactataccaatgcactcagtaccactatcgtactagtgttggtagtgtacgaatcacaacaagcatgcatatatatcacacatacatacattcgcatatacaatatgatctatgctattcttacctcgtttctgaattcaagtgagttggccgacctgaacggaatacttcgtgctggatggatgccctagtcacattacaaaatcgggtaaacaacacgccaaaaccctaatctgggaatctcaaacccccaactaaaggttctgttattgacaactaatacaacattaccctaagtatcaaggaatcaaccaaccaaggctctgaaaataacacgaaatgacgaatcaaacaatttgggaaaccttcttctgttccaattaaccgattttacaggacctgtcaaaccggtaaaccggttgcaccaagttcccgcccaatccgtaccaaactttccagaacacttataatgacctcaaacaacatattccaagcaataaaatccaaaaatacacatagaatcaaaacatgccattattaatgactcaagtttgagtttt

SEQ ID NO: 295405 - DNA, 6474 bp, Cannabis indica
agttatttgatctgacggatgagattgatttaggggtaattaaggttaaaaagtggaaacgtaccctctcatttaatgtactctgagactcatctaatgtatcacgaaatacattccgtaaaagtacatcacgggacaaaatcatatccctatatttgtaaactatgagagagtttaactataattttttttttctcatatgtagaaatatatataaaataaattaaagttactaattatgaaaaagattgtatggtgacaccgcacctgccttgcgcttccctatatgtaagttcatcaatagatggggtaataattagatgatgtttataagtattttaattttgagaacaaaagatcttattttgctaaattataacgcatcctataacataattagctgatcagaaaaattaaaatatatactcgtgtaaagtgaaaattaattcgtatatattcttaagtatacgttgacatgaccagatataaatgctttatgtctgttctttcccatcttaaatattgtcgtagtggggattctcatgcactctcgttttaccaccatcccaaagcatcattctaattcccctacaacagttgcttaaacctgaagccaaacaaaaatcccctacaataaatacacccatatatgtaacttattaactgatcattgcaaaaatgtatacattagatctaatcccattaaaaagagtattatatatatttaatcttgtcttctttttccccaatcaaattacaatataataaacccaacattctattgtaagaaagccatgacaaaatacaacgaaatctcccacttcagccacccctatcacaagctcaagttcgagtactctgaattcccgttcaagtgcgatggatgcaaagagattgggattggatcacgctacaagtgccccatttgtgactttgatcttcacatgtactgtgccctcccttccccgaacatttgccaccctttttacaccaaatgctcctttcagttcctctccaggcccccaggcaactcaccgcgctactgcaacgcctgcgagaaagatattaccgggttcgtatacacatgatccacgcatgcaacttaatgtttaatttcattacttatatttgtattgaataatcaatcaccacagatttgtttaccactgcaactcttgcggattcgatcttcacccgtgctgcgccaagctgccgatgattctggacgatggtgagacgaagctgtacttgtatcgaaaggtgagctcgtcgtgccaccgttgcggcaggaagggaaggagctggagctaccggtctaagtgcaagaagtacaatctacacgtagcgtgcgtgagagagatgctgatggagagctggtccgatatatacgccggaagggggaaggccattacttcttcttcgtcttcgtcctcgttttccaggtcgacgattccgagcctgaaaaacacgctgcagacgcatcataggaagtccgggaggggtaaggtgaaaaagtgttgcgagatggccgggttggccgtacagttcgtcatctctgccgttttgggagatccgacgacgctcatcgcaggccttattggctccctcatctccagagcttgacgcgtcagatcatcatatctaccatgtaaagtgatgttcgatggcaattacctattaatacgccgtcgtattaattggatatgtttaatttgggaggggaagctgatatttgtataatatatagtattaaatatgttgtttaactgggttagtttaaagatgctttaatcatattgtgaataaaactataattagcggcaaaactttattaaattagattattatttgtttgtagttttaatctaattacgattgtaataataattaataaattaattcaattatatggagaaaaaagatctactctctcttgtgtgtccggtacttatattccacctcctcaagtttaccaactcatatttacccaagaacaacactttgaagctttagttttttttttgagcattaagtgattttacataataattaaggggtgattagcttcataacgtaaaaactttattcatgttttaattacaattcaaagagaaatgtttttattgatttgattctctttgttatacaatttcagatagagggagcctttatataggctttgaaataaagctacactaactaactaaccaacattcgaactatcaaaaataaaaataacttaataacaacctcaacctacaatgaatttaatgtattttgacacccatcttggataggcatgtcagaaagagccatttagttaggtcggagtttcaatccgaaacatttggttacttattggatctcgaatcagattcgctctgccccacctaatttttttttcggataggaacttatccgattcggttttaatatatttaaaaaacattaattcaagactcagaccacgaacccggatctgctcgagatccaaacctggacacgagactaagaaccagaacgagacttgaccccgcctagacccagactcgaactcagacccaaacccgggactagacccggactcaggaccagacccagaaccagacctagacgtggacccgagacctagacccaaaccccagcttggatccgggacctaaatccagaccccgtaccccagatccggacccaaaccgaacttggacccacgactcggattgggacctagaccagggacccggacctgaacccggactcgggacctagaccaaggacccagacccaaacctggaccccaaacccagacttggacccggaccgggacccccaggactcagactcggagccaaacccaaacccgaacctgacaccaggacccggacccgagccccaacccgagactcggactcagacctgaaagcagactcaaaccccgacacaaaccagaccgggacccaaaccccaaaccggatcagaccaagacccaaacccgaaaccaggacaaaacccgcacttagacccgagacccaaacctgaacctagacccagacccaaacttgggacccaaacccggacatcgagccccgaacttgggacctaagacccggatacgaacctaggacctaagacacgagacctgaacccggatccagacccaaaccaaggaccctaacccaagacgtagacaaagaccgagacctaggacccagaccccagacccgaactcgagacacggaccaggacccgagacttaggtcccagacccatacttggacccgaactcgaacccgaacccagacccgagacccagacttggacccgtactcgagacccggactcgggacccaaacccggacacaggaccctaacccggacccagactgagacccggacgcgacccgtagttggtgttgggatcatgtttattgaaaatatattatctttatacaatctattaatacatgtcaatatcagacatagtattgtattaaataatactaatacaaaattgatatggaaataaaattataaattcaaatataaaattaaaattcattttttttttaaaaaagtagtcgggtcgtatctgatccgatccgagtatctgatcttgcgaagtagggtagggtggatccttacatgatctagaacaggtcagatcgtcggattagatctaacctaacccatttacactcctaatcttggatacatgtgtaatgaaataaaaatggaataaaggtttgctaacttagatttggagttgacatgattcatcttgatgcttttattggtgattttttctcaaataatatgatagtctataggggcgaaccacatagaagagaagtggggtagtcgccccctggaaaaaaaatcaggaaaaaaatatatatgtattttagttaactgcaacatatatgtgtaaaaaaaagatgatatttataaaaataatattagcattggttcaatagttaagctagatagcttataggttagaggacaacagttctaatcccacgaagagcaatagttttttcttcttaagtttacttttcctccctcccctcactcaccaaaaaatatattacgaccccgtcactttaaattctaagtctaccactggcaatctatctccacttgcttggtttgctcatgataaataagattttcacactactagaaaaatgagctttagaggtagttttttggggcttacaacatcaatttcgacgaaatttgctactgacgctgttccaaatgataccaaagggggaaaaaataactgaccgtctaaggactctatggcgtcggttactatgaaataatcgacacaataggcccctatggctacggttattattatataaccgacaatgtaagcgcttcctatggttttttctaacatcaaaattttgtgtaaattacaatttttattattaaaatctacttctttttttttttcatatatagtgttatcctgatttttttcctcctgacgtggtagtgcttatgtagacaaaatcagtgtcacatggcactatagctccccaataagaaggccaagttgatacctaagcaaacagagatcttggcactcaaacgggcatcaagtgacagacgagtccctcacataagtttgctggccacccctggacgaccctatggccggccagcctctggactgtaccatggccagctagcctgcttcctacaagggtctagttggttaaaaggagctctccaggattctctgtgaacttctacacgtggacaacattatctgggctgcgaattagaccctaaatgcccaatagaatagctgaagaatgtatatgttcaagggcattttggtcttttgtgattgatttattaactatgcaaataccctagggtttcaagtgtaaattagggtattaggcttactatataaaggtcataactctaatctagaaaatttaagttcaatctaagactgacactcgcctccaagctctaagcctaagtttgataactccgctcttcttcactttctctgacacacccatacaagactctcatcacttgatattttccattcatgattcatactttgtatatatcctggagattgctatattagatcccatctacactgatctgattagtattggcccttggtattaatacaactaaaaggggagtagatcattagccgatatcacagagggccaaacctctataacaaatctgtatgttctttacttatccattctatttgtgtaacacatggtaagcattagatctatacgacctcgttgtcagttgatcactttttgaggtcaacattttagtgctttcattgagagcgtgaatatcgtatctgatcaaacgccatggttaacacgataagaaccccactcgcaccatctacatcttcaattctctcttaagacccacaaactacaaatctaaatgctcgagtttcacccacaactagaatccccatgaacaccgcaaatgcggtgaataatgtcttgacaacatgcaccacaagcctgggcactacaatcggccaaactgatacaagcatcgtggtggatctgaagagcaggcccttgcctccgaaggaagacccaccattgtctcctcccactgaaggaaggaccaatgggcgataggccccaggaacaaaaactagctcttgtctctagtattatgctagagagataggaccaattggcgagcctacgattgggaagccccctgtggactaaggagaggatcctgagttagccaagctcagagaagttgtaggccatgcaggcctaactcaagaaccacgcaatgttgattgtaatgtattggcccaacagagacgcgaattcttcagatggattgatgaccaggagtacatccttcgatcttaccaagcagagttagatcgccgcaacaaagaggccaacaatctgataaggcagttcaaccagagaactaatggaagaggaaaggatgtcatcagagatccactataagaaagactagttgatagatcagggagggtctatcgataagctgaccaacagatctccccctgccaaagggaggatagacatttccttaaaggtctaacggcaagaacaaccagatctatacaactagcagtgtgggggcctggccaaggatctctggcttagcagcaccgcccattgtacagcctatggccgaccagccaccaacaggagcacccttggctagccaaagtacagaacttcctccttgaggggagcgaggcgcttagagattaattttcaatagacaaggactaggaacgggtggaaacactaaaaaaagcaattcgcgaagtgaaactgatcacttcagacacctagatctgccaaactccaacaattagtgtgatctacctcctatcaacacacaagcaccataaatcctaccccaaaattatggtcatcaggataaacgttccttaat

SEQ ID NO: 295406 - DNA, 3421 bp, Cannabis indica
tggtaaaactttgatctttttgccagcgcactttgcaaaatgtgctggttaaagttacttttactatcgcagtagcgaactgtgctggttaaagtaacattttttgtagtgtttgttaaggcttaggcgtaagtgtagcggccgagttcaccaaattttatgcgagtccttgtgacattggtttttggctacttgccttttgccttttaatgataaatttattctattaagaaaataaaaaaaaaatatactctgtcccatttacaattatagtaatgtcttctctattaataaccctatttttttttaatagaatgaatttatcattaaagcaatctgctaacacaagtctaaaaactcaaacaaaattcgatagcctcggccaccatactctcacaatatttaaagaaagagcaaatttagtaagagtataagcaagtttaaaaaaccatattagggatgtcttttttttattattattattttaatggaaaagttaatcttattaaccatcaaaatcagctaccaaactaggtagcaaatccatcggaaaatcctccaggtgaaacttacgatcaaaataaaatagggaagcttttgcaaaagcatgagcaaccttattcgatgatcgtttaataaagaaaatagagacattttttaactcagacaaaagtttgttacaatcattgataacacaaccgaaaagagacaccatgtctaacaaacttctgagtgcttgaacaacacccatacaatccgtctccacaagaacttgctgccaacctcttagtttgatccaactaagaacttccttgactcctattgcttcgaccagaagaggttccactgtctcttgaaaatgtttgcaaacaccttcaattagaaggcctttgtcctcccgtgctactgctctaataccaaagccttgcccttccccaaataaagcggcatccacattaatttttatattattagtaccaggtttagaccagcactcagccctatcaccttccttgaacaaggtccatgatgactctaaaaaagagttttgagcgtttagatttttatttgcaaaagccacaatattgtccaccgtaactgtctctttattccacaccagctcattacgagctccccacattgcccaacacaccataatcacaacgcaccttttctcctccttcagccccttaaaagctgttgtacaccattccaagaagctttgaccggttacataaggtgtcccaatgcccactctattccagcattctttaaccacttgacaagtgattaaagtatgtacaatagtttcttgatcaccatggcaaataggacagatagcacttacctccacccgtttagttctcaacatgattgtggttggaagacaatccatggccgctctccagactgtattctttgctttcggtgggactttgagtttccaaaaactcttccataatgatgatgcttcagtattatgccattgcccttgactttcctatagcaagttgtatgcacttcgagctgtgtagctgcccgttacaactttgtgccaaatgagatggtcttccgtctgggataagtggattggtataacaagaataagtttcctatcacgctccagaaataaatcatttatcagctctatatcccaacctccaccatccacgtgcataagattagccacttttgcattcacaagagtcggatgatcagaaatgacccttggattcgagtgatcttgcaaccaaggctctcccaaaactgaaatattttcacccgtactggtacaccaccgaacccccattgccaccaaagattgggcttcaagcacactcctccacacaaagcttgggttgttgcttgattctgctgaaagataagagccatttggaaagtatcttgccttgaatacccgcgcaaccaacgagtttggatgagttagcaacctccaaccttgtttaccaagcagcgcaagattaaaatttcggaagttgcgaaagcccataccccccaagtcctaatgtttgctcaaccgatcccaagatagccaatggatccctttatttgatttgcccgaagattgccactagaacctcgttatcaacttctcaatatctctagtaatcttaataggaagaaggaagacgctcatagcatagctaggaagagcctgagccactgatttcaccaacacttcgtttccagcttttgataaaagtttcccttccaatccttgtaaacgctttctaactttttccaagagaaaacccattgctgttgttttatttcttcccaaggtactaggaagacccagatacatactagaatctatcgctggttgcatatggagctgattaataattcttcccctcaaatcatccccagtgttgttgctgaaaaatatagaagacttattgaaattaactttttggcctgacgccatttcaaacttttgtaatacctcttggactcggtaggcttcttctagattagctttgcaatacaagtaggaatcatttacaaaaagcatatgggatatcctaggagcaccgttagcaactttgcatccatgtaaccaacctcttcattcataatgacataaaagagccgacaacccctccgcacatagaataaacaaatatggtgaaagaagatctccctgacgaatatctctagtagggacaatcggacccatttctcctcctccatgaacaactttgtattttgccgaggtcacacattgttgtagtaatctcatccagaaaggttcaaaacccaatttcaaaagcatagcctccaagaacttccattcgatacggtcataagctttactcatgtcaagcttaagtgccatgtatcccactttgccttgtcgctttcttttaagataatgaaagatttcaaaagaaaccataacattgtcatgaatcaaatgccctgtgataaaggcgctttgatatcccgaaactattgaatccatataccccttcattctattggtgataacctttgtaatgatcttataaatgacgttgcaaagagcaataggacgaaagtcagacataaatcctggggcctttttcttaggaattaagactacattagcatcaccacatccctctacgagcacacccgaatcaaaaaaacgttgaaccactccaaccacatcttgtgatacaatagaccagcctttttgaaagaaattcggtgtcatcccatcaggtcctgggcttttatccggatgcatctgaaaaacagcaactttaacctcttcaatcgaaacacttttcctcaaaccttcctattagagtaatcttgccacatatacaaagtggttcaacttttaagataaattttgagaatttgagtgttatacaaaagagacaatgaccatgtcattgttggaaattatttt

SEQ ID NO: 295407 - DNA, 5404 bp, Cannabis indica
taaaaaaaaaaaaacaaatatacacagtaaaaatataataattgccgtgtaacagtaaaaaagtaataaaatgggaaatatcagtacagggtgtaaatttccctttttgaattggacattcacatattgaacctaaataaatataaaaaattaatatttttataatgtgcaatgccatttgaaccgcatactaacaattcaaaactgcagtgtattgcgcagtttaagaaaaattcaaaccgcaccgcaaaacatttcttttgtaatgcggtgcagtacaagcggtttgatgaacacttccaataattttacatgtctcaagctcaaatctccctcccaatatcaaagattgtctacaaagattgtctattattttttatatttatttatctttttttttcaatcatattcaatttataagctactaaaaataaaaatggaaaatttaagaacacattagatggtctgacaattctgtgggcatataatcattatgacaaaaagttagtaattggcaagagaatctgattacgttttcagcctaaagattccagtctatacaaaagaaaatcaagtaggctttctcgcactatcaaagtattgatagtacaaattacaaaaagggtaatatgctacgttatacgcacacaactaaaaacacttgcacagctttgatcaaagtacacatcatggaagaaactctcaagttcattcagattaatcatcatgaatactcgcatatatgtttctcagaatcattattatatattgctttaccaggagaagacccatcaatgccaagaagagggggtttcctagagaggaaaaaaatgcaatcaatgggcaatggcagccgaaaaagaaatgtttccctggtttaaagaattgtacacgaacatgaattaatcttttgcatgtcctcctgatttttatctgcacaaaatccaactaaagatatataaggaaagaactgaaaatgaattttggaagacagtatgtggccagtagtgacgagaaaagcaaatgtaagggcatcatgaatgaacacacactcacctgacttctttttaagttgagtgggctgtaccaggacatgcatagtaattacttcaccaggtacgttgccaaatgttattcttgaatcagaaagtgtcttcctgttctctagaactttaccagcatgtatgagttttacatcatttactgaccttggtacgattgttttatctgtaaatgcacagactcgtaagttatcaaactgaagtatacttggtgacatcatgggatataatagaagcggctgaagactttcattgtgttggaaaaatattaacatgtcaagggaatgtgaaagatactcaaagactcaatgtataatcaaaatcagtgaaggggatatcaatttgttcgtagacacaagttcattgagtgcaaaaaaaagctcacaattatctcaagttcttgatttgatattcaatgtagaataagagaaaacgagaaatagacagaaacagaaacatacagctaaccttttggccactccgccactagcttttgcttaagagttgcaactgtcgtagatgatgaataagtactatggcctatatctgttccatcaaacattcggaacttaagctgaataagctcctctccttcagccatagtatccctttttttgctcttatcccaaacttcacagatccaaaagacaggggtagcacaatacttccagtcaaagtatcaattttgtccaaccacctgctgaattccaacctgaagtgactgatatttttagctcctaaaacccagaccaaaataaagtttgagacaaagctaagtataagtaaatctataattggaaatgaaataaaactaaaaagaagtggtatttgttttctatttatgtggttacttgcacacataattttgacttgttcttttccaaaccaatcccagtcacaatctccctcattaaagattagcaaacaagccccaaaataggtttgccagaaatagttatgattagtaaaaatggctgaaacactccatctagttctgttactaaccattctaaagaaatctgaagattacaaaaaaattataacaaataaaaaacaaaaatccttcaatttgaatacaaagtttacaagaaccaaggaatatcaaaaaccagaaatttattcgaaatttcaaaaggaaaactcaattaaatcggcatttaattttgaaaaacgaacctctttgaatctgcgaaaaatctctttctgcgtagaaagatgctatagctatacatgaacagccttaccggcttccgactctcaattaaagaaaccaagaacctcatacgacccaattggatcaaatcgcttacatacccctgctatcaccaaaaagaaaaacaacgatcacaaatataaaatttgatccacataataacatttcaaaaaacccaataattgacgtctggaatctggcaaaattgaattttgttgatgagagagagatagagaagagagtacctgaggtagaaggcatcagaaagaaagtgtgattaggtcaaagataccacaatttccgacgccagttacagtagacaagacagagtggcggggaagaagggaaaggttatgggatttgtcctaaccttttttatttacttatttaaataattaaattattttcttacaattctctctctttcttcaataatttaattttttttcttaatataaagacaagtaattcaaatgtcataaataaaaatagtctctaattttcaaaaaatatcataatttaggttttttctaataaaataatcttaatgagtaatccctaagaagaatagataataattcagatggaatcgaagcttttaccgatagacgatcagtcatactgtaagaatgtttggcaagataatgtgcaacttgattaacaaaacgtttaataaaaactaaagacctcaattgaaccctatactcttcaataacaagaccaaaagctatacatattttaatcaaacaccaataactttaatagccattaaatagtttgactctaccaccacttgagacacattaacagtcttcaactaacttaatgcttccttaatgctcaatgcatccacactcacctagcaaaggatctaccccaccatcttatattcatgcccttattgacactagtcgaccatcaccatcctgagctacgaaactataaccagacttaatatgtaacaccctaacaattaggcacgctacaatttttcgataaacatagcctaatcccgctaagccgggattaatagaataagagttgaatttaaactctaaatcagttaaggaataaaaatttatcttgtaactatttaaactttacaaaccattcaaaaatattacacatgttccgggatcccgtaaaagttttcacaaaatattacaagtcatttttaacatgttgacctaagcgacaaaactgagaatacaaatatatcagttggtagacctattccgcgtgatctagtatggcccgaacttgtacaatccaccgccaagccctcgaactcatggctgatcacaaacttatttaccctttcttgcacagtagagcacccgtaagccaagcccatcaagacagtaaacataataatatgcaatatatattcacaattcaaataaatattgatgccacctcatctactctctatttagcatagacctacgtgttgtgctcacacgtctatttacattaaggccttagattggcttatctcaggtatgattaccgagtctaacctaattataccttacccgcataattctttatttcaacatatatagcatgacattgcattcaaaaacatttaatcactagagtaataaccctagatcgctccctttagggtaataacccaaatctcagttccacattcaatcacaatcataatatgaaacatgagccccaccgcgcttaaatctatgtgctaactactatcttacctggtatcccaagtatgtagaaattccaaacctctgggtgttcctgagcaagcgtcggtaatcctagtcacaattcccaggatttcacatatagggttaaaaatttaatttcacataattggcatttcaattacatataagcacatagagctcaaaacaagctttccaacaatataaagaacgtcacaaatggagtcccgagtcaaaagttatgacaaaaataaaaacacgaaagattcttgaggaaaatagggcctcgctgcggcgagcaaggccacggccgcggtgaggggccctgtaaccccgaaaatttccattttcttccacttcaaaatttagcccaaaaatcaatccaaacttaatcaaaacatgcaatatctcaaattcaatccacaatttatcaacaatttgaaacttaaaagaatgtctcaataagctcaaaataacaaactcaattcaaaactaagaatgaaatacaattcataccattatctaaaaattcaagcataaagtcaatctttaaagcattaaaatcctcaagaacaacccagaaaatcagagcccaaaaacccagaaatcaaaccccaaatctcaacttaaaagtcacccaaaacaacctataaatactacatacatcctctatagttcaaacatacaaaacataccaaaatatcatcaacattcacaaaaattaccaagacatgcatccataactaaagaacatcacaaacacaaaagatcatcacaatattcagcttttaaatttagaaataaataggtaaaaatagctacctcaagctcctccaacaaaacaagcataagaaattccaaaccagaaaatgagtttcaaatcaacaaaatttttaaaagagagataaagaagaaagagagaggggtcagctagaagagggttcaaactaaaaaatgagtttcaacttaacaaaatttcattaaaatgaaataaatgactaaaagaccaaaatacccctataatcaattaagtccacatacacaaagtcacgggtaaagttgtcaaacaatatacatacacataacataaaatttttaggatttcctatttatcaaataatgccataaacaaattctagtattttaggccccgaacccaattcggcctaaaatacctagttatgactatgccacgccgacttgtcagaaaatacctacagaaagacagaataaatatactatataataatatagcccataagcatgatatatcacataaattacgattttactcatctcgggtcaaaattatgaaaatgatcctggtacaccaacgggatcttaaaatgtaatttatcagtatagtttcacatattaaattatataataatataattccacattaatacataattaaactagttagggttgttaat

SEQ ID NO: 295408 - DNA, 1708 bp, Cannabis indica
ttgagatccttgagattatagttcattttggattaaattattttttaataaaattcgcttccgcttttctatctatgatatagactataaaaactaatacattttgtgcaacattaattgatgcaccaaaactatcaattaagccttcatgtttttcaatctgtgtaacgataatattgaatattccactctccttatatgtcacacgacctataaagtgggctgaactgggaacaataagctctagagccatctgtaataaaaagaaacaaaaatattaattttttacaacaaattgaaaaacaatcactttgtcatcaagaaccagccaataaccacataaaatcaaatgtgacaacaaaaaatacaatactaatcttttgctgtatcattatcttttattttaagattttcaaaatctcttctaagtatttgtagtctagttgtgcgtaccttagttgtcctttgaaactcctcttgcagcgtgtctcatgctttttttgtcgtggaaaaagattgtatgtcatgacttgttgtaagtagtataatttgtgagaatttttttgttggttatcctctaatgttttcttttgatttttcgaaagagatgtaatatcttcaagaatagtgactcattcttcaacaattttctataaattttgtgatctatttattttgatggaccaaaaattatagttttcaataatttaacttacattgagtaggttttgatatcaatgttagagtcggaactcatgatgatgaactacgccccactcatgatggtttgttaattggtatagataaaaattataatttgtatctggtttatagtgtaaactagaatatgggtctagatgttatgggaataagtagtgtataaatgacaacgttgatagttaagcttagaagagaataattgtatgtagaaagtagtaaagtttattgatagtttgcagttcttggctttgtaatgttggttacaatttaaaagcagtgtataaatggcaatgttgatgagttataaattaattggtaaatgacgatgttaatgaattataagattggtttattagatgatgataattaggcttagaagataattagccttagttgttgtgactagaattgtttgctctttctagtttagtaaatttatctactattattagagacttaggcttagttagttaagttagttatggtttgttataactgttatactttcgattggtttgttatctcacaacggactttactttactttactctgctatatatagcagaccctttaccattgtaattcactacttccaattaatgaaattcaatttctctctgctattcaaagctaataactatgcataactaaaatattctagactaacgttttaaagaattatttaaatattctataatcatttaaaaagtttagagtaaggtttgtagattttctacaaatgagtgaaatattttagattgagagtattgtagaaaagtgcaacaatgtggacttgaattagttgctgaaagttaaataatttttcttggtgaacttttcttgttgtggtcttaagagaaagctgatgtgctaattaagtttagttcatgcatacaattcataagaagtagatttttattgacaaattattgagtgattaagaaaaaaaaagaaaaacattttctacctaataagatttatctgtgc

SEQ ID NO: 295409 - DNA, 3166 bp, Cannabis indica
aacaaaaaaacaaacaaaactaggttagacctaacgggaagtgttgcaaattaacaaaaatctatgtagaccctcactactacaaaaaagggctttaagaactagccatgtgatcagattagatatagctctcaattttgcatgtctatttgagtaattagatatataggaaagttccaaccgatatcagaaagtttcattcaaaatatagataaaagaaagctttatcaaaatatgttcatagatacatgtaatacaattaacatgaccactctaagaagatgtcctgtccgctaattataacgaaggataaccaagagtttgactattttaacctcagttgcatacttgttgtgtgttacacaattatttcaaaaagactagatgtacaaaaaaatatacatcatacaaaagtgtatacatttatgttattggtcagaaatgatcaaagctatatgctttctagttatcgtttcaatactaataaataaacaaccatggtcattgtcaattatttatttggccatcaactatttcccactaatgttattactcatgacttagtatcttcctatcattacccattactctgtctgtactccgcaatatagttacctcaaattcaagggagcaccaacctatctatcatgtttatccaacaatcatccatgactctcttctaacaaactatacaaaaataccaactaacaaactgaaaatcaaattccaaacattcaactatactcagcaggataattgtctaaaataagatatcacaaattcaacaaacaaattaagcaaaatttttatagatcaacacattatttattgtgaaaacaaagagcataacaacgtatagagatatttcacatatagctaatgaaattgagaaaactaaccagcgagtgaaataatctcagaaattatatacaatcgagacaccccgataagcctacaaaacctaaaaaataacaaacatattaagaacaatggtcaaagaataaactaaagaggtaaacaataaactaatgggtgactaatgataattctaagtggaaaacgtaccactgaatccagaacatataagacccaattattatatactcataaacaaacaagaaacagtaagatgaaaaaaattacaaggtactggttaaattatatactaatctttttaactagattagtaagcacaaggcgtattgaccttagaaactataaggtgcctattcaccattagagaggggtcgagttggccatgagagagacaaggtggcgaaagcgcgagttcgacggaagggcaggcatcctcaacggaaaggaagtaatcagaaggcgcatcgtcaaaggaaggtggttgtgactaagaacaagtgttaggtcaagttaattttgggcagaaaaggagctgagaggttttttttgttttttttatttacaatcgttttaactataacttttttaatttttatttaattttaataattgagaaaaagaactaaaaaagtaactcaaaactctttaaagaatgttcttattggacccgttgggaacacatttacttgaaacctacaatttatttcatactttttttaataactcacataattaataagaacacacaagtgtgtgtccttatatgatttgtttaaggacactcaatgttacttcttaaaacttcagaaggacttttaaggatatacatttagatgcatgttcttaaaaagtgttccaaaaagggtattttgtagtagtggttgttatactcaagcaagcaagaaaaatgagagaagatatatatgtaagtattaaataggaaaatcaaagcaaatctaaactcttaagcatgttgaagttgtgctagtaattctctgcctcaattcaaagagcttgcacatataaatattcttatatctgtaaaactaagagtcagttatacataccagtaccacaacagatagaagaactttgtgttacataaaagttactaagttagataatatttttaatatatagttaacattttatgagtttatgagggcttaattaaagtattagaaacagaggatagataggtgatataggtgggtgagtggggtagggaattgaaagttcttcaagaagcatctatactacacgacctatgacttctccatatttctcaccattaaatataaatgcaggtgaaatcagaattaagcaaatctcatagaatctcaaatcatgaatggaaacaagcacccttcaaaataaataaaatatttgaatgaagaaagaattcaaatcatgtgaaaggcacatagagccgctgccaccattaaatcatatctgtatagcagaaaatctgtctctaaaaccaatttgttgtctcgattttatattctgatttgaaatagatctgaaattgaagtgaagagaaaaaaaaaatctgagagatgagagagagtctctagaaagcatatagtggtcgtgataaaaagttttaccagctgctaagcctgatgactttctatcacaatttgacagctttaataactctttatctttaaatggaatcacctaaaactttctcatcaatagctcttgcttaacaatcaatagcctcaataaacacccaaacaatcaaatagggcgatgcatgtttcaatagaggatgaagagcaccaaatagtgacaatataattcatcaatttcatccaaaatttaaactaaagaaaacccagaaaacattaccgtgctctctgtactttcaatgatggcgggagcaacaatcaatgatcatgtataaagatgaagcgaaggccgataaatgttaacagcgcgagacgtggttggaacggagagagatttatcgctgaattaggttaggtttaagaattttcttttgcagaataggaagacgcgagactcgcctgagtttttatgtatgaatatgcgattataccttcgagtttgtgtgtattgttttgttgtgtgttaattatcttattcttttacccaaaattaattccccgttcttaagccttgtcgagtaacccacgatctctttttacataaggtttgtttggtatgtctaattatattttattgtgtatttattttttttaacttttttttttctaaattttacagtttgggtttctaaagtagttgcatcgctagttgc

SEQ ID NO: 295410 - DNA, 4562 bp, Cannabis indica
ggcaccggaaatgcaaaatataaaaactactgaatgacataaccatgcatttctgaattctataaataacagtataataaattttttaaatagctataaataatttttcataattaatcatgattaactgctaattcccaaattaaactaagcgggctttacaaattatgctttttgttattttacttgcatttgcatatatgtgccttaataccctttgtcacttaaaataactttttgggtcacatagtttaaatttaacaggataatgcttgtattatacttactttgcaacaagtttctaactttgaaatgtaaagatgaaattaaataccaaactcctaactattgatagtattttcaatgatggttgggattccacgctcttgggattatggatccctccatgcgctttactttataagtctcggagcctatttatctataattttttgcggtcctttacaatttgggtcgagtacccccactgctggttcttcggaagcaggaaagacttttcttaagactatatctcaaatggaaaacttcatgtctttgactttggagttgaaatactttgcaaatttcttcagatatgctgccatgagtatttgggattcctcccagagttcttctacgagatccagtgcctcctataacaaagcctaatttgtggctagatcataagtagttcttttgtcggagggattacgcttttcacagggaccatcgcctcacatcaagactcaattaaaaatggagaatatcaaatggtagttctagcagtggtcttgtatgcttatagaacacgtgttaattccattgtctagttattcttacaggccaaagttttttcttaagggtgacctttaatatcttattaacgacctctacctgaaaattttcctgaggtcttgcgacagtggagaaactctttataactccatattttttcaagattctatgaattcatcactgtcaaattgcttctcgttgtcagagatgatcttgtgaggtagcccataccaacacacgatgtttttgactacaaagtcgaaagcccttttggtcgttatagatttcatgggctctgcttctgtccactttgtgaaataatctagggcaactgttacatatttgactctgcctttccttgtagggagggatcctatgagatctataccccacaccccgaagggccaggggctggtcattagtgttattcatttggtggggcccttgggatacttgcaaacctttgacatgggtcacacctaaggacatagtctatgcaatctttcttcatggtaggccaaaagtagccttgtctcagaacttttttagagaggctcgaacccctagtgttgtctccatagaacccatcatggatttcttgcacaatctatctagcttcaggatttgacacacacattaggtacgacatgctaaggcctctctagaagaggtgaccatcgatcatgaggtaagatagggcttgatattgtatctttttggacactgccctgtctttaggtaattctctttttgttatatacttgataattgggtccatccaacatgatatttgttcatttgtcgcaatctccgcgtttggtgtgatacttggctcggtgagatactttatgggaactacccccaatttttctacttcataatccgaagctaacttggccaagcagtcgcatgaacattcttttctcgaggaattaattcaattttctatcttttgaattcctaaagtaattctcttgcggctgaggcatagacggccatcatttctcctcaagtttgatattctcctaacactttgttaacctctaattaggagtcactgaatacctcaaatcttgtaagctcctaccactttggctaaccttaagcctgctaacaaggcttcatactcagctcattgttggagacaagaaatgtgaacctcaaggctgtctggagtcttaatccatcagaggatatcattactacctctaacctagatcaattttcgtttgacgcgccattgacatatattatcaaagtagggataacctaatctgccacatcaatggtcgcttccatttcgttgaactataccatagaatttgcgagggctagtcctttaattgagacggcaggaacatattgtatgtcaaatttgctaagttccatcacccacttgaggagcctcttggagacttctagtttctttagaacttgccaaagctggtggtttgtgaaaactttaattgcgtgtgcttggaaatacgaccccaactttctcaatacaatcaaggggaagaaagctaacttcttgatcaaagggtatcaaatttcagccccatcatatgtttgctaacataatacaccgggtgttgaaccttttcttcctctcagaccagtgcagcgctaatcacattcttagagacggctaagtataaacacaaatcttctccttgaactggtttgaacaacactagtggtttggccacatgttctttcaatcttatgaatgcatcctcacattcttcagaccattaaaaattttgactttcctttaagatattaaaaaatggaatacatttgtcagtggagtgggagatgaagcggctcagggaagctatttcctagttaaggtttgcacatctttatgtcttttcaaggaaggcatatctaacaaggcttgtattttttctaggtttgcctctattcctattaacttactataaatcccaaaaactttctcaatttgacatcaaaggtgtatttcttgggaataaacttcattacatacttccttacaacctgaaaatactctttgagttcatattcatgacccttgcttgtcttggatttgactaacatattttccacgtagacttccatattccttccaaagaggtttttaaacatctagtttaccatacgctgatatgtggctcatacattctttaatcggcatgactagcagtatacccccttgccagttctaaagctagtacctttttggtctgccacatgcattttgatctggttacatcaaaaatatgcgtccataaaagataatagcttgaaactgattgtggcatccaccatttggtcaatcctaggcaacgagaagaaatcttttggacaagctttgtttagatctgtgaaatcaatgcatatttgccatatcccgtttggttttggaaccaaaacttgattagccagccattccgagtagtacacatctcggataaaggtgttcaatagcattttatcaacctcttttccaaaggcttttgaattcactagatacaagggatgcctcttttgccataataaaggcatacctttgttaacattcaaaacgtgagtaatgacatgtgggcttactcaagtcatatctccatgacaccattcaaaggcatctgttgattcttcggtggtggttattggtgtgcgcctttcatcagagaccaaaccttttcctaagtggataacttttgttggatcttgatcataaattcctatcttctcaatctcctttataggctctaatggagttttaaagccaatgcgagaatccaattcatcctggctttcaggtaagagtgctttgctagtttcccagaccataaaaatggattgttgtacaaccacactataacactttcttacttttcctatattcccacagaaagttcctattctcgtcgcctgtgtggggaacttgagacacaagtgcatggtggaggttatagctcaaaaatctactaaagtcggatgacccaatattgcattgtaagtcgtggggcagtctactactatgaaggtccagaacttgaacatgttttgggggtattcagacataaatttatagggaatctaattttcccatgggaaacagggtagtcccattaaatcccttgagctgtgaactagttggggaaagatcttggtcagtgtgttaaatggcaatgaaagcatccttgaatagaatatttaccaaacttccattgtctacaaaaattaaggcaacaactttgttggcaataaaagtttcgatagccaaaggatcatgatgtgcgtaacacactagcttagcatcttcctccgtaatggtaatggaataatccataagtcatggtctttgcaccaagagctggttaacttcccatatttctctatcgtggtctagagatttgtcgtaattctttagctcattcctcgtggttcttccaatgtgtggtcctcctgagatcatggctacccttccgttggtcctttggggctatctatgtgccaggtgatggggaagaactccctaaggtacttgcacatccgtgacccgagctattctcccggaggcgctggagttccaacttgtctaccactcatgtgtggcaacctatctttgatccattcatatgagtgacctattgggttttgtgccataaataaaacccatttcaatataatcagatttactaattcataaagatcagaaatcattttgttgcgtggttcacatgatttatttcatgattatgtttaatgtataaatt

SEQ ID NO: 295411 - DNA, 5111 bp, Cannabis indica
aaaaaaaataactcttagtgaattttaactcttgaccctctatcataatacaatctaaattaatcatttacacttaaaattaatattctgtctatatatattattttttcattttaaatatatatcgtaactaattaaaatacatatatatttttcttgagttttttttaggggcaatgtggatccatccctaatatcagcgttatatgtgtaagttttttttttaaaattaagtttttaatattagtctgtcttaatttttaattttataattgatctttacattaataattattttaaaatgtatatcttcaattagtttttattttaaactacacgtacaccattttagcattttgtttgccacatgcgccatgtttgtacgttcgtgcatatacaattttgacacaatacaattaggtcaacacaaacataacataattattattaaccatatatcgatagttccatgccaacacaaacacaacacacttattaaacatataaagcaagaacaacaataataattgtggtcaattaacacctatcaagaacataaattaaaaacactaataagtagatagcatagcaaacactataataataaaaaaaaaaaataacaacatgatagaatgctcaaaagaatgttaaagcaaattgtaacataaaaataattgttcattatatcttgttaacggtaaaaacacgtcaaaaacttaaagaaattttcagagcaacaatgaaagaagagaaatgcttattgtatttctcagagtgaagtgttaaaataattttccaaccccctctcatgtttgaaaataggatatttataggctctaatgacctcgagtacaattatgatcctaagggacaagatgcatgacatcgatgagctgcaaattgcaggtggtggtcttgcgccttgtacctttgtctggtgtcaggcgatcccgagttgtagtggtagtggttgtgtgcactcttggtcgagatgtcaacacttacaggacgtggtacttccactacttgtacctctttgacatcaaaacttgcacgaggcatgtgtgtacccatcttgcacaaatgctttgtccttgcaattgtaccgtagtcgtgttcgtcttcaattcttaggaagatttcactaaccgtagctatcttgccaagaaaggcatgacgagtgttgcacgaacgagtgacattcccttagagcatggcaaagtgacttgcacttagagcatggccgagtgacatatgcccttggtgcttggccgagtgacatgcctttggtgcatggctgagtgacatgctcttggtcaatgaccgagtgtcatgcccttgtggcatggccgagttatatgcatttggtgcacgaccgagtgacatgcacttagagcaatgctgagtgacatgccctttgtgcatggccgagtggcatgccctttggtgcatgaccgagtaacatgccattggtgcatgcttgccgagaaatatatgtgatcatgtaagattaggtacctctttgagcgcgtcttcgcttatctcccaattaatttttagctaatctcgaggattagccttgctaacttttgagattaacacttgccccctagtctataagaattcttttaaatattcttgtagactacgttcgatgagctttactctcatcttttggttctgtggttgcccctttaggcaattattccttaaggtctttttgtcatgatcctttatgcggcagtgttggctctattcccttcatggtaggtgcttgtcatgtggaggaagtgttagcctcttgagccttctcaagagctatcattttgtttgagagagctttcagccatttggcctttctcactctctttttggtgtaaccttattatggagagagtatagactctttgagcagtctcgacctcttatttgttacttataggatataagggagtttgtggcccttaggctacgctcaaccttttttttttaagatttaagactttattgggggagcttgtgacccttaggctgtgctcgatcccttacattgcatctgtgccacttaaagtgcattttgaatgctagaaaattagtactccttttagagagacgtccctctcagagtcatatctgaattctttttttttctttttacagtgcttcgttcactttgataattttgattgacaagtatagtgagtaagtcaaaaagacatgtggagagggttgtatgtcatatgtaaagtgaaaacttaatatttcattgataaggtaaatatgtgataggtcgaatacatatgctatgtttggaggtcaacctaggtgccctctttaatttagtacaatgtactaaaggtaaacttgccattgctaagaatgttttcccatatagtgaaacttcactttgaggaacatcttggatatttaatttttgcgagttttagaacagaggcttcactttaatgtatcaacttatgagtgttggaggtattgtctaatagaccttatagggatatgatgagcttcccgaagaacactcacttgtatccattttcaagactctattaccatcctccacacggatgtacttctttgctctctcatagaagtctcctatgccatccaatttataatccgattctagggcgtactccagcagttatggcaaactagagttcatcttcggacatcctccctactttggcaacttcaacattaaagcactagatgtatcttcacaagctttcttgttccctttacttcatattggtgatacttgttacaggcacaacgtaatcacttgttgtctgatggtgttgaaggaattcctccaaaattgcttcaaggatgtgattattcctgatcttggccttttgaaccacctatatgaaacccctttcagtgtgaccgcaaatcactgtcaccttgccttgcatggcacctctttcatcttcattagctcattaaagctccgagatggtagtttagataagttgtaccatcatagggtgtcatgtgtggctcctcaaaattgggtggaagtggttagacttgaacctccctcaagaaaggggattcttcatcaaactcatcatcctcgaaatttccctttgatgcgatatccatccttcgatgtagattttgcatctctgcttccacctctttcacccttctgctcatcccttctcatgagttagtgagtggaacttgagtcctttttgcggtgtgcatagggcatgtgagatgtactcttctcgttctctcatcatgcgactttccaccatggctgaaggataacatttttcgtttactttgcctttttaagggggcgcaagcatggtgccctcagcgcgagaccctttgggtgaagtcccttcataagatcacgagatgttttctcattgcaatcttactttatggtgggtaggcccaagctatctttaatgacctatagggtccttgtctcgtgacaagtcttttctactttcgtcttttggggtgcttttcgttgatgacgtggagtctcttccaccaacatgtgtggttgggaacctgtgctcttgcaagtggcttttgtattgaaagtgtgaggcttgaatcatacctttgattatgtcattcaacatcttttacatggcaaccatcgtagtctccgacctttggctcttccagtggagatcgtttatctcatcttcatagtggtgatttggagatcttgagctcacaaagtagactctcttctctttttgaagcagtgttgcgaggtactgagatctcgtagtgttagcggtggagggcacctcattggtgatagttttttgcctttgtggaccattttcaccagcatgtgtgatggatgcagttactccatcggtgcgtgttcgttgaattctcttcaaggcgatcgccatttgttcttgtctggggttatttgaatgttatggccaacttcttcaactataggtgttggtggctctcttctggaggcgatcagctaagtgttatctagatgaatctcgatgccctaaagacggatggagcgtctaggcatcttacatcaatggtaagtaagggaacaacgtaggttgagcttgtttttcccacagacggtgaaaactcgtcaattaaattacgttcgaaaaatcaaaactcatacaccagacttagagtgaggatgaaaatatgaaaatacaaaaacttgaaaaaatgttcagagcaacaatgaaggaagagaaatgcttgtatttcttagagtgaagtgtttcaatgatttattaacttcctctcacatttgagaaataggtatttctaaacaaccgaaggctaaagttgcccatatatatatattttcatcataagagatattagtagaaggttatgtgttcattttatattattaaaataattcaaaataaaaatctaatattatagtagtaattttttcatatagtatcactttctcaacttattatcattggaaaaccaccctaatcctaccaaccataaaattttctatagaatatgatttttcttttctagtaattgtgagaaaagtagtaaagcaaaaccaagtatatcttactttctatctacccaatctttcccatcaccatcaatccaatatatatttatacatattataccatcgacccatgacatgatcatacatacatatacatcatatgtcacgtgataccgccaccatgttgaccgacatatatttatatatatatatataaataaataaataaaataaaataaaatagaaaagtgagtgatgggagaggacaagtgggctacgcaaagcacgatgagtggaccaagagaagaagagatggcttccgattcccgccaaagaggtgcctacgtggacccacaccaactcattttcccgccaaaatacccacttttttggcccacctccaactacgctctgacacgtgtctccacctatggacaagtggcgtcttgctgttgatgataaggctaactctcactctctttcctatttcgtttgtttacaattaggaaattgtctgcctatgggcaaccacttttctcctttattaatttcttttttttttgtttagtttaattttattttataa

SEQ ID NO: 295412 - DNA, 9532 bp, Cannabis indica
tctctctctctctctcacctgctcgatatagctcacaggtacccgccgtttctctctctagaatgactagctccgactcctcgcacggacggcggaattctagctccagttcacggactagcatgcaggaccggattccatactcgccggcgttgagctcggcctactctgacacttccagtgttcggagccggaactccgtagccgatgcagcacgttcaattgcaggagtcttcgtttcttgcttcactccgccagagacgaaaagctccaacagtttcgctgactctgaggaatacagagcccactctggtaaatttattggttgatccctctttttttttgccttttttgaattggttttgacgtctggatctcgcagtttgatttctgaaagtgtttggtggctgagaaaatttgtttaaaggaaaaggaaaatgcgagtttgaagattgcgactcattcaacaaatatcgttggactagttccgatcaagtgtcttttgactttattgataacaaatatatttgtctaggaaaacctgaattctatgtttatattatagtttttcggaaaaatctatcaacatgtgcagaatgtataggaaaaagtaataattatattcaatttctaaaacggggaaattgcctttccgggattgtggctttcatgctgggaagagtactggtatatagataaccaagttccaaaacaggattagcactattttcaacatgttaaacatagatgagtgagggaattttttgaattgcccaatgcccaatgtccatttcttaataaaatatactatgtttgtgagaaaagtaaaacacatgtaaaagatggttagtgttttgtaacaatcttatagctgtgtatctgtgattatagaatgatctaaggagctttatctccgtgttaaattgaaagcatatttgtttctttatgaagtagaataaacaaattggttggccttcttcttagttacgtcggatgcttcgggagctggtagcgagagaagacgcagttcgaataggggaatttatgctcattcaaataattcaacccatgaaagagaacctgctggtgttaccgaaaaacttaccatggaaggaatcaacagggtcacgaggaacttctcgccatctttcaagataggacaaggtggttttgggacagtttacaaagcgaagcttgcagatggaacaacggttgcaatcaaacgcgctaaaaaggtttgatataagttcttaataaagtaataaggaggctggttttagaaaatcagataatgtcatcatacaagtgttgacagagctttttgtaattttctttcatttgtgttggaggaagaggatgactgatacttgatattcatctgtgttgtattatctttctctgtagagtgtatatgacaagcatttgggcgttgagtttcagagtgagatccgaacactagcacaggtagaacatttgaatttggttaagttttatggatttttggagcacgaagatgaaagaattgtcgttgtggaatatgttccaaatggaacccttagagaacatttagattgtgagtaccttgtcagccttgagcatttacattgtgtgcccgtctatcattatgtctatgttcatgtgaaattaactatttaacatacaagaaactaatgcaggtgttcatggaaacatccttgacctcgccgcaagacttgatatagcaatagacgtggcccatgcaatcacctatctgcatatgtacacaggtttttgttttctagccgcaaacttaatttagaattagttaataccagtattggttccaaatagagatagtcctaatcatgtcgtgagttctttgcagatcaccctatcattcatagagatataaagtcctcaaatattctccttacggaaaactttcgagccaaagtggcagattttgggtttgctagactagcagctgacactgattcaggtgccacccatgtgtccacccaagtaaagggaactgctggctacttggatccagagtaccttcgaacctatcagcttactgagaaaagtgatgtctactcttttggtgtgttgttagtggagcttgtcacaggcaggcgtcccatagaggcaaaacgggaactcaaggaacggataactgtgaaatgggttcgaatttcatcttctttactgaatttcttgaaaatatgtagattgttttcttatattctgtaggatcagtaagtgtgtttccatcacatcgtcttcggaaatgtaaatatggcttcatcgacctatgtaaccaagctttcctcaaatgtagaacttgacattccatatttttgcaggccatgaagaagtttgatgatggtgatgctctttcagtattggatccaaagttggaacactacgcaggaaacagcctggctattgaaaagcttcttgaactagccttacaatgcttggcaccgcgcagacagagtaggcctagcatgagaaggtgcgctgagatcctttggagcatccgcaaagattacaaagaactaatgggttcagatttccgttcattttcaactcgttcccaaaggagctagagcaacaaaataaaaagtgtgcttccaagataagtaagttgccatgaagaatcatgaatttttttttttcaacagtgttaatccctaatgaatttgagtgatagggtatttctgtgttaggatgcaacaccgagcaatttgtgtcgacttcaatttgttagggaacccagctatttgtaacgaatggattggtagggctaagaggggggagagtgcaaggaatgcgggtagaattgtcttctctataaaaacttagctagagatgaattcattcagatccatgtactatatttttcgtgaatttcaacatgttattcacattgggttgctatgtatactaatataataatttgtgtattgtatctattgaatatttgtttcttcagccaaatatattacatttataattaatattatttgcttcaaatacctattgcagactttacagtaaataaagtcaatctttggtcccgtcaccgtacacagccctggcaatagtggcacttcatgtttacaaattcacaatacatataaattataatacacacattaaatctctcactcccaaccaagatgataaagaaataataataataaaaaaaatgaaccatccaaacataatagggattccatcatgaagatatcgcttggtgaaagcccacagaatcatatgaagggcttggtttaaatttcttgctttaaggttagaaatttcaacagttcctataagttgctcaacttaaaatatgatgcaaaaaaagaaaaaaaaaaaagaaaaaggaccactcttaccgttgtaaattcccccctcactctaccaaaatgacattcaatattgacaagttgcaagtcttttttgtgtttttctttctttctactctaatgaatattgaatactctatgtacagaatgatacttacaaaacaatatccttgtggctgtgactcctgtctctaaaatcatttcataaaaattaggctaacttatgaagataatatacaattggaaatgctaattctacgctttaacttatgaaaagaagtcctcttgttttaaactctctttcacctcttccacaaaatttttctttttgttttcctatggcatcaatgcaaaattctctctgtcactctctctttctctctctttttctctttttatttagtgaatcttttgtctattaagatctagggactgaatcctgccgagtcaactcataattacgatccagcggtctttcatcctcactatctacaggatttgcttttgaacaaaggaagaagaatgatgatatgtagattgtcacatgccaaatgctgcaaagaattaaaagatcaactaagataagtaagagagagaagaagaagagtgaatgaatcattatacctatgccaaatccagtagctttcactggtctccagtttccagcttatggctgccatggctaatgtagtaaagcctgcaagtaaatagccccatacatatcgtctaaagatcgtcttcacaacattacgaagccacactctaactgcttgccatctgcacaaagataagctttaaaataacaagttctataggaacattttgatctaaatgaggttttgagcaaatggttagttaattcctgttcagccatgatattttatttcaaatcaatctcactttcatattattattatgtttttatggataaataagagcaaaaaaataaattaattaacaacgtagttctatgcaagataacaatgacaaaatacatatatttgtataagacagcaataaaattcacaaaaataacaagagaaaaaagaagaagaaaaagagagagagtaattcactagagaaacaatatattttgttgttttttggtttttagcaatggtataaagcataataataaagtgaaaagaacataatcaagcaacattagagacaaacaaacctattactgtagtttagatatattatattatataactcgaatcactttgcccccttcgagggcaagatcacgggattcaaccacaaaaattagcaggagcagagtaagacaacgtttaaacaccctctatatatgtttggactgtgcaaaagataagtaaaattcacaaccagatatgataaatttggcatcaacccacctgtcaatcatatttaagcacattccaatcggcaaggagaatgacctaagcttagttgagtactctacaagccagccaacaattagacccaaagagccaattgctatcaccagaataatgttggaagacctgcaaaggttgacatttttagataccaggcaaagtagcaacatcaagattgagaagggaaaaagataatgaggagagggacaacatgattgcgattttgaatgcatagaccactacatatgtttttgagttcaaggtacctggtagcctttgtaattgccatgagagcagtgatgatggcgagagctgtgtgtatcgctctcttgaacacttcatcgattgtagtcaggtacacgaaagtgctcaccacagccatgaaagacagccaaaagtcgaggaactgaaacattttccaatacactaagtcctggctagtttaatttggaattcttaagaaagagcaatcgtcaaacaacaaaattgttcaaaaaggagaaaacctcacccgaaacctcaacctcaacctcaagaagaggagaaaaaaataaagaaaagaaagaactttacctgtaagacattgaacgataacgcacaccaggatccaacatcacatgcatgatatagtccacttgaaattccactacatgtatatattacccactctgctaatgcctgtatagatcccaataatttgtttagtacagaagttatcagcatcttcattttaattgaaaagaataaatacgagcactaccttttgcctaagggcccaaaaggcaggaaatacagctgctacatttgatgcaataagagaaattgattgtattatgtgccctgagattgataaattcaaacatagtagagtaaatctaactatgaaggatgcaatttagagaaaacaaatcaatgttaacgttttgaatttgaagagctcgttgaaatcatttctgaaagcaacatgtaccttggtgtgacacaatctcaacactacaatcaaagcctccgtggtttcgatcacaagcacagaagctaagggcacagaaaaaaaataatcattactcattgactgtaactagcaatgtctcaaagaaaagtcattaagccaaaaaggtgcagggctgataaaaaaaatacctgtataatgctaaaccacttgcatccagagcaaatttgcaatctccatgagaggaacatctctttggacatctttcaagggaaatagacatagtggtctgatctttggaagcaatacggctctcatttctatgccttattccaaaactccaggttccttccctaatcgatagaatgtaaaaatctacttttccttcacttgaattatataacttgaaaaacatggagccaccactatttattgtcttgtttgcataatagtagtcccagctatcaagcgacggcaatccaccaaacctagtgtatatttcagaagtaatctttgtgtctgatgtgagttggacgtggatatttcctccagctgcacctctaggaatgtccataataaaataagtccatgacttatctggttctccattaaatgtggagttggtaagaatgggttcaagaggaaaattggctgaatctgatgacacttttccactgactggcaaaaaataggattcaaatggcgcggaacctctcctgacaactgtctgcagataacaattcttatcttgtcaatcaaatactcctgccaataagtttcttgatgcatcaagatgaaaataaaacactacaaaaagaaactaattgtagagatgctttcaagcaagaagctcataaaaatgcagtcatctctttattcgataaagcatcaatgaaatgttacttccaaagcaacatgaacatcacaaacttttgactattatggtctaattttattggcaagtaagatccaaccacttaaaacaaaacaaaaaacatgcccttaaatgcttatgtattaatctaatctcatacttgccttttaactagtgcagttgtgaatcctatctgctgctaagcattacgaagtaaatatacatagtcttgtcatcttctcacccccacactctctttctattcaattttggcaattgccatctttatcagattagaaattatcaaatccaaaaacaaaaaatctatgatttctggttgcatgctaaaaatctaaaactttctattgaaaaaccaactacgtagtgaaaattaaacagcagttgaaaatagtagaaaactccttgaagcaaaatacacacaagccacagaaatttcacctgaaggatgtatttttcccaagtacaatttggtccagccttccccagtggacactgaattactttagactccatggagtagcagagcttattatttgttccctgaactccaccaagtactttcgaaagattagaaggcaagaaggaaatataccatcgaccaatctttggtgaacgaatcaccaacggggctttattgatgtcaccggaataatcgtacagaactgttgatggcatagcaccatgtcgaacaatgcacattaaatttatttcactaacattgcctgtcttatttggaggagttacattaagactgacattccttgcagtaatacgtaactcttccgccactcccattatgtccaaagtgtagaattttggttcaccatcaccgtggcaagaagtttcaaaattattttggcaggcaataatatctgtcgtttggttatataacatagcatttgaagaattttctgccagattatagttgctggttagagcacatgaaagtgaatcaatcgtctggttgcagtattgaccccacatggttgaggttgtacatccttccacactaatgttggcactgaaagaatatgctgggccacgattaatctgcaatgtaaaggcaaaattattgataaaatacatcaccagtcacaacatattcccatttacaacaagcataactggaagactcgtcgtagcaacaaaaccacctctctaggatgccaaacaaataaataaaattagactgtgatgtggatagtaagcctagtgaaatctgctatttctgtagattttttgcttatagataaaatacacatgtgaaaagttctctttgactataaatacatgacagtagacgtatggaaataacacagacagagaaatgacaatagtacaaaactcatggtaagaaatatagtagaatttaagtaggccaaaacactaccatcttcgactgtgtcctcgtaggtccaacgccattaaaaagaccaaaataccaaactccaggggatatctgaacaagaagtttgacaattagactttctagtaaattaaaataaaataaaatgcactagttaaaaatagaaaataaaagctctgatagcttgcataggttgtctccacccatagaactagaaatgtgatgatattgtcttgaaacaaaggtactatcaaagtcgaaagattctatgagacctgttcatttgtcaagctaagtgtgaaatttttctgcattgggtagcactgctccccattttgaagagcttgtattccttcaaatgaggtattaaagacaggaactaaaactgcaagagaagaaaattcaatcaataccaaacaataatgagacaaagcactatccatgttcatctctatatggtaaatagcattatcattgagaactcaagctgcagaaacttcgtcgggtgaagctagtgcagtatgtgtatgcacgttcataatcagtataatatcatacaaaagtccaccaaaggccacaaaaaccagatgaatgaacaagtaaaattccatgtaggcgttttaaatcaaaatttacatttacctgaatggccagaatccttcagagaaccactactatctgtcagtgggaggctgccatatctgaagcaaattattggaagccgacttctaggaatctttgccagctttacagtcccctaaaaccaacacaaatatatgaaaatatgagatgaaaagggatgagaggatttaatttgaagactttaacttcttctttttcctgccatcaaggaatagccttttgacagtagaaaacaagttaagaacctgaaaaacaacaaagtgatagacaccccagttcatgttgtattctatgaacctgaaaacatacttacaaggtctacatctgagtgcaactccaatgacattgaagagaaccatggtggcaattcaactagtacaaaccaaaacaccaaaaccacaaattaacaaaaatgcataattaaccataatattaggatatttgacctactgtgatctcttcttcacgcgtttaagatgaaattcacttggtatataagccaatacggaaaagcacagacaattaaattgaacaacttcttattttaaagagtgccaatccacgaagccaacaaaaatgtgcacaaattcagtgacaaagatgctatcttagattaccgtactaacaaaagtatgacactttcccaatctcaacattaaaaacattaacagaaaaatatcaaacaatgctgcgatggtagactgatgagaaaaagtaaaagcaatttgcaacccacgaataataaacagttttgaaaaatgaatataaatgagaagcgactcaaaacaatcaaaaactcaaatttacaatccagtaaggggaaggcagtaaagttaatcaatttgacaattaaccaaaaaaaaggacaacagcaaaattcttaaaacaacaaactcacacaaacagagtgataaaaatatactaaggtttaccaaacgacaatca

SEQ ID NO: 295413 - DNA, 7452 bp, Cannabis indica
agatctctgaaggtgtcttgacggcaaatataaaaaatcaaaaagtgagaaggcgaggccacgaggaaacgacctcagaaatcatttgaacgataaagtctgcagacgagatctcccagacaatgacacaaaaaggctagaagaacaaatagatgctctaacgaagctcgtccagaagaaaagtggggccctcactaattctgaagacgaggacccagaatcatgcgttaggaggcgaaagcctcgctcacaaaaaatttcaaaatgccccagatcgagttgtataatgggcgcacagatctaaaaacccacctggccaagtataacaaaatgatgcaagtatcaagagtaagtgaagatgtcgagtgcttgtgcttcttcctcaccctcatcaagtctgtcgacgattggtgctaaagactggctcccgaatcaatccattcctggaagaaattacaatctaccttttaaaagtagttcatagctgcccgcgactataacatggaaatgggatccatcaacaatatcaaacagtagacaggagaaagcttaaagaacttcattcaacgaatgatggaggcggtagctaaaacaaaggtgactgacaacatgaagcttgtggccttacaatccaaacttgcagttggttcctattatggggataaatgcaaggaagaaggtctgagacattgtccaagttcatggcgagagcacatgtctttatcgatttggaggatgcttatcaataggctttcggagtccctccagcacctgcgccctccgcatttactctaggggtcgctcctcaggtcattgttctcagaactcagtatactcctactatctacggaccttcttcgttcgtgcaagcacctacacaaaccaattttttggggtatggagcggcacaaaccagatatagtattgctcttggacagtcaaagcctcaagcaaaaattctgaaacagaatgtgagtcgttcccggagcaaaagaagcggaaagaaccaaattcaaagtgaaacttcaaaaaagccaaggaaggatcatgaaccaaagtacaccgagtataccagcctggtgcgtacttgagaaaatatgtacaaggcaacctgcaatatggttcactacaagaaaccccctaaaatatctcaaggggagaagtttaaaagagatcagagcaaaaggtgtgagtatcatggagacatgggacacaccactaaagaatgtggctacttgaaggatgaaatcaagatgttggcaagagctagacacttgggtcaatgggtctgtattcccatcatctagcccaaatagggggttgttcacagaccgttgatcattctgggatagtagggtgccataaactctctgcaaggagtatgtcaccctcaagctcctggatcacaactttcggtcctacctactccaccagctcaggctgcagtagctgtattagctctagggccagggaacccgtaccctccgggtctagctccgccaccagtagagggacatgtggccacaatctcagaaggactgcataacctctagttgacgttccttcttaataacctctagtggagccagttgccctttcatgtacaatgaacaaatctccaatttcaaatcatactccaatgggtcaatctccaactctttatgtaaaatctcgcacattttctataaggttgtgttagtttcaaccatcaacgtcaaatttcttttgcctttataaatccaattaaaatcctcacacccaaaacaccatcatacaatacaattagaaacacattaaaatcaacaaaattatacatttcatcgagaaactatcaaaaaatcatcaataagccatcgtaacgtatatataacaacattttacaggtggaaatcgataaaatattgagaaaatatctataaacaattttgatgaaaacaaaataataattttcaggcaacaatcgacaaaacatcaaaaacaatcgtgatggatagaaaatatcaattttcaagtaacactcgagattgtatcgaaaagacatcgagataatatcgatattcaacgaaaaatgtaaattatcaaaaaattcagatagccatagaagttatcgagaaactatctcaaaacgatcaaaaaacagtcgaaaaagggtaaactatctcaaacagccatagaagatttgctttgatcgttgtttccagaaagcctctctttgatcaattactttaaacaactctttttttatttcattgtaccgctggattgagtgagaatcccttctacttttcaaatctgacttcaatttacaattctaagcttgaagtttcctgtcacatcttttcccccacacacttagcttattagcacaaagcaataatttatcagaaaacttagcatccccagctatttgccaacaatcgcgaatgatctcaaaatacacaggttctttaaagcaggcattttcaattttgaacttgcggttagccacaaaagtttgaacgacttcaggttccaaaaatattgggctgtgatcggaagaagaaaattccaggttgaatagtgaagcaagagagaatacctgtgcccactgagaattaaccaaggctcggtcgattcttacttctacccaggccgtagttcctctacccttctcccaggtaaaagggtggccaataatctccatatcttgaagtcgacactcatacagagtttgttggaagccatctatcaagtgttgggggtatcgttaggctcctcttttatcttcgtgtctgacgatgttgtttaagtcccctatcacgcactaggggagatttgaatctctggcaaggaagcgaagcagctcccaggtttgatggcgtcgagctcgaatgggttccccatacacacccgtgagtcgccagtgtcccttctcagaagacttaaccaaaaagtcaatatggttttttgaatagcccaatatgtgaccatcttcctgattcctccatagcaaagctaaacctcctgcgcttccttgggcttcaatagaaaagacacaatcgaagcccaacatacggcccactctctccattttacttttatcacttttagtttcacaaaggaaaataaaattaggtttcttttgagatacaatctctttaaagaattgaatagcccgttggttcccaagcccacgacaattccagctcaaaacattcataatgataggcgggtctatgaaccagaacccgcccccaacaagttttttgtattaataccaacctcaacacccatttccacatcatccataactgatagcccatcttgatccttattgaaactaccaccatagcccatattgctatcttcctcaggcccattgctttttccaaggcccatccttctcctcttattatctaattccaagagagcatcatccccattgacttgagttgtttccacgttatcctcattaattggagattttcctaaaacttcaaggctcttctgattagtcaactttccggcttgggaattaattcccccacctacgcacccttcattactatcctctattctcggctgtgggaaggaaagtccctgatttttagtgattgagatccccagatgattgtgcattgattgactactgccgtgggatgtttcaccaccgtgattgttatggtcttcattcaccggactgttcgaaaaagctgcgccaccattcttgttcgtagcccctgaccgtaaccacttggccccaatagcgtagttcttcctccttggcagtgctttcatctccaaactaaacaaattctttatttgatctctcggagtgtcaaacaatctttcaaaagatctatccgagtgccccaatattccacaaatgaaacagaaggtggggaggtcctcatatttgaaatgagcgtagcaaaaccacactgccctgtttttcaagtttctttttcctcctcaaaggtcttgtaatatcaagtttaatccgaacccaaaggtaatctcgccatactccgataaaattattcgggtctgatttcacaaacgttccaacaaaatttccaagatcacgaaccacacgttccgacatgaagccagtagtcagattatggatttggacccagaattctaacttattaaggaccactaaacgaggattttcaccaatctttaatcgttcaaatattaaagggacccgatcgaatgtccatggactcccttccataactcgctcgatatcaacttcagggtaaaattgaaataaatgtatattatattccaactctttcacataaactccccttcccggttgccatagttgagccattttattttgcatggcattaaaatcaattgatcagtttataagaaaacgcccgaccaaacaccacctatcatcaatttccgatacatcatcattttccccatccagtaataatccctcctcctcttcatctgcaatacaaaaagactcatattgttcttccagattagaaacattcctatgatgaatactcatgatctcagcaacagtaaccagccacaagaacaaacaaaattactcccttgacaacaagcaacaacacactcaaaccatgtcaaaagacaagacttattaaaatatttttttattcttttgaaaaaaaatattttttattcagatctattttctaacatttgctaaatattaatttagaatctaaattgggtaaatttttaattatagtttaagaaatttcacctttaaattaagttacaaccatcaatcaaaatatttaatatactaaatattttataaaaggtttagtaaagagttcgaattaaagaagtttatactaaaaattaattttaataaatacctaactgtatcaagaacacataaaagtgctgttcatttaaaatgtaaaataataattaccattaaaaaattatcatatatttaaaaaaaaattattataacaaatcatattggtaagaattattatgctcataatattatttgtcaaattgatattttacaatttctctacattcataactccaagtcggttctaggaagaaagaaaatattggtttggacaaagaagaaaataataaatccaaaattagtgaagaacaagaaaaacataaaccctaattatgcatttcagggttggaattttcaattcaattaccttcacccaaatccaacaactgtgatatttcaatacagtctttgaatattcgatcggggaagatgaagaacgaggaggaggaaggtaaagaaaggaaggaaaatccatggccgtcttcgtcgtcatccccaaacaagccgtacgaggaaaaagagggcatgaagctttggggagttttactcttcggattagttggcgccacagccaccaccttcgctgtcggtcaattgcgaagaactgttgattgggtttactctcagttgatgaacagatcatcgcaatcatggaaaggaggaggaggaggcaaatcattccgatcatcttttcaagaagaagcttggaaaaaatacaatcgtagaatgagagaggagtacgaagaagaaatggagagagtggaaaggataaggcgtatgcagaatgtgttcaatcgagagaggaataaatacagaaggggatacgagagttggagggaaaatgattctagttcttatcatcaaagtttccagagagatgattggtactggaaaaagtctgatacttcgtcatcatcttcttcatcatcatccagagctagggctaataattacagggaagctccaaatgttaatgtaagctactcgttgtcacatcattactcggtgttgggtcttgataggttcagagcaaagccttacacagaagctgagatcaagactgcatttaggagcaaagcaaagcaatttcacccagatcaaaatcaacacaataaagatgctgctgaggccaagtttaaggaggtaatgacttcttatgaagccataaagaacgagagaaaaaccatgtagtttttgtatattcattttgatgcattttgaaacatattgaggctacatttcatagttacataatagtaccacagtaacatacaataagggtgggttcaatagaaattttgaatcaaatattctcaatttatttatctttggggaacagtgttcaccagaatcacacactgtactttttcttcttcatcaatattttttattgcttactaattttagaagtaaagctattattccaatatttgttctggaattgataatagcattttgttcaagagtagttgcagaaagtaggtgattagacaattcatgttatagcttatatctagtgaacttatatttcacagtagacctcatcatagtggaatttaatcttttatttgatgctgtgaactgtgaagtcatatagagttagccgaacctgaagatgaatagtttgatcatctgatgggaggcctaactaagcacagaccacagaataagcatttgtttgtctagttcacttgtttctacaagctagaatatgctaggtctggagttgcttctactgcccatgatctccatcacttttcttttgggctacactcatttagttcttgtgagcacatatagtgtctgccctggcctatacttttcaatgtaatatccagactttctaccatgcctccccaatctgtttcaaaagttccagtttttcgattcagttcttccctgaattttgatctggttgcgaaccctttcctcgcaaacattatggatgaaaggtgattttagtattactctcactagtgtgagtgtgaggatatcccagtgttatcaactggagcttgttctttgtgactgtagttcttaaaggtcaactttcatcaagctaccaaagttgtatagtaactagaactagaagtctaagcttaactttatcattttctcctggaatttgtgaatccaaataccagtagcctctatattcgtgcaacagattagtttagtttagtcacaatggcctaatcttctagctatacataccacaagtatttctataattcaatcatctcatactttctatcatacccttgtttatcagagcattgtaagcttgactagttcgaactcatcccgaattctcccatcttcttacatacaatggaaactggtctaagaaaactccatctcccaaacttcctctttagcatcacaaaagagtaatatcactggcaatcgtttacattgaataatccaggaatcactttctgttgctgcagagaagccaaaaagcaatgatatgtaattacctctgttgaacagcccttgtcaatcattttatcaagcaccatggcgttggatgaatctttggatagaaaaccaaccccttcaaaaagattaaaagtaagaaaataattaaaaataataacgagaatacaacctcacaacaactcagagcaactaggggtgagcaacggtcg

SEQ ID NO: 295414 - DNA, 1466 bp, Cannabis indica
ccttcccaaaaggcctcatactagtagagtacatgaaacacttacattctaggaaaatcttgcatattctcctgatgtgggacttgagttgataccccaacaaagagaatgtcatcaacatagaccaagagatcaaccagagagtctcttaaaaaaatgaataaatagagaggtatcgaacttggaagcttggaaaccctattgaaacaaagtatgtttaagcttctcattccaggccatgagtgcttattttaacccataaaagttcttttttagtaaacaaacatgatcaggtcttatggatcaatgaaccctggaggttgttgcatgtagaaaatttcatggattttgctattaagaaaggcattgcttacatcaagctggttcactggccaatgattagaaactgctatactaagaataattcttattgttattaatttgaaaacaggactaaaggtatcctcataatctatacgtgatgtttggagatagtctttggcaaccaatctcgatttgaacttgtccaaggagccatcaagtttcaatttcacttgatgcacccccttattttcaatcacatccatatttttatcataaggaacaagagtccatgtgccttgcttgatcagtgcattaaacacttgagtcaaggaagcaaaccaatgaggattcttacgagctaattggatagacttaaacttagtaggtagaagagattcaaggaaagggtcctttgtagccaagtaggccttggatttgagaataccatttggagatcttgttctcatggagtgtgcttgtgagggtggcacatgagtagaagagcctgctggaggaggaagtttacttgttgatgaagtatccaccacacctgtagatgaggaaatgctaagaaatggtgtagtatgttgtatttgaggtttagatggtagagtgggaattgtttgttgtaaagtatgtcaaagaaaaggtgaaaatgatgatggtaggattatttgtggttcaataggttatgaggcagatgcatgggtggaggcgggactatttgtggttcaataggttgtgagggaggtacagctggtgtaggtgggattatttatggttcatgaatagggagagtagcctcagtaacaacaccagaaggaccaacatctatacaagtattagtagcagtaaaatggtatagaggtaaatgtagtaactgaaaaatagagtagaaaatgagtgaggtacttgtgatgatgagtaaacattagtagtttaagcctgcttagcagaatagcactcctcattgagcataacattccatgcaatgtgttaggaccttcagacaccatttatttccccattagtatccgctttgggcctaagccctcacaaatttatttttgggcactttcccaaaaggtcttatttcaatggagagagtgtccatccttatatacccaagatccttcctattt

SEQ ID NO: 295415 - DNA, 3606 bp, Cannabis indica
agctcattattttaaagagatgttccccatccccatgaagtcaatttctagtttgacctcaagatatgtagtaccactagaaggaacttcgaattccactaatagttgcaatttacaccattctttgatgaagaaaaggaacgaaattgtgagcggtacacccatgaatatttcttcacatcttccatcccatcaagatacatctcttttaaaaaagtggggccattcataaggccaacctgtttcttgacatgagatggagagtgaacaccatgctatatgagatttcttgaggagagtggaatgggaaagtgttgttcactaatgacaacttgttaattttatggtactaaataaagtatgcaataaaataattgttactgattattattgtaccatatgcccaagattaccatatgtattgttatacccatattttgagcaggcaatatggttatgacaagtataaagaagctaaaaaataagctagcttagattatgaaaaaataaatacattcaaataacttgcctcagaaagtacaattagtagaaatatttgaactatcctttcaaagataagggcgagatgtgaataacaactactgctttgtaagaccatcgagatgaaaagtcaacgcagaaagtctatctcgggataacacggaatatacaacagaatgacaataagttggaaagggtagataacgagttctttaagaacttacagcttattgacccacatacttattagtatgttgaaagacaaaggaaaatacacacaatataattcatctcggaattatcacattatgatagtgcctcgcgtttgcctctctcaacattacataaagacacgagaagtacttcccagattatacttaggcgtaacaagttatcttcaaagtaaagcatcctaagataataatttatgttgcgaggtgaagaagtatagtcagcataaccccttatagataaagacaagagcagttatatcggttatctatttttatctcatgtgttgtaaatatgaaacacgtggattacacgcatttcatgaacatttattgtgataagattccaagggaatagctgtcaccctaaaaaacctataaatagggacaaaacctaggaaaaaagagacgaccaatttcagaaatagagagaattatacaaatattatatcttgtattctgtaaacactttgtgaatcccataaataaaatggactcgtggagtatgaagagttaactttaaaaccacattacaaaccttctttttatttatattttttattattcattattattctagggtttatttattacattaaggcttatgtattagttaaaaaaaaaattgcattaacagtttggtgctttcattgagaacattgtaaaaaaaaaaatcaaaaaaatacgccctgaaaaatatttaaactttccatccatggcagaagacacccctcaaaatgaaaatactcaaccgggagagacaactcagcgtctaggaaaagaacattcccataagacaaatgcgactgagactcctcgctcgagaagaggaaatggtgaaggaggatttgaacaaactgggggtgaaatcccaaaaaggcgtagtgaagacgcatacaatcccaaaagatatgtgccattggtggacttgaaaaatagacaactttgacagagattggcagaatcaaatcgaaggaatgctgagttggagcacgaggctatagctgcaagggttgcacgcagcgatgcaccccctagccaacaaaacacgtccactaggcaacctcagggaagacctagaggctcgaggaccaagagacatggggaaaatcctagaggtgataaccacgaaaatcccactaatcctagggtgatcaaccaaggaatacaagggatataccagtggacaaaggaggccccaaaaatccaagaaataacaacaatagggaaactcgacccaacaatcaaggaacctcctgtggtaacacgaattatgggactatgcaacctaacagcctagagttctctcacatgaatgcagatgccaggaaaacatgacctggggaccaggggttcactcagcatgatgtgagggatatagggggataacctggatcagggtgtccaccgagacactcatagagatcaaaccaaaatgacagagatagtacgtggatcaaggtcgaggacttgtggtcagagtagatcgaccaaaactcatgcacgtgaaggaaaacaccgaatacagaagatacatgttgccattatcatgatgaacatgatagcatgagtaactcccagagttatcgatttgaaagcttttctataacaaggtcgattagcaattacgaccaaaggaatgaaagatgacgcaaccccaatctttgtaaacacttaaaccatagacaacctgacttacacaagcatttgaatcataatactctagatctttgagatcaattaaatcaaaactcaactcgttaacaaaaagttgagcacccatccatggattctattcaaataagggtgattcagttagaagataagttcaggtgatatcaagatgaagaatatgagaaactatcagaatatgattttgatgaggagacaaaaccttttaaccctaacatactcaattcccaattccctcaaagattcaagaaacctcatgtcacaaaatatgacagagtaaccaacccagtgcacatctgaacaacttcaacaccttaatgcgagcaagtaatgtctccaacaacttgcgttgcatattattcccaacgtctctaactggggtagcgagtagttggtttgataaattcaccaaccactccattacctcatgcgagtagttatccaaagaatttaagaacaattccaggtcacaagagatagaaggccagaagcattcttcgtttggggtgttttgtttttcttaatattagttggctttggtgaaccacgaaccctttaaacttcagcttaagggtaagaattaatttttattcagttagttttatcaatctaatagctttgccacttcgatacgtgttagatggaagccaattggcattccttctccaattgatttcattgatgggttgttcactgtttgtggtgctagaagctcttttcttctccatgattttgctatccacatgtatgatcatttgctatccacttgacagtcaaatttgaaaatatgaacaaaagaagaaaatgaaaaacaagaagaggagatcccgtttctacggttacaacctccatttggggctctaatcttttgcagggctttctcactttcacagaatccccctgatcttcatctttgacgaagggaaggttttttgtacagcgacaagctcaagggggaaagaggctagtatcttctaccatcaagcaactctgtgatcatcgtcaggcgacgatgtcactgactagatttgagaccacgagcttcatctccaatcgtcaagcaccacctatgagctaataaagaagagcgcctccatcgacttcgagcaccactgtgtgaggtttaaatgtaggaaatgattgaggttatgggttttctttcatttgagagagagagagagag

SEQ ID NO: 295416 - DNA, 6984 bp, Cannabis indica
caccattatatcaactttacatttttttaggccaatttaataattctagcttattttcttcatagtttgtgtttgttaattttttttacatattctcatcactttattttattatttgttgaaaccaatttgtgagtaattagttttataaattaatttctaattttcaatcctgtggagacgatactcgatttatcactttattacttgttaacgattgcgtgcacttgcgtggccaatacccttcttaatggtatccttatcaacctcaataagattatctataattcccacacttgaattcaaaacggacatagcgaagattatcaaaagtgattggaaaagaactgtcaggggcaacaaagatactgacattctaagcaaaatgccaagttgaccttctaagactttacccttatctccctcacagccaaaagtaaccaaaaacaagccatcagcatgttcagatacagacacagggaaacgacactgcgatgactagttaccagagtgggtgttcataagggatggacgattataaggtcggatggtgtgaagtttaaggagaaggttgatggtagcaggggaagaactagaagaattagtaacataagtaaatacagtgttttcgtcaggaggaagaactaaagcttgcagacattattcaaaaactcatccataggtgtagatatagaaacacttaaaagaatagaaaagagagtaaaaaacaaaaggaacaagtgaggagaacaatgcctaagctttgttatataaaggaagaatcaaaacccactaagaactcgtctcgaaacctccctattcgcatccctagtctcatacatggtagctacaatgatggaggagagctgaatggtttcgggaacccagtcatccgcctccattttacaatctccaagagcatatatttaggctaagatttgggggatttgtagtaaatggggaggagaccaaaaggaatgatgaagaaaatcgaaaggcaggagaaaatggaggatcgagtatttaatgctctggctaaaatttatgcgatgggaaagagggcaataataaatctcagagcaataaattcaatgtaaagaaaaaagaagaaaaaagttagaaagaaataagacaaaccaccactaaactgataagggtggacgagaaggaccaagatctcacaagggaaaacgatggttcgcataccttctggaaggtcgagagagaaaagcttcaattattttaaagactaatatagatctgattcattcaacattaagagcaaaaatgaaggtcgaaaaagtaaaatacaaatagtctaaatgaatcaaatatgaatcagattcaaacaaacacgactcaactcaaattttccattcaataataatttttgttctttttattttctgcagcatactatttttattttctttcatttctacatcaatgaattcacttttaaaccgtaacttatgccaaaataaattgaaaatttactcattatccctttacaaaaataatccctaactcacatacgctctttacctatgttttattgagaggtgtggaaattttggttgatgtttgattggtagattccattataattttgaaagattgatgatgaaaaacattaatggttacaaacaagagaaatgaagaagattaaagaaaaaacaatgtttacaatgagattgaagaagaaaaagaaggagcagaggagttatttggggtttctatcggaattattactagaaatttctttgtctatggctgtcacctgcgaaagttcatgaagaaggaaaagaggggctgatttttttggtcttagcagtaagagaaataaaaaagagagtgagcttgtcttttttgtttttgttgctaggtggctttttaaaattaattgagtgtcacgttctcatctatttttaataaattaaatgtaattaaaaaataaaaataaaatgaaagattattttgccaatttcaatcctgtgagatggttattttgtttatccaatcgcccatgattctccactgccaacctctacagccacagctgcctcaatattctcagaagctaacgcgcgcctgccgccgacctattcgtttgctcactgctgtatcagttcagaggtgagtttcttgtgttcttcattcttttgctttttctacacaattaattagtataattaggtttctttgattttctcggaaaccaaacaatggcagctttttacatcctcaccaagttttcttcagcattaagcctaaaatgttgagaattttgttttctcgggaaataacgttggcgtttatgctctctcacgaggcagatcgttctttcttgttcaagccatctagattttatttatttattattcagattattggaagccataaagaactaagagcaatgaaaatatatactgtatacgcatatatttatgtataaattcttaaaattttgaatttttaggcgaagtgataggatgtatgcaactgcaaatcctggagtctctgttcaatccatggtaataaagcctccttcacatcctacctatgatttgaatggtgttatcaagttagcccttgctgaagatgctggtgacctaggttcgaattgtctttaatgtctaagttttggaaatgctattaacatgttgcaggcttgaatagtaagttctttatatgtagtgactaattgttaacacttttcatgatttcaaatattactgagcaaattttcgtgcttccattgtaggtgatgtgacgacactggccactgtcccgtcagatgtggaagttgaagcccatttcttagcgaaggaggatggtgtcattgctggaatcgcacttgcagagatggtgtttcaggaagttgatccttctttgaaggttgtaaggcctgctatttgttttcgtggattacttatggtgtttgaacttttttgttgacatttaaatttcctttttcccttttttctttttttaaacaggtagaatggtctcaaaaagatggtgattatgttcataaaggcctaaagattggaagagtctatggtaaacgaggaaacaaatataattagtagcattttgaaacttttattagaagttagtttttcaatttcgtatgcaggaacggcatacagcattgttgtagctgaaagggtagctctgaattttatgcagaggatgagtggcatagcaactctaactaaggtaacactcttttacatcttgtgttgctaagtacatatgtagctctcttatgtaactctcttctgaaaagagttaattgagtctgcacatgaattttgggatgttaaggttccttttcctgcggagatgattgcagatgtaaaagatggttcgaggtttatgataggaacttactgctgcttaagtgatatattacaagaaataaagcccaaataatagcaaaccagtaacaaatagatggaacagtgaaatattggtattagatgaatatagagtgatagtgagaacaatagaacttgaggtcccaagagcctaagccagcaaatgcctattgttcaagctgtgaaagatacaccaccattcagcaagtcgaccttgctcggaaaactagttgagcaaagtcatcttttctcttgaggtgggacgaacaagtgattgttgcaatgtggcagcaaggacagaagtttgtaaaagggaatgccggtgtatgcacaaccaatgagtgactctgagctgccttaccaaacctgaacaataaaaagggtgagcacgaattactcaaagtcgggtcactccaatgtcaaaatagagttgatgagctctaattgctcttgtcgctctcgtcctttgtcaacaaaccaattaagtaatagagtacataacttttgtgaaaccaaactcttgaacttgtctttctcaaggaaatgaagttggccccacaacttgtccacactgttgtgtaatagagtaccaattgccaacgaattattcttggtgctaaattccagaatggttgtagatagttgtgctccactatttttgagccgttgcacttcatctaccatcaaacaataccactcaatcattgaaaggattgttgtatctttcaaaacttcttgatatatattcaataatatatttaactttatggtgatcatgggtgaaggcacttagagcccaagtagggcagtcacctcacttgaaattccaatcggttctaagttacttggggtttatgcttaaataaaaatttttgggcctttatacaaatactagtttaccaatattattaaataatattgtttgatgtagcggtaaaatattcttaaagttcaaggaggtcacaagttcagaacttcatacaattgtactaataacgatacgacaccttataaggatgttaggcaccataggtgctctttagcgttttgataatataatcttagagtagaaatattctataagatattttccacaataaacacgagtaagatattttgtaggcatttgtgatggttggacggctactaccaactttcgacgctgtggacaccatggaattcgaggagaagcttgaagatctagactgactcacaagatgaagagaacgagaggagaaggcctgatagttggatagggtaggtgaaatggggctgagtttaggtttagttgaggtgggctttgtaacagggcccattaagtgatggccttcctcaattctctgggtcgtttccattatttgggccagccctttaggttgtagaaagtgtattgtggccttaatctcatcctttaacctgttagtgaaactaccttccaagatatgttcaggcacgtaggggacaagagatgcgagtacttcccatcggactcaatattccttaatggtgccaaactgtaccactgataagagctcctctgaaagagagtcaatcggccaggaacgaaagcagaggagaactatgtgtttaagtatcacccacgacataatgggttgtctctagttttcccactgaaaccaagaaagagcatctctgttgagacccatgatgttcgtgtctagcctcatcgattccatcatctttgtgattaagaagtatcacgcggtgcgatatatctaaccatctgggttttcttcattgaacatcaaggaattgtctcgagtagtgttgaagttgaattatgctctactgccggttggtgtttgcgaagcactatggctgaaacgactactgaatgaactaatggatcctatgcaaagtccaatgactgtcaggtgcgacaataaaattgctatctccatctctcacaatccagtacatcatgatcgtacaaaacattttgaagttgatcgacattttcattaaagagaagatcgatgaaggggtccttaaagtctcctatattcgtactactcaacatgtctctgacatttttacaaaagcattgcatatgcctttgtttgacaaattgatagacaagcttggattgtacaatatattaccacccgacttgagggtgagtgttgaattatttaaaataaaaaaataagtaagctttagttagaatattttattcctagaaaataggaatttgttactttattctcttaagttattcaatatatacgtatactctataatctaaaattacaattaataaaaactttcagtagtgtattatttttcccttcttggtttgaatgcttttagagatcaatctgtagatctttgctattctgcaaatctggtattgcaatttcatcttcgccagaacattagagagggtcttaggtctatggtcacgcaccttactcaccatcttcatcggtagattcccaaaaaatataccacgagggaaggtttttggaataccaagcatttgtgttgcaatgtgattgaattgagtctagaattccatcatcgagcttttataactgagagccatcaattaatcgaatggatcgtcttcgattttacaataacaattgaataacgttattcgaaattccaactagttcttgatcggatcttgctcctctacctcttgaaaccattgccaagcaacaccctctagtccttgagcaactgccaccttctgcctctttgggatccaatgagcatgggaatattgctccatacaatgaacccagccatacagatcctcttcgttgaatagtggtaacactggcaccatagcggagtcttaagatcgatgctctgataccacttgataggaacttactgctgcctaactaatatatagcaagaaatagagcctcaaataatagcaaaccggtaacaattagaaggaacgttgaaatattggtattagatgaatatgagtgatagtgagaaaatagatcttgaggtatacgagagacctcaactctctcaagggtcgaagctcaatccccatacattttcccgactcatgtatgcaattctatctcctatatatactacccaaaccatacaacctacctcttagtacaattacccaattgccctctttatttaatatcccatggaacattgaaatattggtattagatgaatatgagtgataaaaagaacaatagaacttgaggtatttgagagacctcaactctccttagagcctaagctcaatccccatacattttcccgactcctatattcaataaccatacaacctacctcttactacagttacccaattaccctctttatttaatatccaaaccctaacagtttacatgcatctattagatgagtttaagataaaaataaaataaaattaaagactcagcaatcgccacatctctcctctccacaaagtttcagttacaggttagaatccattatgatgaaggaggaaggaaattggagtcatgtaggtctaccccagtgtggaaggttgatgtgataaatccaacacgcaagtatacgcatcgttttaacaagtaatacttaggtaaatgagatcgttcccacgaggact

SEQ ID NO: 295417 - DNA, 7344 bp, Cannabis indica
cgtgggtgatcgccaaaaggctaaacaggtatggaggaagcatgtttgggtggtgttgttgctggatttgtttgtttgtgcagttctgtttgggatttggttgtgggtttgtagagggttcaaatgcattgaaagttgaaattttgagaagtctttgatttgctgttctgagagaattttcggttgcattaaactctgaatttgattatcagcgattacaacaaaaagaaaatactctaaaggttcatatgtgtaagtaagtgatgttgatgttgatgtgctcttgattttgtgttcattttgtaccttatttatttccaattactacataccttttatttcgaggtcatctatataaagtctagctagctgttgtcagtgtcatgtaatgcataaaaaattggatatacacaaagatattggcaatgcaagcaagactttgacattattcttcccccaccatttttgatgcttttttcttattagtcgtttgttgtatattttgaaactctgttttcattgattgcaatcctgtttttcctaattgggttttcctcacaatgtattagagttgatataataataataaagaaaaaaaaaaaacagattatgtatattatagcctccaaaatagggaagagggaagaagggctgcagctgggaccgactgaatgacgtaagctaaaacgaaacaccaaaggtgaaagaagttcctgaggtatgttgaactgcatgtctaaacctgttaatgtatattgaagagatagactgcacagcatgtcaaagaacctacttggattgactagtgttagtactggatcaagatttctagaagcaacatcaaaagataagcatccccaaatgaagtctccaaccaagtaagtgggtttctttggagaggaagcatgatcaatggaacattatctgtaaacaaatgaaaaaatatacgaaaacattatcgatattaacattagagtaagtcactttcagaccaaaaaaaaaagaaaaaaagaaaaaaaacattagagtaagtcattcttggggtcttgaacaagcaaacaacacatataggaagcctgtgtctattgaggactaaactatctaataatccattggaaaatttgagagccaaaaatctatacaagatgaatcatgacttcaatgttgacataatcaaagtttttttttattactctccattcttcattatgtaaaattttaaacacttttcttttgagctgattaattatagtatagtgataagttgaggaaaaaagagttctgcattaatccgggaatgcttcagatgaaaattcttaacaaattagtaacagctgtatagaaagtcaggcaggtgagagtaattcgaggtctagtacatgaaaaactattattggtatcagtattaagaatgaaaataaggacaaactcgtaaagaaacaaagatagcaatcacaggcatagaaaagattaaaaccttcaaatggtgttcgatcgtaaacaggaacatgaagacacagaacttcaaaaaacctgcaatttaatataggaatatcagaatcctctcatagtttcatagacagcaaatctgtgtcaaaaatgattttgaaacattcgtttttttttttaacaatttcaattttcttttaaagcaacaacaggataattcccatataaaaatccttatgaaaacttggaggtggatgacaaaagaaattaaaaagtgatacaaggtaggaccatgagtccatggtcaccatggaaaaacaatcactcattttttttttcctttagctaacagtttagactcttccttcccttttttcttttatttactttttccagtcagtccatcacaatagatccttttttagttgaccaaattagttgaggtatcatttttatttagcaatttccagaactgtgttaattgtagataaatttatttgtaaatatttgaaactgagtaccaaaactgatatttaaaaaaaaaaaaactagaaggacccttgtataatgtatcttacaagtatcatctgtggaggattgaaaaaaaatgtagataagcttaaagattttcattagttggtgcctaaaatggcatcaaagtttcttaattagattttattacctgacattcatgtaaagtcatgtccttatatttccaagttggatgataataaaattccttaactatctataaggatcaataccaccattttctcccccacaaaacccaaattctgtcttttgaaaaacctttatgaagaatctcattctgatttaaaatcagataaaaacaatgtccccttccctggtttaataatagacctactcaaagtagtaaagcagtctctttaaccaacagtttagagatacccaccaaacacttttatgaagttaggacactccttatcctttttttttttttttttttttttttgaaaatatgacactccttatcaatggttagtgatttaccacttgtctcaatttagagaaattttttttgcatattttgggtgcacacatcattatacataatttattatgctcttaaggatgcacaagaaatgtcctcatatatgctattatacatgtatagctggtcttgtgcagcagaatattatacacgtattattaacaaccgttgcttctctttcgttctttttcaatgtgaaacaaggccaataatctttaaaagcaactttacacagtgccagtatagtatatttatttttctgataaaataagagtacttgtatacaaatatcagaagatatatattctcttctttttcttgtcttacaagatatttatcctactaatatacacccaacttctacagaggagggttcaaaaaatggtttgctattatatcaatgaaacaaaaacacttgccttgcctggtgtttttcaaggatcaaatcctggaacatctttggaagaaccataaactgctttataaattgttctatcaatgacattcctataaggatcattctctcgcttctcgagtaaatatgctagacaattttcaacttcagactttatctgcaagtacatttcattagcattttctctgtttttcaagctctcttcccttccccttgtatatataggctttccaaacaaatagtaatatcgccccggtatcttgggcaacagccctggaataaagagatcctccctgttaatttcttcatctgatccatccctacaaacaaatcataccagtccgagagccaattccttattaataaaagaaattcagtctcatggaagatatactacgaagtgattacgcaacaaagtaatcttacctcactttcactgcattgcgattcaattctctaatgtagtcatttagcacaggaatcttttgcaagtcattgtaatcaagtaccaactgccaaatccaaattaataatcacagggtaagtttggattgtattctaattgcaactggaagctcaagaaagatatgaacaaggcagctgtgtccttttagtcttatgattatgtttttgatttaaaacgagttcacaagctgcagttcagaaagtttcagctaacaaaattaaattaaaccacccaaaaacaattggtaaagaagagatttaactcttctgaaccagagtagtcaatatctttgaattcatatttaaaacaaccccaaaagagaaatgaaaacctgaaattatcagccattctagaaaggactataagcaactatcatgagaatagaattattttattaagagttatctgtgaaaataattgtattaagcttacttctactagatcatcttctcccactgctccaaatggcacaattgttgccccgaaacgagctgccattctcacaaattctggttgagtaggccaaaacagcttatacgcttcaccctatcaatggcaataacaccttataaaagtgaggataattaacaataaaggagaaaattctttgatgagaaacgcacgaaaaatctcttattggaaagcaaatttgaagaaataaaaaagataaaacaaagcaagaaaatatatgatttgaagccatgaaaaaataaatatagaaacaacaaaccttgcaatgtagagcctcacgtgcaccaccaggataaagaaggacatgggactttgaggaaagcaatctgaataaattacttggtgtgactggtacagaaccaaaaactctgaaccagtcattcatagaaaactcgggtgatgaacttcctgaatcagccacaaacagttgaggatgtgctacacctcgaattacaacatttttttcgcgcaaaaactcctcaactaatggatatagttcaagtcccattaagttgtgataccctactaacaatactggaccttcacttggaaccccagcaagacctttcactatcttcccatcttctagagtagagtaagctaaggaacttgtaccaatgcgaagtaatctgtcattcaaattaacttggttaaaattcaaacacgttacctgaaaagttaggcctttgctaagatttttactctcatttaaaatgcaatttgtagcatcactaaaccagatttcttgaagatgataacaatcataaatctttgtgcagtataaaatattggaaattatatcaaaattgaaatactagtatactacttgtacaatattaatgagctaaaatgtaaaatcacagttaataaactagaacatgaatatgacatggcttgacactgaaccatcttcaggccaacaatgaatcaaattcaagtgagctgcaagcatggaggtgtcttcttaaggagagaaagaagaagaaatgtttcagttcacttaccctacaacttgttcaaatgcatagtcgatttctgttctactaggaggaagaaaatctgagacaaaattgtgcctccatgaacgacggtatttgctagtgccttttataatcgtcatcaaactaatgccatcttcctgccacagtaacaaaaggtatagtcagttatgtctgttctgtataccaactaaacacccaaagcgattagtttctccttgcgaataagaaatttactacgaatcaatcccaggtctagcaataatagaaacaagattcttctaacttgaaaacccgaaaagggaaatcagagtgagttgattgaaacacaattgggtattaccaaacattgcaggaagagaaataaaagcttagattatacttaaattaacttaccaacaaaaaggtatgtccattttccttgaaatgtcgaactgtacaattcagtagcgatttctttaatctttctgcttcttctttgctagggaccatgttatctttaccactgaaacaaaatttacaatgaaggaatctaagtgaagccttaaacaattgacatttctttctgaccccctataagtatcatagttttgacaatttcagtgcacaattttgggtagaggtgatgtgaataaataatttcttctgacactgatcatgttagtctaagctctaatgaataatgatcatagcatgtctcaaaagtcaataatgatttgacattaacaggcttatctatacagcttcacattagttaggtataaaaacacaacctaacttctacagaaactaaaaatatacagagaaatcaagaagtattactatcaatagatgccaaataaagggaacaatctactaatgtagtgagtgaaaacctggcaaggatcagcacttcagctttaacagcatgaagacgagaattagcataagcagcagctgatttaagcaacttcaacttccatagaagagtatcccgtggtatgatatcagctaaagactgcaagccgaagtgagaagtaaaagtaaaactattgcctctaaataatcccagagattgaactattcttagatacatcttgaaagaaataaaagagattgagagacagagacagacagagaacggaattaatatgtactataaactcgaaaggtgcttttgtgcatgacccaaaacgaaaacttttatgaataaatgccagcaagccaaagactgcatgagaatcaacagaggaaaaaaaaactagtttcacacattaagaatgtgctatactgaaagtagatgatattttgaaaaaaggaaacaaagttcttacaccaaggtatggtagcaaagcagtgagattttgagacattttctcatatctctggataggaggaagcttagtttcaacattaaccattgccatctttgttggatcacctgatgtcataaaataaaatacaaaactgacagtaaaaatctgattgtcactctttacaatagcaaataattttttttcaaaaaaaaaaaaatctaataatgagttcagagaaaacttcactgaaataaccagagttccccataaagagacattgtagaacattgtcataagttgcaaaccagtgcagcataaagtaagaataccaataatatatttaaattaaagtttattaatcggattttaaaccaaagaaataagggtaagaaattttctatgattttagtttggcagcatatattcatttgaatagttcttatcattaatttttgtaagatatgataaagagcttaagatctacataaacaaattgtatatacccataatgtagccaagaaggtagggaaccgtaggatgtaatgcatcaggcattgcctccaaaatggggaagaagggctgtagctgagaccgaccgaatgacgtggctaacacaaaacaccaaaagtgaaagaagttcatgaggtatgttgaactgcatgtctaaactctgttaatgtataatgaagagataacacagcatgtcaaaaaacctacctggattgactagtattagtactagatcgatggaacgatttctagaagcaacagcaagagataagcatcccccaaatgaatctccaaccaagtaaatgggtttctttggagaggaagcatgctcaagcctcacagtttcttcaacgaatttcaccagttctacatacaaagaaacccctcaagttaaaatatcagtagtaacattatctgtaaaacaaagggaaaaaaaaaatcattgcttgctttagagtaagtcactattgagggcttgcacaagcaagcaacaaacataagaagcttgagttgattgaggattaaactatctaataatccattggaaaatttgagaacacaaaaatgtatacaagatgaatcatttgacttcaatgttgacataatcaaagttttttttttcttactctccattcttttattatgtacaatattaaaacactttgttttagtagctgaggaataaagagttctgcattaatccagga

SEQ ID NO: 295418 - DNA, 2274 bp, Cannabis indica
cctctataccaataagtgtcttgttggctcacttttgatggccaatgttgagcaattctattatttaacactctcctttacatatcttcaatcttgctagtttctgtagccaaagcacatcattatttcgaacaactcatactcgcggtacaccaaggttgcaatggtagctaaaaacactgctttcgaaacattcttatctttgctcgttcaatccatctcaataatcgcataagtaaatgtgtttgcattttccagtatagacattgttttacgtgttgaaggcccagaagactaaaaggcaataagaaaacaagtgtttccaacgactcttcacgaacttcacaaaataaacaattagaggaatcaagaatctgtattttcatcaagcgctctctagtcttcaatctattttgaaccgccaaccatagtatgaaactatgttttgtgtgttcaatacaacccacacctccttacaccagtgtgccttatttacagattcaccacaaagcaagttgtaccctttttttaatttgatacttatcgtggaggaaagactgaagagaaaccaaacttttaaaagattctttgacttcaactactttcctccaataccaactactttggtttgacgcataggaccactaattagcttccttaatgtaaacaatgtgaattcattttactcacaaattacctttttagaagcaatgacccaaatgtatttactaattgtagcgacattccaaacaaaattatttttgaaaccaagaccacagtggatttagatcaacaaagcttctcccaagctatacttcctggccaaagtgaagttgcattacctattcatagaaaggctcgacatatagttgtaatctcattgagaattttttttggaataatcatttatctgaagttgcattacctatccatagaaaggctcgacatatagttgtaatctcattgagaatttttttttggaataatcatttatctgattccaataagagtgaaagtagagtagaacagaattgatcaatgcgactctcctgataaaagataagttccttaaactctaactccaaatccgagctattattttttcagtgagaaattgacactcctttgttaagattcttttggagaaaatgggaatgccaaaataccaaaatagtagtgagattttatgaaatttgaaagtataaaaaactcattgaacctcatgatcttgcataccacaacaatataagatagattttgcttcatttggatgaagccaggaagttttcaaaacagtttaagtcttgcaacatataatagatagaattaaactatccatgaaaaatagtaaaacatcatcaaaaaacttaagtggtttaacttcaacccctcacatctttcatggaacttaaagtttttttgtccaattttttcgcatgattcttgtgagatactccatacccagtacaaataatatcggagacatagagccaccttgcctcaagcctctattagattcaaaaatccatgcatttttctattaaacatcaaagagaacttaggagttcgaaaacattacataatgagattaatgaacttacttggaaagttgaaggctccaagcatctcttcattaaaatctcacccaatgtcatatgctttccttaggtccaacttaatcatgcaatttttcttgctcaatttcctctcataatgcttcactaaatcttaaaaaaatcataatgttatgagttatgaatcttcccttaacaaaccctccttatttttgtgctaccagatcgagcaagatctcccccaatcaagaacaaatcaatgtagtagctattatatataacacattataacatgctataaggcggtagtcacttactgtatgaggacctttacatacatttcaggactagagtcaaatcacaacttcactcacttctttacccacaatgtctcaactgtctcaaaaaactatacccatcaaggccatgagcttattcccaagtatggaaaagaaggcttttttaacatcatcttcagtgtaaggagtcaataatctatcagcttgttttagagaaattctcttcctttaggccacaatttttgttgactaacttgaattctatcttccatcttatttcttaggagatgttgataatactcaagaaaagttattgctacacggtctgcttatgttagaatgtgggaataagatgaatgaggttccatctcaaaaccaattggcaatgggaggagtagccc

SEQ ID NO: 295419 - DNA, 6017 bp, Cannabis indica
gggatttccaatcctcagaaaaaaaaaaaaaaggaaaataaactatcctattttcatcaccattgaaaacccagatgttacgaagagatgggccaccccatttccaaaattatgcaagtccaaattatatggttaagaaaaacttacaaacaaagttatccaataagacggttgtctgcacaagcgaaacataattgtatacatccctgatgatgggatggcactgaagatcgagttgatgatataaaagccaatcaaattctatagcaagatgtgtagtatagtaaagagagctgcaaggatacaaagaaaaactcaagcatcgggatgaaataaataacattagaattttcttctttagttctaagctgttgtcaagtcagaacattagaatcctagcatgccaaatattggataaagcatcgatatattctttaaatagaatactggactaagaatatcattcagtgtttataagataaagtaacaagaaggcttgataaagagtcaaatttgaattaacaagtataattaatagaaagaaacttacttagtttccaatatcattacaaaagcctgcaaccaaatacatccagagagtgcgaccaaagagatctcctccatttcacttttttcataagcataggcatgtatgctgattacaaatacaacaattgcctggacatcagtgaagcctggaatcagtatcactggattaaaagcaactaccatctctatagttttgttcaatgtaatggctcttaaagtagcctctcgatttaactcaagttttgtcaaagtgttttgaactaaataactctgtaggccagaatataaaagaacaaaagaagcgaaaaataaattttcaggagtggaactattttaacaaatacagctcacatgaaaaagagatcttccaaaccatccagcgaatgtactaggattcagcagtctgttactcccaacaaaaaaaaaggtaaaaattagcaatttaggtagtacagtaaattcaaaacaacaattctgatgggaaaatgtctcaaataaacaaataaggatcaagttcaaggtgaatgatattacaaagtaccttcccgcttgacaataaaacaaaatttgtggatgctgcatcactgtttcttcactaagatctttgtccaggacactgactagaacaggaacacttgtatagaaaacattataagccatcaggctaacagaattaaaaagactagtccctgagacgcctgaaatgaaagagaagctgaaaacatacctaagtcagtacacaagacattttaaaataaaaaatataccagatcagaaggaataatatttacgtgtcaattatgaacgatattattgcaagaaaaaaaaaaattacgaaagatataaaagttgaaaataaatcggattgttcagaggaactcacaagatctggatgaaacatatcaccagagacttgtaaaatgagtactgggatagaaatgctgttcgattgtatgagtaacgtccatgaacaagtaccaatcttttcagaaacctaaactctgcaaaacaataaaataataccaaaacaaatcactcaaccctgtttgttctgtaaagtttccatgcagagagaggaagtgttacagtatcagcaacttactcccaatactataatcagctgctcttgctgcctgcagcccctctctcccactgattccaactccgatatcagcttgttgtatcatccttacatcattacctccatccccaatggccaatgttctataatcacatgactttaaaatctccacaagctgcaaatagtgtttaaacacaacatgtaatttagatattcaacattttatgacagcacacgtaaatgtaagagcctttaaatttgaaaagcaaggactctaggatgacaatgaaatgacaaaattagtatatctttttttttctgggtagatctatcaataaattacaatttagatgtatgaagatcattaactatcctagatagcagaagggttcatttgctaaagcagcaacatcagcaatcaattttatgactcaatagtgttccctagcaaaaactttaactcctggaaatatttttttttgaaaacatctgatatcttttctagctttaaatcatgcaagtgaactccaaccctcatttaacagaagggttaatttgctaaagcatcaacatcagcaatcaattttatgactcaatagagttccccagcaaaaactttaactttaactcctgaaaacactttttcaggaaatcatctgatatctgttctagctttaaatcatgcaagtgaactccaatcctcaagttcaaaagattaactcccctcagagatgaagagaggaaacctaactattcagcataacagcttcatacaaattggtgagaaaaatattatagtttccaccttggtaatgtgagcactgagcacatagctaatgtctaccagatccttctatgtaagaataaattttaaaatctaccattgttcacaggtccagtgataacatatagaaggattacctgtgctttctgtgatggtgttacacgacagcatatagcagtccttgacaatattgctaattcagtaaaagctgttcgataatgcttaagtgcaatttcaagagcccaaccatcaacaacaaatgccacatcctgttaaaaattggaagaataataagacaaagaagctcataaagtacaaaccacaaatgattaaaaaacagaaagtagagagaaaaaagtaatagcttcttcacaaaaatattccaaagtctacaacaaacaacacatataggtgatgtttggtaacaattaactaattacttttcggtttatttaatcaaaaactatgaatgtttacaaaaaaaaaataaataaataaaaactatgaaggaatgagaaaattttgtttagttgaattgaataataaaaatacaaaaagtaggagttttgccgaacagcactatagtgtcaataactttatcaaatccacccacgtccatcacagcaattggaaccaactagatctatggcttagaaaaacttttgaagaagcctacactttcaaaccatttagtattaaaacctacctttattatgcttttttattatgtgccattttatgaaaggctatgttttatatgaatctatgcttattcttatttctcataattttacgaccttatttttttgttattcaacttgcaccttaatcagatttgaaacctacgtttcgattcgatagaggacattgctttcaatcctgatatagttattttttaactttttactagaagaatgaaattatacttgttcacacacaacccacatatagatagagcttgaatgaatcttaaactgtcagatgtaacaacattttaatgcagcttataatgttaataatgacatagataatctaaagtttacttcttacagctaggagttatatataataccttgggttctgacgttgtaatcctcattgtaagtagaactctctctaaacttctgccgacttcaccttctgttttgccattaattaatagaagctgtccttttggctctgtcaagtcagaatgcatagaataaagcatatgatatttaactaaatattgataatattgaagagaaggaagaaacatatcccttaaaaagctatggaatgcaacaaaatcaaaccatcagattaagaaatagagctaggtagagcacaccatatgaagttactattgtgaacattgtcccacattgaataaatggtaaagtattgagccatatataagaacatgggctactccactcatcaccaattagttttgagatggaaaaccttgattctcaacagttacagtcatctctctatttacgctacacaagtcaatcttcaaccccaattgtcacaaaccaatatatttttgttatcttttcgattaagtaaagagcattgtagaaagaaataaaaataaaataaataataaaaacgaaggaaactatcaattgaaaaagttggtaggcagcggagcaaggtaattatctgaaacaactagacatattaagtcctggtgtcaatctcatttcagataattcactccattctcctttgtcctgctccctcattacatttatctacaacatagcatatgggctaatagtacttttatatagaaatagaaagagagacgggaagacagagcaagttaataatccaattagtttgactacctggtgaaacaaaattgcaagaaagagcaatctgtatggcagtattctgtttgtcacccgtaagcatccagaaattgattccagcttttcttaatgtctctattgtctctggtacaccatcctgagttaaagtttaatacatcataataaatatggttatgggaaactccagtataatatatgtttaagcattttttttctttatttatttatgaaaaagaaataagtgcattatgtcacctgtaaacggtcttctattgcagtaactccaaggatcacaagatcatgttctaatctttgacagacctcagctagtctccactgcacaaagtagtgaagttaagggagtggatagacagacagctcataacatgtgaatgagtttgtgtgctttaggtgtttacctctctatcaacaaccatactactggcctctttaaacatcaaagaccattcctgatactcatcttcctccaatacacgccaaccaagacaaagtgtacgaagacctaattgagcatattgttccacagcttcaataaatgtccttgtttgctgcgctgaggtacattggaaaacatcatacaccaatatgcatcaaccatatgtttctagataactagtagcatataacattaaataagtgagagctaatataaataagcagaacaaaagaatcaaaacctatttcatgggattatgtattaaaatgagttataagaaatcaattagtacaaattcaactataagtatataaatcccctgagccaatcacacccacatatatttcaccttataggtgactaagggagggattttagtaaaaagaacaatcagttttaccagcacttgcatacggaagaatcgcttcatctgcacccttcgataaaagaataatattcccattctggcaatccttcaccacgatcgacattcttttcctatccgaagtaaactccagagtttccaaaacctcatatcgaagtgtagaagcattaaatttgatctctgtaatatattgatcaatatcacataaccaaacctaagatcaaaacagaatatctaaatagccaagaacaaacaatgtaccaagaatatttccacttttattgaagaaaaccatatgaaattgagcagcagcttggacaagtgcatcctcatcctgggactgtgccttgtacatgatagcaccacttttgctacaaagaacaaaagaaggatgtgaagatcagaatctgtatataatttgcatttattgtctttcatatcttctacatgctatctcaataaatggtattcttcttaatctatgggaaaaccaagagttcataaacccataaaaaatatatatacatgtataagcaaattcacctctgtaccggtataactgtattacatattgccataactgtaaggaaccttataacatcaggagagccacttgcaacagcattgagcagccttgcatctttttatcataaaacaaaactaatcagaatacaaagttaaatcataatccaaaagagtcctatgattgtcaatgatgacaaatcattgactgaaatatattagccaatcaccaagcccatcattaacatattttgtttattacttatctttccactgaacctactccataacacgagtaattgagctatgaacataatcacatagcctaacattcatagatcttaaacagatcatttagggctcgtttggaacgtcgtattaggtcgtattgtgttgtattatattggattatatat

SEQ ID NO: 295420 - DNA, 2774 bp, Cannabis indica
ggacggaggtgtgcagagcaaaacggaagcaggatttaggtagtttagccgccaaaaatttagtttttgtggttaagtgttacaaaccgtaaagtttaggtggtttaaccgccaatattccttttattttcatattatagttcctgctattggtactgcaggaggtattattttggtttggaaaattgggtttgagtttgaatgtattgcgtgctctcaaaaccatatttctagtattgttttttcgaatcccctctcaaatccttgactcatatcctgtgtttatggtcccccttacttccatgctaagaaaactttttgggagaactttatgaagactgaggatcggtttggcagaccatggcttatcttgggtgacactaactttgtgctaagtgattctgaacgtgacggctctttaaaagtcttttttgccagcgctttttattttatgctggcaaaagttctaataccaacattgatttgccaacccccttttgccaacacatcatgggtaaattctattttaccagcgcaataccaaattttgccagcacaaaaatgtgctggcaaaagtgacatttcttgtagtgactcctctgtctcctatgttgtccgtccaacccctgaattatcatagtctagacaacctttcaattgaaagccacgtgtcactttgcctaataccacgtcactcgagtaaactttgggataacatttgtctcctaagtttgcgtaggattgcttggttgtacgtggacttcctattttcttctttacaggagtaatgacatgcgctcctacccacgttatctggcctagacacgggtcatctcgactctcgtggttttttccttatttccatgcaagtctttaagtacactccccaaccaaaacaagtgaagtgtgccctacattaaccaagtaaaatgggtcacatactctcacctcccaaagtatgcagccctagccgtataatatgggtggacatggccacgtagtcgcgttaaccaacaattgtctatcctcaaggatttaagaaagggagaagcataaaagtgaagacaaaaccttaaaatccattttactcgcccctagtcaaaaatgggaaaggtcccagtcaccctcctaggggtcggactaggttgagtaacccctaagggtcggcttaatatgactcggtctttatggcttcggccaaagtcgagtgggaaagagccacctatgacccaagccaagtggaatttttaaccacaccataatgatgtacacagacctagcccggtagcattgggtcagtgctgtaagggtcgtccaaggctgcgtgacaacgagatagtgtactatgtaaaaacacttagccttaaccgattagtgccagtccactctcatcctagtgaggtacttaaccatggccgagtggtgttgggccacacacccgagaggaagggtcgaactatgtggttttagctccaatgggtattggtttaaagttttaccaaggtacatacttcaccttctatctacaaacaccatcaaaacatactttgtggacgaggacgaggatgtcaacctgggtgctcggtgctcactatggagcttataggatgtcgtttgaatatttccaaggtcttagaacttgaggacgaggtcttctgccctatttttgaccattttggagagaattctcggaacataattgacatttgaatgactgaaaccagtgcaccaggttgattgtcaacttgggcgctaagcccagcactaggtcaacttgggcaccaggctcagttttcatgccctgtgattgtggttttcttcctgagtttgcttgcatcttcctgagtctagtgccaggtgtctacctgggcgctgggtccagctttaggccaccttgaagttccatttggtccccaaaaatagttgaatcttaatctttgttgaaaatagagaatatgctcaaaagacttctcagaaaaactccttagaattggcctagattaacaaaatgtcaacctgggcgctgggaccttgttctagcacccaaggtgtgttgtttcttccctaaaatcacttgtttccccaattttgatgaagacaaagaggatgcacgagttatatttttgatctgacacttgaaagtggcccaaattgacagatgtcaacttgggcgctggggtgctcgagcaccgcgtgttcgggtgctcaaaaacgaacattcttcgaatctaattttgatgcctcaaatatgttcgtggcatgtctagttcatgttccaatgcaaattttggcccatttgcagtaagacggtcccaaaaaccaaaaccctagttaaggatgtcaacttgggcgctgggtgaaaccctaggtgcctaagttgactttcgaggtgctggttcgtgtatttttagctctcaggacctggacttggttgctccatgtcttcattgaacagaatactgaaagatagtgagttagacataacttatcagaatccgaattttcattttggagttcccagagtcaatctgggcgcagggctagggacccctcttaggtcgactgctatgactcgagactactcaactctgagatgttatctttcttgcactgcaaaaaatcttacttttagtcacaacaaaacttgtgactaaaagtgaaaaagttgtgactaattataaatcatcatttctatcttgtgactagaaggtccgtggctaaaagtattagtctcaaaaattacaatttgttgtgactaaatgtaattttagtga

SEQ ID NO: 295421 - DNA, 3378 bp, Cannabis indica
agagagagagagagacctgattgtcttttgtatctgggtaatccatatccttcaaatgctctcttctcgctattgaaatagttaccaaaatcacgtcgatcttgatggttgtgatgatgatgatgatcatggtcatattggaaaggtcccaaactgaagctttcatgcctgcaatacaacatttccttctgattaacagctgcaaactcctgttgaaaactgtcagccattaaattgggcttctcctcaagcggatcataaggaagatcaaatgggttttgcataggtaaaagaatcgaaggtgccgaaccagaaacttgtaatgactcattctcattagcctccccaatcgggacctcaaaaggactgtctcttgaaacaaaaacaggggctattgtagtacttgttggaacaacaccatccaaatcaatcaaccctttctcggcctgtatttggaacaaagttctcgctcttcttttggctattaagctctcaagcctcctgtttctttcgatctctgaaagcccaagatccataagattcttctgatcatcttctgtccactccatagccttattaccaccattctttacagcctcttcttcctcctcttcctcgtcatcgtcttcaaaatcttcaacgttgtcagcctctgaaacgacactgtagctgtcacatttcttcaactgattttgttccaaaccatcagatggcaaaagggtctctttctttgacgtttcagaaccaacaacgtggagattattaccaatagaattagatgataataatgatgagctttgcccacgtccacgttcaaacaaaaagccctctctttctttcacaactagttttgcatttttgtcatttgtggggaggaaacaagttgtcgtttcctttttttccagcttgggatttccattctctgttcctgtcaactatagttcgtctacttttttgtcgtcgtacggaggagaaaccctcgccaacgctaaggctatctctattagcaaccacattaacaacttcttctttaacggtactcgtcgccaacaacgttgttggtgatgtcgatttttctctctctttgacagttacttcgcttgttgttgttgttgttgtgggtggtagttcggaactccagaaacatcgaagaaggatggcgatgcaaattagaaacggggagtggtatagcagaagatcgaagaatatgtacacaaggaagaaaagtaacaaaatgcatgaaaacaatgggtgtttttgtacacatacgttactagtgtgcatgaaaaaacgaaggaatctccatatgcatactagtacatcctctgcatcaatagccattttgtactaacatcaaaattttctaccctaaaaaataaaagaacaaaaatttaaaattgggttttgagtaaaccagccagagaaggtttgtctagctaaaattttgaactgggtatgcatcctttttcattttttggatgtgggcactactatacccaaaaggcaaccaaaaaaagaaatatgttgctataggaatctacgcttgaggttgtgggtttggattttccatataattagaaaacatttgtttggttggatggctttgtcagatcctttcttataggacttcttttacctttcatttctcctccaatattcatggggcaataaggaaagaatagaaaacaaccattcaaaaagacaaccattagtttttcatattattattattatcattctattaagtattaaccatgatgaacccttttgtcctttttattttaatcttacgttatgttcattttctattgataaggtaaaaatagtagaaatatatacaaacactcatttatttatccaataaaacaatttttgttgtaaaatttatccaaactctaataaactattatattgatgtttaatgggtatttagctatgttcaatattaattactccttagtaattaatattgaatttgaaataattaaatttgagtatgtgtacgattttaagctataagttttatttaaaagaggagtgttaccatcaatcttctataatcttattactcaacctccgtactataagtacatgccgaaatatttaaaaataaatataaaattcatggcgatgttcgttatagttacaatattattcatataaatttttaaaaaaaaatttaatagtttataatgtcaaaaataaatttaagtttttttaaatacgagtaataaattgaaatatcaagaactctgttctcgaaaattttaatatcaagaaccgcataaactaatataaaaatccaataactaatgacattatagtgaattatagaattatatgtgtacaagactcatgctttgcagtttagaccccaaacaatggggaacgccgaaacgttttgtttaactagggctagggaagggataatgggcctattgagcattctgcgaaacataacctatgcatgggtttgagagaagggctcaatgcacaaagagctagcgacctccgggactagcttaacaaaaaaaatatggaaagcattccactaaaagtaatgtcaacaatgaaaatgtttggctgagcttgttgtcctaataaaaaatttggctaaggttataagacgccaaaggggcaagagattagactcggatggggatgataaggagccttgcacaaaacacatcctaagcatggagctcccaaaaaaatttaagatgccaaacatggtaacttacactaggaaaaactgatccaagtgatcacttgtcctagtttgaaaggatattgacaatcacctggttaagcgtaacgccaaatatctttgttttccacttatcctcaaagacacatgagaggactggttcaaaaggaaacaatccacacccgtcacaagttggtagaaactaaaacgagaactttgtaagtaattttgtatggcaaagaaggctcatttggaagttagtgccctgacaaatgtcaaacaactaccatacaagatgctcaagaaatacttaaagcgtttctaagagaaggtagataaaataaaaatgttgatgaaggttaatcgtttgttcttttaggagatgggcttagagtggggtcctaccttcaaagagaaggcacaaccaacttggaggattttaaggcccaggcccaaaaatatttaaactggggagaagccttgataaaacaatatgggaccttcccttctacgggatatagaattatatgtgcaattagaaattaagacctatttataaaaaatagacaattatgagtttagtagttaattatagaaaattgatgttatatgtgtgtcattgtaatatccaaattaaaatagtatttaatttttttttctctccttgggat

SEQ ID NO: 295422 - DNA, 8721 bp, Cannabis indica
ctgaccatatatagaatattacataattgattttgtccagatttaatgaatataaaatattcatttatcagaaaatcaattatttatttatttccttaaatagaaaatcatttccttaattagaaaataacttccataaataaaaatattctaataaattgtccttaaatttgtttgacacgcacaaaaaagtggagattggaatgagaattgtacaatgttattttgatggcattgtgttgtgtgtgtacttttaggaagatagtagtaattaaagcaagctactctactctagatttaatttgcaacctagctagtaatgagaaagatatatataataagaggttttatagttagtggggcatttctttaatttattacttagtggacatttgaatattatacctcccaattaagcactatgaatatgatccaattccaaagtgactattactagtcggctttattattatgatcaattttgcctaccaacccataatgtgttgtaatgaaacttatgcatatactctctttattgatgccaataacagtagtcttttctcttaattcgataggttgagccaaagtttgtcatgcgtagtggtacgaaggctaaagttatacccattgaaataatatactatagcatattggaaaacccaattaatgattgaaataaagaactacttgatcacaacatcttttatgtatggtagttttacaaacccattttacatcttgaatgaatacaattagtggcgggttgaaaattgttttaaatttgtgtataatttatgtgtacatattattactattatagtctctttagtacattatgttgtgttgtatgatatgatgttgggttatattgtattgtatgtaatattattttaatataatattttgtttggtattagtttgtattaataggttatttaccataaacccgatctcgatcctacccttagacctagacctcaaactaggaccgacacggacctcaatcaacactcggacctcgaccctgactcataccacaaatccttgactcgggacttagaccctggaactcgacactggcctcagatcctagaacccagcactggccccaaccatacactccgactctagcccaaactccaaccccgctcctgaccctagactcatgcctcggactcggacccgaccctgacccaagcctggaccacgaccttggacctaggcccaaactcgaaccttggatcttgaaccctaaaccaaactctaactcgatccaaaccccacaccgagctaaacccgtaccctggctctggcctcggcgtatcttgacgtgaacctgaaccccagctcaagcctgggcctcgaatcttgaccatggaccccaaccccgatcccaagacttgaaccctgaaacccggccccaatctcgaactcgatctggtctcgaacctcaacgtcggaccccgcctccggcctcaatattataatacaatacaaaagttaagtaactaaaaaataaggtctcttgggaaggttcaatgcatgtgtatttttaataccaatccaactttctttatagaaacttttacattttgtcaatacggaggagtgcatgcgcgttacaccatttttcagttttcacaatgatcatccccagaaagcatgcttttaaataaccgaacttaaattaacaatattatatatttttatacataaagattatgtaattagatttatttatttcttaaaaaaagaaacacaaacaatcactaaatcttatttgttcaaaataaatacatatatatgtcctatgtatacacattactttctctttaaattaacctttttggtgacttggcatcaaattgcactaaccaaatcgtcctcttttcttatggcatatactagtttcttgactatattttcgtatagccaccataccatattttaacataataaaattccttaacattaaattgaaatacatatttagcaacaaccgagcttaatcaatcaaaacaacaatgtataactgcaacaaaataaaaaataaaaatctcccaaacatgtatattaattttcaaacacaacatcgtttgttttagtattatgaaatcgttatcgttgtacgtaatcattggtttattttattacaatcatatattttttttctcatcatattttttagtcatgtcatcagaagccatatgttaaatattttatagtaaatcatcaaataaaatgatataaataaactaaaaaaaaactgaaaatagtagtggaaagattgagtaaaactgtttgtatatttatgatgtatatatatgatcttatggaggttattacaacatccattttttgtatcacctataacaaaaactacaaaatatatatacttaattatcatcataatcaccatcattagttgctaatttacttcagctatactttccaactcaggcttccaattacacccttctccttgatcataatcacaattatgatcaagtttgattttctgatcatcagaacaaaatttagaaaccatgtcatccacggaaacaactgatgatccacctttggtatttttcaacaactcctgcagttcttgcttgcttataaccaatttaatcctcacaactttgctactactactattgctgctagtagtagtagtttctagctcgggtttggtatattctacttctttttctggcactgtaaacctaacctttttcgccgtcttcttctttttcgggggcgatggaacgggttccaaatagtagaggtgaccacctagaagctttgtttctgggttgagatgttgattttggtttagtagtattggaccactactagttgttgtttcagctgatgatagtgtatggcctgagaattgagataagacatcaaatgctttgattggtgatctgtattccaatactttcccatctggtttcactacctttattactttctcttccgaaaccaaacaatttcccatggctattagttctctgttttattaattgaaactctgtttgtgatgataataatattattactcaatgtggtgtgtgttaaagagaagtgaaaggacctttgggggtatttaaagagatgtggatacaactttaccctcaaaaagtttggaaaattacaaaactagactttgttttgttttgctttagaccccacttggttacaaatgtattgtgtattattaggacgttggggtgtttattggaccatgttattatgagattttgtcttaacactaattggtaatgaacggaatagtccatatttttatatatagctcaatatttttacatttgatccatgtgaataatacatgtccaatattctctctcaagatagtggctatatttttgcacaccaatcttgagtcaccttatcacaagtagtgccatttgttaatttatttttatttgctcgcttattcttgttcgtgggtgggagtttcatttttgctcgtttgcgggctggctaattatctgataagtgtggatcgaaagtccgctaagaatatggctctgataacatgttaagaatattcatgaggttccatctcaaaactaattggtaatgagagtagcccgtgtttttataataaatggctcaatatttttacatttgatccacgtggggcaatattatccaataaaccacatccaatatttttagattatttcagatccgattgaattatatattggatgttaaattttaccatcctctcaaaaatatattgtgtattattaagagtaggggtgtctattagaccacattcaatatatttaagcctatccagatctaatattttatagcaaatatatataattaattaaactatactatatatactattgtcatactagtgtagtctttcattttttttactggtgttgtgtattattaggaatagaacattcaatatttttataactatcaaaatctaatattttatagtctatctaagaactatactttattttgttttgctttagactccacttggttaaaaatgtgtgtgtgtattattaggaggtaattaattaaattaatcaattattatggttataattataactcccactttgatacttaggcatgaattgatcatcaacttgcttgtgagttggggttggcgagttgagaaaaattaagatgtcttgtgagtacaacaatatctataatgattaatcattatgatattacttacccaaaaaaaaatgagcaatcattagggggggttaatttaaattatattctttctactctgtctcttagttgttgttttttttctctccgagtcgactcactgagttccgtgttgattgcattaatatatattattaatgaacaagggatctcatatattatgaaagtggattctcaccagaccctctttttgttacacagtgaaaacagaaaaagtcagataagatccaaggaaaaagggctttgtaaattaactgaattttatttttatgtttagtagtgcttgactcttatatatgtatggtgaagaaaggctcttggggcatattaagagctagctttgtattattttgtggggttgactgagtcatgttttagattgactagagtgttttagcattttctagctaacagtaacatcaaaatatgcgcaatataacgaaaggtcggtaaataaatactccataattaaaacgacaaaatttaatacaaatatattataaggggattctattcactctttatcagagatgtattgatgcatcatttacttatttcggtatcttagtttattttttttttctttcatatttatatatattatagctatttaaaatattctacaaaattttgagaaatttagaataatttataatattgaaaacaatgttcaaacagtttattttatacgcgtataaaataaaatagtcacgcgtgcaatacactgtttgaacgtagttttttgcatgttaaacttttctgaattttttaaaatcttacaagattgtcttaaataactataatttacatgaccatgaaaaaaaaattaattaaaaaattattttaaatactaaaacaattagagatgtatcggtgtaatttatagcattcatagcatatatttatgcattatttaattttcatttcactaatatgtgttgagtgtataattaaagtgtacattagctaaaaataaaaatcatcactattggtatcaaatcttttaggaaagtgttcgaaaatagatttgtgaatgcttagtctcaaacggacaatatcatactaatgcgttctaaaaaaaaatataagaatattgtattattcatattatttcttcctaagtaggacccaattcactatcatggtatgaaaaagaatttaagaatatgtattttttaaaaaaataaattatatgccctaattttgttagtattatattaagaatgtattttaaatagaagttgaaatctagtttaaagtttataatttttaagggtgatcctacatcacttctaattattttggtatctagaaaaacataatcttagtaatttaagatattttaaaaaatttaaaataatttacaatataaaaactaattttcaaattaatagtctattttacacacataaaataaaagagtcacctgtaccatagataatttaaactctgtcttgcatggcatgttaaatttttttaaatctctcaaaattttgtaggatgtcttaaataattataatgaacacgaccataaaaaagtcgactaaaaaacctctcgaatgccaaaataaataagtgtgcatcggtacactctttttagtttggtaaattttaaaattttctaatttttaatttatcactgtaaattgaaatatgttaaatagtgaccgaacactttgttttaaccaaatcacattgactttagatgagatccattattttaaaaaatgtaatattattgtgcattaatatttagtctacaatattctaaatcatatattaactcaaatacataattttgactcaaataacgagtgcaatgcatataccgatagggaaataaaattcaaagttgtatgtataaaatcatatatagatgtctattttaagttttattggttgaatgatgatgtgatttttttttgcaaactttaacacgttttgaaataatattcttagaaagtgtcattgttgcaaactggggatatatatgggaaaacacgtacgtagggagtgatcatataaatataatatatatatatatttcctaatatatgcataaaaattgcatgaatctaagatggtgaattgtttgtcattgtggggtatggagtatatattagtgtcttaaatctcaataacttggaagcaaagaatactactacactactatcttcttttataattagtttttctaagaaacaatacatttgattttgagccatgctatacataaatatatatatatatatatatattatattgctgcacaagttacttgagaattaataacatctagaagaaatatatagtgttagtttctttttttttaagaataaattgattaaattaaaatattagtttttcttttataaagttaccctattataaaaacaggaaaaaaaaattttaacaaagaaaaatgttagttaaagacattttaaatgaatctatgattggaaaaattattatattttgaaaagaaaatcaaatacaattctagcgagtcaactcccaaattaacactcaacaccagccaaatatatagacttaaatattatagcaaaataactaacactattcatattatatgttttggtttagtacaaatagggattcctctaccccaaacccattggagattaagcgggagaggagcgaggatggagggcatagatggagaatagggacggggttgaggtgtgcatttcccgctccgctcattacccacctaattttcatattcctaagtacaaatatatacctttttagggctatttataaaaatatgaagaaaaaaaaaagaaagttttgatatatatatatatatgacatgcaaatttaattgcaacaaatatgatatttaaaaaaaaaattaaaaatatggaataaattatcatagataagaatagcactataaaaaatttaaaaactcgtatataaattttacttaattaagtttaattaaactaatagtttcctgatgaagaaacaagtttttgaaaaaaaaaatcagtttcttgatgaagaaataatttcttgatgaaagatctttggtgagttttgctttgaccgatcgtcaatagatgggtaaaaatcttaaaaactataaattttacttatgtataatcaaaattagtttaatgatgaagaaacttagtttctttaacaattttttgttaaagaaactagtttcttatgaaaaaattagtttcttaatgaaaaatcaatttcttgatgaaaaaatttgttttttgatggaggatatttggtgatcaatttatccaaaaattaaatataagttttgaaaattaaatttacatatacatgcatggtataacaaatacaataaaaatttaaaaaaaaaaaaaacaaaaaaaaaaacattaaaaatagctaatcttaaatctatgatataatatatgtttataaatatttgcaatcataagaaatcaactgtctgaattaattatattagatttattcgaaaatatgttaaataactactataaatatatataaaaatatatatatcaccagagtaatatatagaacactataatttaatattaaatatattaaaataatttcagtttcttgattttatgtgtcaacaaataattggaaatgatatgataaacctacaagtataaagatatatggtactatatttttctttgccttcttctagatgattgattcagctattgcattggtgtcttttataattaataatttacttttatctaatcccttatctccaaattaattattaagtcccctaatctgcataaacatatagctagctaatgttctatatacacattttttttttcattcattataaaacttaaagtgaaatatcatgcatatatagtataagtagtttctacaaatataatatatatttgaaggtacgtaattgtaatcgaacgtaagtaattttaaatatataaataaatcctgaaaacaaagagacaaaatttatagataaaaaatactacgtacgtacagaaaatacattcattaattaattaatgatttaattcctacctagtaaaagtattatatatatatacaatgtatatagtgtacgtcaattaattaaggtcattgtcattaagtctaccactgttaaatgttaatatgttaggtactatattttccatcctaaatccaactcttttgtttttatgatgtaataatattttgaatatatatagccaagaacccattgtcaaatacagccccatgcagagaccttaattattataaataacaaattaaacaaatgggcagaattgtaatttcatggaagaagatggtcaaattattaaaaaaaataaaccagatgagatgagattagaaaatctttactttactactgcaattgggcaattaatgaaaatgatcgaaacccacttgaggaagatttatatatgtatatatatacatatatatactagacggcaacta

SEQ ID NO: 295423 - DNA, 4582 bp, Cannabis indica
cttccaaagtcatcttcatcaacagtctaaaaaacgtccttattttatagatgcaaaacaatagtacatactataaaaattttcaataaatatatatatatatatatatatatagagaatagaccattgtccaaaataataataagaaaaaaagtattgtagaagttcattaaatttgtacacaatttgtagagaaattttaaaaacactattggcggctagagttgtatctctttgggttagcgagactagtttagtggcacataatttagctaagtttgttctatgactatttggactgataattacctatattttctgaattatgtcctagatgtttaattttctatataccttttcctctaaaaataaataaataaataaataatagtatatttgggtcccttttttttttctttttttaaaaaataaacgtttatatagattgtaataaaaaaagttagacctcgtgatcgttaaataaatatttaccgggatactagatacttctagcaccccacaatggttctgacttatgagcatagtagcttcagaatcactttccatcatcacataagaattactgtacgtcaccgccatctctaaggccaaaagacaagctgctgcttccccttaaaaaggatcaaaaacttgaaatcgcttggttgcaatccaagtgagctctcccaagtgatttctagcaacaacagttgggcacatgtcgtcatggcctacttttacattgcaattcaccttgatctaatctctaagaggaggagaccaatcagagccgagaattgctgaaggatgaggaagtacatatagaaacatcataatctgcataatagtaggaaagcatatcagtgtaattctcaatgttaaataggttattgttatgaaccttatcattttgggtttgccaaaccgtatcaaccacaatagaggcataaaagaacacttcatagacatttaagcctcttgagttcaaattctaaataaaatttacccaaacccacatgcgcacacctgaacccgaaatagggaagataacccatcgggaggacctctagagaaggtaagcaagattacagtgaaagaacaaatgtcccatcaattcttcatggttactgtagattaggcaagcagtatcttcaatattcatatgttgtcccctgccctaatagggagggtattagaaagggtaccccaccacccaccacccaccataggatcatatgatgctcatgaatcttgctgccccataacttattccacaaagagggagcaacaaaaattgggggagcactctcaaaggcctgagaaaggtaggctaatttggaggagaaacgaccatggtcttcattactccagatccagcaatccctaccctggccagaaggtttccctcccttaacaatatcactcacagtcaatggatcaaatagggaataaagcttctggggatcccaatccccattgtcccctatcagttcagcaaccatctgaacatcagggattaggccgcaaaatgattttggataattgtcaaaatcgtgagtcaccaagggatcatcccaaattttggtatcttttccatcaataataactttacaggccccagacttagagataggtattgttttgacaatgcctttccaaaaccaagagtcaaagttatcgtaagaacaatttagaaaattcttatttagcttccaacaccttacaacactgactaattgcctgaaattaaatgcccaccccacttgggaactccaaacccccacgagattcagggagacatagtttatcccaaactttcaatagatgcctttgttccctcattcatcaccccaccagaaatcacggagcatcccatccattcttgaagcaaacttgttagtcatcttgctagactatattaaccctaaaaattaaatcggctgattctcaatattagtaaagattagtctcgagaaatgaaagaaattagctttaacagttggtcaaggaatcaacacatttaccccggggccactcaaccaaaccttattgtgagagccactcactcaagtagggttgatggtcactcgaccatgcatggtgaagagtcactcagccatgcatggtgaaaagccatggtcactcagccatgtgaagaccaaagtcactcagccaagcatgtctttaagtcaccaagccatgtgaggaagaaatgtcactcgatcatcagaagaccaagttttctcagcaaccatggattaaagttactcaaccatgtgaggaagaaacgtcactcgacatgcatgcaacggagaagtcactcggccatgcaatggagaagtcactactcggtcatgcattaaagaagtcactcaaccatgcttcttaacatgtcactcatccatgcttctcaatatttcactcaacatgcatgcaataagaagtcactcggccatgtattagagaagtcactcggtcatgcttctcaacatgtctctcagtcatgcttctcaatatgtcacttggcatgcatgcaatagagaagtcaatcagccatatattagagaagtcactaggccatgtttctcaatatgtcactccacatgcacatggaaatgtcactcgatcatgtacatagtaatgtcactcggccatgaccattcaagaggccactcgaccaagaatggcttgaggtcactcagccatcaccattcaagaggtcactcggccaagataatcttagagccactcggcctagcaaagaacatggccagtcagccaaaccctagaatgaaggccactcaggcagacacttggtgaagtatcactcgacatgcacattgtgaaagtcactcagcatgcagttagtgaaatgtcactcgccatgcatggagaaatatcactcgaccacgcatggtgaaatgtcacgactcgcgccatgagttacttgacatgctcttctcaacaacataactatacttagtaaaattttcctaagtattgtagaagaaggcaataggggtatgatcataaggacaatacgtgcatgtaatgtgagtacaaccacgtctcctgcaagttcagatggaaagaaggtacaagtggtggaggcaccacacctgtacgatctcacatctcgactaaggatgcacaatagccactacccctacaactcgagatgacctaacaccagacaaaggtacaaggtgcaagaccaccatctacaacttatagcttgcaaactatagatgtcaccatgtcacttgggaccaccaatgtagcctaggccattagagcctataaatacccctttcttagatgtgagaaggggttgaaaaatcattgcaacactcaactccaagaaatacaagcatttctcttcctccattgttgctctgaacatttctttaagtttttgaattttcatatttttgtcttcattctaagtcttgtctttgagtttcaattttctagccttaaattagttgatgagttttcactattaacagtttggcaccatctgtgggaacgaaaagctcatgtcacgtcgtgtccttacttaccactattgcaagacgtctagatgctctgactattttcagggcatcaagattcatcaagataacactcatttgatcacatctagaagagagccaccaacacccatggttgaataagttagccaaaatagccaagtaccttagacaagaggaaagggtaactgtcatgaagagaatctggaaaacatgcaccaagatggagtaattgcaaccatcacacctatcgatgtgaatagtttgcaaaggcaaaaagcatcaccaataaggacccctccaccaccgacatagcgagatcctagtaccccgtgacattgccccagaagagagaagcaagcgcaccatgtgagcttaaaatctcaaggtcaccactatgaagatgaaataaacgatctctactagaagaaccaaagcctagaaactacggcggttggcatgaaaaaattattaagcgacatactcaaaggcgaaacccaagcttcacataatctgcacaaaaaaccacaaacaagagcacgagatcccaacaacacgtggttgtggagggaactttgtgtcatcaataaatagcaccttaaaggatgagagcggaaatggcccatcatgagacaaggaccctataggtcatttaaggaattgtgagtctaacccccgtagtaagaccgcaatgatggaaacattccattatcctatgaagggacttcacccaaaaagtctcatgctagggggcaccgcgcctatgtcccccttttgagagcaaagaaaacaaaaggcgtcatccctcaattatggtgggaggccacaggatgggacgagaggaaaactactcacaagccccatgcaaaatgtaaggaaaactaaagttccactcacaaacccttaagaaaggattaacaaaagaatgaaggaactagaagtagagatgcaagatctatgtcaaaagatggctaccacatcaagtggaaatttgggggatgatgggttcgatgaagaatcccctttctcaagggaaattcaaattgaac

SEQ ID NO: 295424 - DNA, 2054 bp, Cannabis indica
aacaccacaacccacacaccattaaaccatgaccgaagctgttgacctatcaaagcttccacgagctgctcttcctctaataatcctgcttttcttcttcttcttcaacccttgatcttcttccattgaaacaatcatcatcttttttgaaatatcactatcattattattattcttattattgttattacttttataatctcttatagcaccaccttgaattagcaccctagtgatcccgctataaccgaacgactccgcgatttgtagcggagtaacgcccttattcgtccgagcttccacatccgcttcgcctttctttaccaccaactctatcacgtctgcgtggccagactccaccgcgcagtgtagcgcggtgtacccgtcttcatccttagcatccacatcaactcctttttcgagcagagctcgaacggcctccacccgacccttgaaacaggctcggtggagagccgtccaaccatgctggtcgcggccattgatggccgcgccatgctctataagtctcaacatagtccttacttccccttttcttgacgcaagactaaggctatctccgagcttaagagcatcaaaaagcttagcgtggccgttctctgccgccatatcgtaggccgtacggccaacgcggtttctaacatccttattcgcgcctttttgaagcaaaagctttactaaatactcatcaccaagcgccgctgcaacatgcaacggcgcatccccatcaaaagtatcgcgaacattcgggttagccccatttgcaagcaaaagtctcacacaatctcgccgctgctcagcaacagcgagatgtaaagctgtgttgccgtccttagtcagggcgtcaacatcagctcctttcaaaatcaaaagtcttaaaacatccatatggccgcctctagcggccaaatggataggacccgcagtcgaattcgccgacctattcgtgctcgctttcctagccaacaaaagctcaacaatcaacgcttccccggactccacggcagcctcgatcgggctatacccgagccggctcggagcctcaacatcgggatcaaactcaagaatgagctgaacaagatcagctcggctttgcgatatagccaagtgaagtaagctattcccctcattgtcaacagaatcagcggctctccaagaagaatcactcttttccaaaacatcacgaatctcatccatggagccgtgagccacgagccgagccagaacagccgagccaacaaacataaccttaataccactatcagtaaacacttgttttttcttagctgtaaaccaatcattcggaacggcgtcgtatgagtttgagtagtctttagcggttgcacccgggaccacaacgctgtgtaacagaaaagaatcattggaataaggaaacaaatctggaacgtcggatcccggattgagatgataaacgatctcgaccgttaatttctcgagaggtggaataatccctgattggggtttgatagagtaacgggttttgatgagtggttggaatctgaaggccacaggcatagtgtacataacattgtttaaggtgatttttccatgacatttttggccatgctctactcttatggttactagatttgagggttctaagcttatcaacctattcattgtgattttctttgttgggttttggattgaaataataatgaaagggttgaagatttgggtgatgagagtaatttatataaagaagaatttgaagccggctttgattgagagagtgacatgtggcgacgtagaaaacaaagctgacttgttctattcggtgttttgatacaattactaagaaaacagttgttaattaattaattaagcttatgcaaggtagtcactctcacttaatcattatttagtttaggttaattagaattttcctctttcaattttggtatgtaccaaattatacactctgaacttttaaggtcgttaaaaatgcctcttgaactactgaaattgttagatttaagcgtttttgtctaatttcattcaattttttaatttca

SEQ ID NO: 295425 - DNA, 2288 bp, Cannabis indica
ctaataggagttcatgtactttttctagaataatatagaatatcaaaaaaatattttttcactacaaagtcaaatgatggtatgacctacttgtaagcataatatgtttactccagaagcaccagcagcatcgattatcaactttaacttttgaaagatggctctcttttggtctaaaaatgaggcagtagtcggaagaactatagagttttgaataagaccaaccctaactactcgaggttctctcattaactctttatcagcatggaagcagaaagcctgaaagaaattacagataatcacagaatatcagtaccggcatggtaattaaaaattgtcaatagaaaagaaataaaaatctttgaataaatttacaatgaccaaagaacaaagtcaaaatagttttcagtaacctttaaaaatatcatctgcttcaaccaaagggtcccaataattgttcttgaatctagaaacatacttttagaagggatgatccaaaaaaaaaaacataattgtagatgatatccaaatacacttcaattttattgctggcaaagaaaaacttgagaaacacaaacactcactgcagagtttatctagtatcaactttccttaacacctttcccaatataaagctgtaaaggtttcccagaaaaaagtcaaaattactttcaaatcactattatgtttcaaacccagatggaactacattatgcaatacaatcaaaccttataaactcccctcaaaaacaccaaaataaggcactagtaccacttaaacaaaaggtgtaactggattgccataactcataagaatgagatgcacacctggagatcaaaattatgttctgaagagagagctttggcagattctgggagcacagcagtttcaagtgccttggcacagttgagtcccaaaagcaatcggctaacttcctgcaaaagtacattacatgaataaacaaccttcactaccacgaagacatcgaaaaataactgttacttgcagaagtgttttcgaatggaatgggggactaaattaagcacacattttgctttaaaatgacagtcatcattacatgtgtgtatttatattgatgagtaaagtttataagctgcaactattgttgtaaaactcaacataagctaataaacctctattaaatcatttgcaaactacagaaccaatcaactcaataaaaagatagctagaccatccccgattgtgctatatttgacacaaaaaaatgactttgtgatatatttacatcaacttttataattgtggtcccatacacaattacaaaacttaatgcaaaatttaatatttttactaatataaaaagtaataactttatcattaattttatgatgtaaaacaatcaaaaaagaatataactagtcaatcatttaaggttaaaagctaaatatactaataaaataacaaaaataacaaatgttgtgttatttccagtacattctttgctaggtgagctctttaaatcactaatttacatcttagatgctaccattcacaataattatgtctaaatcaaagagattgccctcagaagtatgcaaaagctgaaactcattttgttaattaacaacctaggctaaaacaaacacatccaattcagtggaaatttcaaagatattaattattacaagtagagaaaatatgcagattataatgagatatagattactgtcagtgtcactttaatcatccatgcacaggaaactcaaaatataaatcgccatacttttctccctctctataaatataactttgctacagtgaaaagttgaggaagaattacgcctcgttgactaatgtcaaaagaataaatcgaatcgagcacattaattgaggatccgaaattgaaattacaaaaaaaatagataaaatggaaaatgggagagatacctgaaatagatggggtttgagattggcagcaaggagatggtgaagtgagtcgtagccacaaattgatccgtcaatggaggttggttgttgaatttctccatttacagtttcagtgtcttcctttgatattttttccatttttggttgctctttttctctcttgctgaaaccactggatgaggagttggtgtatgatgatgatgattgattgatgaatcgattcagagagagagacgaccgaggttgatgataatgacgatattgtatttagttaaatttttatcttaatacttaaatcgtgtgataagtaccaaaaatgtttttgtctctaagtttatttttaatgtaagtttatttt

SEQ ID NO: 295426 - DNA, 1464 bp, Cannabis indica
gtaataaaaaaagacccatgggccaaactgaaataaatataaaaaaagaaaagaaagaaaaacttgacacggctagagtccttagctctttgtacaggtcagctatatcctcagtgggcggggtgttcgtgctttggtcggttggagcattggggttgggtacctcggattcttacttgtcttttggggccgcacaaaaactaagatatgcctccttgttttcattgaggtaatcaaagtttgcatctgggttggccttctagaattcataaaatacctcagggcgactgtctttaggttatccacctccttctaaagtgcctcccgctctacctgcctaatttgacactctcttacagatcttgtttatcctttgttaagttagaaagaagagtctagagaacttccctttcatctttcaaggcattaacatctctggtcagagcctcaacgtccgcttcaagctcaacagtggatagcatgtcctgaatctccttctccagttcctctactcgcttgttggtggcaaaaaggtgtttattcacctcacccaacttcgcgctcttatcctaggcctccttctatgctgcctccacctccctctacaagttggtggtggttgttatatttttcaaggccatagactttgcttaggaataggtgtaggccaacttcaagttgagctatacaaagaaaagtcaaaacctgcacgggtaaaagaatgagataaaaaccaaaggaaaagtacttacttgggtatccaccttcagtagcccacccataagcagctccacggaaatatcctcctctggccagctgatcgtttaccttggagagcaaacggtcctggttgaattggagcatttccttacccttcttactttcagggtttagcatgacaaaagtacttgaagatttgggcaatcctgcttccccttttggcacccttggatggggtagccgtcacctgagactttgatttcttcctcgctggcaggtcaacctccgacaccgcctcctcaaaaaactcaattggagacttagtcaaactcttctctttgggtggaacttcatcgaccgttggtcgtttggctggagccatcgcctgacctcttcttcaaagcttgtagcaccttctgagacacagccgcacgtgaataaaatgagaaggtcaaaataagtacgatataaggaaatgcaaatgaaatttgaatacaagttaaagtactttttcaaccaagatggcttttccctttccaaccacaggggcggacggtcaaacaacccttttagtttcatgcctgatcttgatggatcgctcaataggtactctaatttttggaggggctatctattggaaattattttaccaggctcttagatttactcacaagtatgttgattaacaccctaaatatcaacttctaaaacgattataaaactaaacacatataaagtatgaga

SEQ ID NO: 295427 - DNA, 5458 bp, Cannabis indica
catataggccgagaagacacctattggatttgaagatggccaatctttcaagaatatctaagaatttcgcttggtggagttagcaattgttaaagggacaaatttattgatatgttttggaatttaatttataattatgattatgtgaagttagaatataacttttataaagaatttattatttttaataattgtgtgaaatttagttatatatataaaagatgttatataaattcatacgaatgaatgaatttgattttaaaaaaaaaaaaaaaaaatacatacaagcaaaacaaaagagttggacgaaaatttgaaaagttaaatagcagtggggtgtgatataaaggtatatttatcaataaaaaaatctagttatttttataatagttaagtatatatattgataaaattattaaatgttaccattttttaaaaaaaagaaagagaagaattatgtacctgccaaataaaattgtcaaactaattaatatatatacaatatttattaaaaaaatataaatatattgaataataaataaacattagcacaagataggaaacgaaaaatatgatatatatatatatagttaatttaatatttagtataaatattgttattgaattaagagagagaatatagcataaattgtagggtgaaaattaactaccttatttactttgaaagatattgatattgaattaaaataagacttttacaattttgagagagagaatatagcattaattatgggatgaaaattaactattgacttaaccttagttaaggttaaaaaaattaataaaatacttaataaatgaaaaaacaagtggcttaaatttattggtgggacagggtggagatatggtttttggcacagaagatttttttccaagaaaaagatagtgtaaaaacaaaattagactaaccattacttccacatttctactgcgagaagatagtagttatggatgtaatataaattcaaaaatcatttaattttaataattaaatcaatatgtaattgaaatctataaaagaaaaagttattatgtacttattcaatgtttaaataaagttattattacagagtttggttatgatgatgtttgaaatttatttatttattttgaagaaaatatctcaactaccacactaagagtaatgaaactcaaaaaaggagagagcgagaatacaatattgagtagtatcaactataaataagttctgaatacaacttggagaatctgactaccaaatagtgttagatgccgtaaaagcgactctaactaaggtgtggagaacaacatttaaatctataggacaatataaaaaaacaaacatctttaaaaccatcacaaagattaccaatttcatctaagacaaaacccaaaaaggaaacaacagaaactttgttcactactttttgcacaatattcaagcgattcattccaaagatgatattattatacccaaagcaatgacattggaccatgatattccaaaacaccaaagcttctgccacttcatgagcaagacaaccttgtaggtgccaaacaacagaagcaagaacagtacccaaaatgatcacacaccaccataccaaggccactacaagcaccagttttatcaatagcagcatcactttcaaccttgatagaacccgccaacggaggagaccatatcgaaacaacctcattagaaggcaaagaggttgcttgtcccaaggagagaggaagcttagcccgagcccgagtatgttggaagttccaaaaaaaaaatcatgagcccaattcaccaccaagtcaggaagtaaattaatatttttatgcactattttatttctcttgaaatagaattttagtacgatcgaccctaagaatttctcatcgttcctttaatagtccaaatgctctctctactacatttcgagcaaaagaatgtttcatactgaaaaattcaacaggagtattaggtgggacattccagtcgtttaaatgatgtcgatgtcctctatacagtactaagaagcattcaccattagaatatccaacatcacataagtagtaatatcttgtaaattgattgataaaattgtgaacctttgatattagacatggaagaaaaagtatactttgtgaaactttcagcccatttggcttagatatagcatctcgcaacactctagagtctgcagctgatccttcccattcgagtaagacataaataaattacatatcttttgagattacacctaatacattagtagcaatttcacattttctagtccgatacctaagcttatctacaaccaacacattgactttaatgtgtgccatctagtgctcccaaacaattttcgaaccatttccacctctcatcagttgaactattaagaatcgattcaggcttttttaataatagtccatgaagacacaacaaagcattcaaaacaacattaaattgtctactcactgtttcacacgaacatgcaaattttcgtctcacaattctattcttaatgtcatgagatataatatgtaaaaatatagcaatcatttcttcaacatccataatttttgttcctttcaaacctttaatagttctaagttggtgacacaatatacgaaatattctccaatccatatgagtattttctatacaagctaaatctagcatgtatcattctaaaaatatctagttgacgtaattagtgcctatagaaataactttgaagaaacatatttgtacttatacgtctcttacaacaaataataattacttagagtaagaaaaaaagtgtcaccttatttaacatctccacatatattaaaataaaattgctacaaattctttgcaaccaacaaaaataataactcacttatatgcacatagaatttaaaaaacattaaaaaaaaattagggaccaaaaccatagatttgtgacatttgtctatttcaatattgcaatttcaacccatttggcctaaattcagatctggtaagggctttggagttacattatcatatttagtagataaataaagccttgcataatagtccaaaccatgtacgatgatgaatcaaccaacattattattattattaataatgcttgttaagacaggtgcacttattggaattttggttaaggttagctagctccatgaatgtactgataaaatcaattaacccaacctgattagaactatagaatcaattaacccaattaataagtgctcttgtcttaagaagcattattattaataataatgttgattcatcagtacatgggttggagactattatatatttactaaatatgataaagcaactccaaagctcttatctgatctgaattaaaccaattcaattccaattcttttttacagaaatgtaagaagagacaaagtaaattgttacaagaaaaacaaacattggcagcattgctttgggagatgtggaccatatagataaaagagggtgaaagaaaaatgaaaaaactgtagaaaggaaggattaggtggagtggtggaccattccagatgtcacacacaactcactctgttttaagtagtaaataatataatttatgaactagctatattaatttcttgtatttgatttagaggattctcgtattggtgtccgctattattattacttttttatgacaatcaaagcagtgaatcaaattattacaatctaaaacaacggaaagtgaaaaatgtaagcaacccagttacaaatctttataaatttaagccaatgaaacaaataaaaccagaaaaatcatatctcatacaacaaaacaaatcatttgagctataaacaaaaacagaacaaaataagtccaattgaagttaacttttatatatggcaatcaaaacaatgaatcaaaatagtacaatctaaacataatagaaaatggaaaatgtaaacaatccagttaaaaatcatccataaactgtagccaaatatatacaaatgagaccaaaaaaatcatatctaatacaaaaacttttcaattcatgatacagaaatgagttattatgatacagaaatggcagaaaaatttatgcatgagttgaaaagttgggttctaaacccaaatgtctcccactctttaattctctctcaggttataattatcattttctttcaaaaaaattatatagaagcctctcgtacatagagcatggaccaggcacacaagtcttgtgggcagagcagggctattggctgataagtcattttctttgcatgccttttgaactgttaaactctacccaaagaaagcatacacatacacacatatatatgtgctctaacatgatcattcatctaaaccaactcagcaatttgcttcagattgtgaatttattgtgattatatgtttgcaactacatacttgtcacctatatatataaataacttttatttataccacaaaagttgaagtcatatttatatattataaacttctttactaagaagcaaaggaacaatctaccatttagaatttgtagctatatttaactaaaaataacatcataatttcctcgtttaaaggtgacaagtatgtaccatcatattttcctcatttctacctactatggatgacgttcagacatgtatcctctcaaagagttggaaaataatatggttttcagttccaaaactctttttctccgatactagtactactactcccaaattttgaaagttccataattatgttgataattgcatggaacaccacaagagaggtctgtattttattacagattcagcccaagcttaatgacccacccataaatctctagaacaaatcgacagagctttcaattttagggaagcagagcaaagcttgagaacataactactaaccattaaataaattgaaagagaatgaacaaaagagagagatgaaggagattagaaagaaaatcaaccacatctgatgcagattcatgaaaatgatagatactttgatttcgcatatatatatttaaagagagagatacctgattcaaggaagaagataaagcgaacaacagctaaggcttcaccaagtgacgaagagagagcgtttcaaagtaagggccgagttttccagtcaaataaaactcaacgttttgaagatgttgatattcccttaatgtaaaggtaagggtacagtaaaatgacaactccatccaaaaaaattaaaaatacatactaaacataggttatattttgtattttcattcccgagtaaggaaacctgcataccaaacagctctggaagtgtctgatccactattagatcacctcaaatatggttagactaagataagttttctcaatttacaggcgtatagatcaagcaagctacaataaaaaaaagaacacaagaaaaaagagaggcaatgagaacattataagagttaatcctaataagatatactgagactt

SEQ ID NO: 295428 - DNA, 1528 bp, Cannabis indica
gattgttgaatacttttgtctaattttagtaaaaaaaatctaatatgaataaaagtttgggagaaataattttaatacatatacgaaattcaagagacataatttggtaaatatcaaagtctagagatcatcatttagtacatttaaaagtttaagggaaaaaaaatcccaattagaccaaaaaaaaaaaaattacataaaacactatttttttgtaaaaaatttatatttttacgttcaaatatatttttttatataaattacaattttttataaaactaacacgaaaacaacaataaaattacataaaaaaaaataacatccaaacaaaaaaaaaaaaaaaccttaataaataacaaaaaaaaacttacaaaaatttaaaattaagtacaatattatttttataatttttgtgtatttgtaaaataatcttaaaaaaaactatttataaaaaataaaataaataaataactaaatggaggatcacacgtgtgaaaaagcccatcctcatacgtatttcgatgttgttaatagccaatcgtaatcgattgtgttttctttctttgtattatttattcttacctatccagcctgtgaaaaagtagccattttttcacttccttactctccaatcctataaatacacattcccacacacctccatttctcacaaacagactcttcttcttccttttctgatcacaccctttactgaaatatggcgatccatcatagatcttctcttgtttcgtgttttgccatcgttttcttggtgggttttgcctgggcttcggatatgtctatcatcgactataatgctaaacacggcatggaggtcccttctgaaggcaggactgagaaggagatgagagccatgtacgaatcatggctcgttcatcatggtaaggcgtacaacgctctgggagagaaggagaagcgatttgagatctttaaagataatttgaaatttgttgatgaacacaataaggagagcaggacctacaaacttgggatgaacaagtttgctgatctcaccaacgaggagtacagaaccatctatttgggtaccaagatggatcggaagggaaagctatctcagtcaaagaagagtgatcggtacaccttccgagttggcgattcgttgcccgattccgtcgattggagggctaaaggggctgttgtacctgttaaagatcagggtcaatgcggtgagtttttttttctttcaaattttaaccgaagttgactttttttagcctccgattatagttttcgatggatcattggattgttaggttttccttttttataatcatggatggaattcgtcacctgtttttgagattttcaccctaaagaaattgataagctttcacttttgattgtctgttagttgttttcctggaaaattgggaaatacccttttgattatgttagacttgctagattttaagggattttttttctaaaaaaaattatatatattggagttgattattagtctttactgtaattggttaattttgtc

SEQ ID NO: 295429 - DNA, 1880 bp, Cannabis indica
agttaggaggaattaataagctaagaaatttagttagtaaatttcaaatcttcttattaggaggttggttacataagcccatggtccccacattttcttggataatatcatcttgtagactcaattaattaatttaataactcaattagaatttaaaaattgactatgtcaaattacaagaatttcactatgttgggtcaaattgaggaaataagacacatataggcttaattgttaattataaaaagttagtatcaaattaataaattgttaaatttaaagtttcaatttaaaattattaaaaattcaatatggatttaaatataatatataaaagattttaattattaattattatttaattaattaaaattataataatattaatatataaatttgaattgtgaactcaagttcgtataaacttatatatatatataattatatttatataaataataataataagaagaagaagaataagaataacaatctttattccaattgtagaagttaagtaattttaactcttttttcctttattccaactgtttttcgtcaacttttttaaatttcctttgaagataattgttccctccattaggttctcctcaattccctaccgtcggcaactctacctttgacacaatgttaccactatctccatccccatgaacgttgttatgaataatatcaattccacacttttcctcactaatggggaaagctctgtccttacactcactgacgatgttacgctgcattcaacggaaattcaacctatttttggactcttggcaagggtcctcaccaaccagcatgtcgacaaatcaggattcatcgattaaatgtctggccattggtaggagcgataccctgtcataatcaccgagtataaaggacaggatggcttattccatattctctttggttgtgaaggtgataaatgatgtgtactcagcaaagaactatggcactttcaaaatcacttaatcatacttttggcgccagatactctgcaaaatgtcacaaaggaaaatcttatatatactctattttgggtgcaaatataaggactccccttcttacgaaaatcaaagtttcttgctgaagcactcagaaatataattggcaaatttctagaagttcatgatgactctaccaatgaaggctggggtctatttctacagatccgagttaaactccttgttacaaagccacttatgcgaggccaaatgatcaaactactaaaaataaaggacaaattttggatcgactttcgatatgagcaacttcctgaattttgtttcaaatgtggttgtttaggccatccatttgaacgatctgttgctttcatggaacgaatggacactgaaaacgatgatgacttccaatatggaccatggatgaaaggttccaaactcccaacaaatggctatgacagatatcgcacagacttctctaaagccaatgctaggccactgctcactagattggctagaaatttaattacttcctcactgcccaaccttcattcctgtggccctcctcaaccgagaattctctacaatggggagtcttcaaactcacttcctcaacataatctacaccacaatcaagccaacatatacacccctgaccacaccatacgatcgcctaataacactagtctccaatcatctttaacgggactacaccttgctgctgaagttacccatccacacaccggacaaaacactatccatacacccctcaatcaaccctcttcatatccacacacatcatcttctctcttggcttcgaccctgccttccatagttgcgataaattatccacacaccagtcgcccaattgaccaaacacctgttgggttttatgcc

SEQ ID NO: 295430 - DNA, 2632 bp, Cannabis indica
tgttgaacaagcaatcgtaaatgtctgaatgcgttcgggttccccaatccccgagcattccagcttaagattttcatggcggttggcggggttgcgtagtaacctccgctgttgaagtaaaagtggctgttgaatctgcattagcagaaacatcagtcacaaagtcatcacctcctgaagcagctgatgacgaaccattcagacctcgacttcgtttaagcattttccttacagacatagtttcacttggtctcttaggaatgcaatttggtgagatgttttcttagtagtataggctggtgtggaggggacatgagagtggagttggtaaatgactggagaagatgaatgaatgttgtgtgtatgtgggtaggtagcaaagacatttttagaactaggatgtgggaaagagttgtagtctagatcatgcgtatatatattggagaggtctgttgtggtatgggtggggttggtagtgggagtgacgtcactaagatgggttgtgtgagtgtagagaaaggggttgtttggttgattgagtgagtggttggagtagagatcgatggagtagtagaggcaatggatgaaagagtagtaacagaagtgtgagggtaggaagggggctgatttggagatggatagaatgtatttgtgctggtgtgagggggtcatttgttgtagtaagatggagccccataagagatggatttaatatggtgtttgttggtgagtacccggtatggtcatggtgtttgtttgtgaaaaaggtgaggttgaagactccccatgaagaagaactcttggctgaggttggccacgggtttgagttgtaggcagtgaggatgaaattgattttctagccaatctagtgagaagtggccaagcattggcttttgaaaaatctgtacgatatctgtcatagccactagttggaagctttgaacctttcatccatggcccatattgaaaatcatcatcattattgctgtccattcgttccatgaacgccacacttcgttcaaaaaggatggccaagacagccacattcaaagcaaaattcaggcaaccgctcatatcgaaagtcaatccaaaattcatcctttatttttagaagtttaatcattaggcccctcatgagtggtttagttactagaagtttgactcggatccgcaaaaaaggaccccagccctcattagtagaatcatcatgaacttccaaaaattctccaatgatattccctagcgcttcagcaaggaatcttgatttacttaggaaagttaaacgatatatttgcacccaaaaaggagtataaaccatattatcctttgtgacattttgcagagcatctggtgccaaaaggataattaagtagttttgaaagtgccatggttctttgctgagtactcgtcgtatatcaccctcgcatccaaagcaaatgtggaataaaccttcttcatttttgtattcagtgattgtgacagggtactgtccctgccagtgccccgaaatttgattgatgaagcccgatttgtagacattctgggtggttaggacccttgctacaagtccaaaagcaggctgggatgttgtcggatgcagagcagcaacgtcaggcagagtgagaattgaactttcctcatcagtgagggaaagagcggaatggatattttccataacagagtgcatagagatggggaaggtggtgggattgtggcagagagaagagatgtcggcagtggagaagaagaacaggaggaggcgggaacaattttcttcaaaggatatttaaaaagtgggaaaacagttagggaaaagagaaaaaacagttaaaaatacataacttccacagacccaaaaacgggcacttttagatatcctcaaataacttttaaatatgaaataatacaatattttttttagtaacttatgaaattagttagtttgttatgttttttttttaacaaaagaaatttttttatttaaaaacagagcaacaatacaacctaaggagtgcaacactcccagacccctaccaactcttaataacactagttatatacaattcatctttttcataataaactttttgtgaagtggagaattaagtttattatgtttcgataaaatttaaagttagattttttttctttctttttgatatgtatgggtgggatgtcgtaagctacaataaatttactaattatttttatttccttacttcagtttaacagtaaatacacgtcaatctcacaagggctattatcaatttattatttaaaaattagtgacaagaattagaaaaatggagttttgattatgagaataaaataacataaataaaaacaaaaatgaattaaatgtgatatcacgatatgagataaatagttatatgttatctccaccctcaacaatcattcttaacttctattaatgaatgtaattttagttttccaatcaaactatttattccgcagataaagctaaaacagttaaattatcccaatatccctattacatgtaatcaaggcgaaacactcaataattaactcttttacctaagtagtaaatttacgaaacatgcaatttatttaacttagataaaactttaaaatttatggagatagactaatc

SEQ ID NO: 295431 - DNA, 3734 bp, Cannabis indica
atgcttttgaaagtattaagaagtactattacacccaccagtgttgagagctccaatcttaggaaggccattgatattatatatcaattcacttgatcgctccttgggagcgaggttggcgcaaaacaatgagaagggaaaagaagttgatctttactacctaagtagaactttagtaggggcagaataaaactaacctccaaccgagaaagtgtgtttggctttaatttttgctgccaaaaaattacggcattatttgctctcacaccctgtgactttagtgtcaaaagttgatcccttaagatatactctatcaaagcctatgttatctagaagacttaccaaaaatggtccatgattttgtttgaattttagatcaactttcaatcgcaaaaagcaataaaggacaagtattggccaaatttttaggaatacacccaattccaaatgacatggagttacgagaagatcttccaaacaaagaagttttcatggtgcacacttcatcatggcaatcatgttttgatggggcagcaagaaatagttgggcagttgtctttgtgacacagtcaggaggcctaataccttactctttctatattcaaactatatgcaccaataatgtagcaaaatacaaagtgttagttatcagcctcaaagttgcactcgaatagaaaatacaatcattggaagtgtttggcgattctctcttattcattaaacaaatgagtggtgaatttgttatcaagcatgagaatttagtccttaccatgaaaaggctaaatatttgcttggtcaaccggattgggatcaagcctcacgtagtaagggactatatatttattcctcctaactagtttgcctacatacccagactgggtttgataattatgttgacaaaggatttgacagtgaggcattgcctgtagagccaatcatttcaccagaatcaattgtctcagcaaagctcggtgttccatcattagttgctccctcagattttcttattcctctaccatagctagtattgagaatgtcatcttcagtaatcaccagctttgacttgaatgagtatacaaaaaggtttgtgattggtagcatgatagacgttcttcatttattatcttctcctttgatggcaaaatatatttcgaaacaccgtgctaacgcgaacatgaaacttggcatattgagtgccatttgtaagaattataaatgtggctcaacagaggttgcatggtttactagctctgtcaataatttgttactataaaagaaaagtttgtcgcttctacaaaaatggttgagagtgcccttaatcttaatgaatcccgtctcatgaacattcttcgtcgtgacaaggataatttgacaactatgaattgtttgtctatatctgtcatcaacaagacaaaggattttgaagattttaagacagatgaagcagacagcagaactggccatacaacaacgacgagctaagttctaagatgataaagcatcatttgaagtagatctttctagtcttaatgattctttgaaggaccatcaacatcttgctaaggagataggtcaatcaaaggaccaagggtggtgtagaaaactccataaacctgagagagtgaaaacaatcctcaagattcaagaagaagaatttagaaaaggctcagtgctttgactttatttccccagatggactgaagatctcatcattttgtttctaaaactttttatttatttattggccttgaggaataatagtattttgtcatttagacaatttagaacattgactcctttgttaggcgaaataaatatagtcccttcttctgacgctttccatcaacaatttcattaacaaactgatgagttgagaagatattagtgagcttatcaccatacccatttcttccaccagtagttttattttccttatcattatagttactacacaaaaaatgcccaaatatcaattcatgaagataaacatgttcctcctgatgaatctccacagcaacaccatcaccattattatacacactaatacacttcatctcaacgtcgatcacaacctcttggtgaatttcctgatctgaccgatcccgaccaagatccaaccgaactcatcctagatctgtccaacacctacccagatctgaccgacctctttttctagattcgaccactgcctaaaaaaggaaagaagatgttgaagaagaaaaagcaaaagaagaagaaatgtaaaataatttaggagagagatttttttgataatctagtgcacatattattttttacattattttggggagatttatatttgataatctagtgaagaagaagatcaagaagttaccaaaataatttaggggagagatttaaaaaaatatatatttttaataattttaattattttagttattttttttatttttttttatttttggtattttctttggattttattttttttaatgatatttaaatatgcataattatatggaccaatatgaacgctacacatgtatatttgtttacatgtgggataatctatgctagcacataatcactctcatagacgacacatttgatttgccaaaaaaagtagaggttgacaggttttcccataaaaatttaagattggagggttaattgtaagtgaattgagagttcgtgggtttagccacaaattattcttttaaaataatcctaaggaagtttatatcaataaaattatgtgatatatattggcattattggtagaggcttccaaattaaatagagcatgcaaaatggattttaatatcagatttatttctcttatcatgaagtgtctaactacaaaaaccttttcctttctcattaatggtattatttctagacaagttactccgcagaggggtcttcgtcaaggaaatctacttttctcatatttgttccttatctattctgaggatctctttagacttttgcaatatgaggaaagaattggaaggcttaaagacttgctatctctcgcagagccccttctatttcccatcttttcttcgcatgtgataaccttcttttttgtcaagtagatgatcgttcatatggggccatcaagcgtgctttagatatctaccatcgagcttctcgccaagagcttaactcggataattcggtcatgtcattttaaccaaatacctcaaatgctgccaaaaattctttccaacagatccttgggatcccaattagtaagtgtcatgagaaatatttgagattacctgtttactctgagagaaataaaaagcaactttttggagatataaaagaaaaaatatgaaagttaatggatgcttggaatgataaactttttctataggaggaaaagaagttgtaatgccctaatctatagggacgctacgtgtgtgattttataaactagtttaatactagtagaataattaattattaaaaatcgtgataatattgaaaaattgactaaaataaaatactaaaaacagacgttataatggcataaaaagtgtattccgggaatctttgttataaaaagttttgctaaaggaattataaaacaaccatttaaatacaaaatcaaaaaacacagcagatacaaccagcccaaaataggtcggtgaggtcaatatttacattgttggagaagactatcacctcatagttgacctagcttttctttgcctttacctgcaccacatagcacctgtgagtca

SEQ ID NO: 295432 - DNA, 4144 bp, Cannabis indica
ttttttttttaaaacttataaaaacactagaattttgtttaatttttacaaaaatactgtcacacagaattttttttaaaaatactgtatttttataaaagaacaatagaactcaaaacaaacagcaaaaaataatagtggaacaactaataaacaatagtaaaaacttaacatagtacacagtataaaacttacacagtatttttgaaaaaaaattcgtctcacgatataaaattaaaaaaattgaaaatttcagtatatagtgtaattatctttattttgggtgctagagttgagcaaaatagctaacatataagaatacttatcaaacatgtgaatctgataccatcaaagaaagacatcgaatgggaatgggaagacctcatcttaaattcacttctttaatgaaacaagaaaggtagtcatcatcatcacccttccacaaagaaatcattgagagtctttgtaagaagggattacacagaaaatgcaaacaaagatgttcaccatcttcatcttgcttctaaaacatacttttctcttgtaaatattcaatctctcattattcagcaaaagaaaagaagaaatacctaaacagtcattgaagcatacaattactacgattcaaccctctaatctttctagagataatttgattaagaaacatgtgcatgttgagtctgctttatggccattattgagatgaacataaaagattatgcacacttgttttttacatgttcatactcttggaggattatgcaaagaataggaagttggcttgggagttatcttagtatatgaatgaaccgtaatttgtgcatatttgaaaagaaatgtttaaatccttcttgtatagatgactttgttaaagaaaatttaaaagttagagtgaatcttgtaaatgagaggaagttaaatcatgatgataaacatgttgtcaagcttctaaaagttttgtaaatgttgagttgagttagagggtcttttcccttgttagttgtaatataagcctttttgattgatgaaatattcttttcttcatcaaaataataataaggaatacttgtggtataaatatcacatgttttcaattttttatatttataccatttttttcgatgaattaaataccaaaggttacatatttgttacttatgttactaccattttgctaaatgcttacagattcattaatattaacacgtgtcatcatatgattagaaccaaaaatgtaatgttaataaatccaattaacacttaacatataattgaaaatatatgatatttacactgcaaatatcccaaataataataattttctcaaattgttcttatcactagagaagaagaaaactagccattgattgatttaaaacaaaacaattacttcaaacaaaattttcagcaaatgtgcagaattatttacttaaactaataagaacataaacgcttgggcctgtgagtttgatggccttccaattccatggattcaaaagtgaggtccgtctagtgggattgttttcaatttgatttgcctaattgggttttgattatatatctagagctgttcaatgaaaaaagaaaaaacaaaccccaatatctcagataaattcttttacttattgggactattttatatgtattcatttcagatcctgacatacatatctatgctagaaactcaaagactttgttatgaaagtaatattattatgacaataatgtatataagctaaacttaattaacaatcacacttaacttaatcataagcactaaactaggatactagcatagcaacaacattcaaatattaacaactacataaattgtatgtacccaactaacaatccaacactctcaatcaaacaaaacaattcataccccaaaacgaagaacaaagaaaccacaaacactttagaaaaaacaagacataattagattgatctgaataaacttttacttataagcataacctcatccccaaattacaccccagaaaccccaatcaacagttcaaaacaaaataagaagaagaaaagaaaatcaaaatttccccacactttagcacagtcgagaacaaaaagtaattaagaagaaagaggtgaagccaaggggcataggtttagaatctcactacgaatactacttaaaacaaacacaaattcattaattgcttaagaaacgaaaaaacacactaattaattttcatttttagcttgcaaaaatattgtatttttccaaaaaaaaaaaagttatttcattagaaaatttaaaaaattaagaaattaattttaaaaaaattaaaaaatatgataaaaacaatttagagtaaccagttactttaataacagtaaccagttgcatcatactattttttgtcattatttttaatttttttgaattttttctataaaataactttttgaggaaaaagaaaacatatacacaagtcaatgtataaaaatttgtgtaatttttcacataaaataaaattaaaaaaaaaaaaaaaactattttaaactattttatgaggaatacattacagtactttgttgtcataatagcctgttttattttttctgccatatatagtgcaacatttaatgtatatgttagatgcattatgctttacttgaattggtgccccattaaagagcattggtcttttcaaaataatagtgcaaatttataatataaagctttccaaaattgcatatcttccacttccaccgaaaaaacatattaagatttcaacaaggatttcaggtttctaattcccacatattatagtgacgcactcaattgcattgtcttggtcattttgaggatccaaaccactaaagtatattttttttttcaataataattatttaatcaatcatagcacgacaaatgttggattaatttgtatattttattagaatttcttcaccattaaaaatattcaaactttaattctatgccacatatcttctttattgacatgataatgtgtatgatgctatgataatgacaattatgatgacaaggaccatgttgcaaaattagtgcatgattctcttctttggccttgtaagttataattggtgtaattttttaggtggtttaccaaaatttcaattctcctcattttgaagagtattactatttgatacttttaagtgattgatcttttaaagaatctaatatcatttcttgtagtatttagtaccttagtgtctcgtcttagcatctcacaatttttaattaagttcttggattttaatttcattgggggccaggtgtccatattcttcctcatttttttgacccaatgattattcaagttggtagtattaagcttatttgacttatacgatcaagtaaactacaagagtagtaagtttaagtaatatattatcatattatttgagttgccatgcttgaaaagatagaaaaaaagcaatgatttaaatataatatatatataggtatattggtatggacggccataatattatgtatggacacatttttttcaccttgaattttccttttttcccttcctagaattttcttgaatacgacaactctaataaatagtgtacaattgttcacacacgtgttagatggaccctagctatttcatgtttaattaattgtataccaatgatctttcatacacttagcagttattagttgaattttataaacaactgattggaaaattatgataagtgtgtgttggattaaatataatctacatgaagatataataattttatatgaattcgccagaaaggattgaatatatatatgtaccaccacgcctgaataaacttgtgattgcaaccaagttcgggtcgtgactattccggcgtggtggtgttgctggtttagggttaggggttatgggtttttaacagtaagaagaagaagaagacaaaaaagaaaaaaaattcaaattatttatttatttaaataataatttggaccaataatatttcgacatgtgataatttttaaaaaagtaaacgtaacgaacaaataaaaagcatgataccttgagaattattatcgttatttttcgaggttgaaaacttatgtgtatcaaactgaattttttgaggacttttgccattaattaaatatgatttcaca

SEQ ID NO: 295433 - DNA, 2199 bp, Cannabis indica
atagggaaaagggagagcacaagagctgtcaatgtattagtggctgacctgttgcctgaacaacaatttcgactcgagttttttaacaatagggcaatcgacatctaatctattagtgattccttaagcctaagttatctacattggaaaaagaggggagaaggttggggtaatcatgtttataaaggttgaggtcagtgcttggattggactctatcgtcatcgttcaaaatctttatttaggttaggtcgagtggacactcgaagagagagacgaagcaaagagtgtacttgagtttgaggtctatggaagcgatatgtctcatgagagattttatttggaacgccaatgaccaaggatgtcaattctagactaaataaaggcaagcagggggagagaggaaagtgaatgttgaagaactaaggagaaagaaaaagtagcacaaggaaaaaagacaaacaaatttatataaattttaaaaataaataaaacttaaactacgtaaaccaataaaaagttgtcgctacttacctgacacttaaataatcaagtacttatgaaagttaaaaaaattaacaaaatatacttttaccattaaaaacatttattaggtatttttctacaactaagagttgtatttaaatattacaaattacacaaaataaaaaatatactcttgcattgtgcttttttggggattattttattatatcaactttttgataggtctgtttatttagaggttagtattgcacgtgtaaaagtagcttgctattaatattctaagagctatatggcttgcgagaacttgttgaacacttaagaatttattaagttgcacacaaataaaaaataagaactcttttatttttacactttaaaacaatttttttttataattttatgaaattcaacatagaaacccctattgcaactaacataacaacctaaattgcgaccaaaatgcatataacaacccacatagaaactaccttaaaaacccaaaccgtaaattagaaagaaaaaaaattaaaaaaaaaaataatatattggataatttcccaaaaaaatataataaaatttttatctatcaaccattgattaagagagaaactttgtctattagaaccatataccttaacagaataaattaactagtatgctataacacttataatttaggataaatatgattgtatgatataggtgtataattacaagtgatactttttgactcattaaatcacaagtgtagctctttttggctcgtattttaaaaccaacaatacttttagctcacaacaactctttttgtctcaatatccctgaattacaaggatatactcgttagaatttatttcactcttaatacaaagttagaacttaggatgacgatgaatgtatggtaaggtgcatgaaattttatctcaaaactaattgatgagaaaaatagcgcttaaatcttatattggtatatctttccatttattaacaatgtaaaattctctaataataatcaataagagttgttatactgaaagtaaatatccaatatttactattaaagctccaagttgaaggaaagatatttaccatcaatccatttattttagttgagaacttggagaccatcgatgttatttggaagtaacgtagtgtgctgaagtacatattaacgtgctcccatagttggttctggctgcaaacatgttggatagtaatagccaaaagaaaacactagtgaccttttgagcaatctatgtcgtacaagtgatgaggattcagccatgatagagcaaacatgagaaatttatatcctcaccattaagaataaaggaacaaaatgattcaatgatcattattaggtagacatgattaagattaggggtgggcaacatgttagaattaatgttatatggactaatataatcataggtttaataccataaacacaattattaactatgtgcctaatatttgttcactaccataatgggatggttaataatcatatattatgttagaggcacatgagagcacccttaaaactataattggcccattaaattatagtatacaattattggaccactttagcccaaattagtaaataaccctttagggttaaaggggcatgagatgtatatatatatatcatatatgaagaagtggttttaaggtaggttaatggtaataag

SEQ ID NO: 295434 - DNA, 2373 bp, Cannabis indica
aataaatataaaattagaggtaaatttgattaattgatgaataaaaaagaacaatataaaaagggtatagagtgtaatttcctaatgttcaatttatcagagctcggatagtcggctagccgaagcaattatttcccgcgaaatatacctaaatgaaatttccggccatatcgccgtccagatgtttccatattccggcgaactctctcgtcaaatctgaaaccctgccccgcaatattctcattagaaacaatcttcgacgtgttcctcctcacattcggccatctttcgcggccgtaaacgagaacaatggtaccttgtcggccgtctcaaaagatcgagaaccagtgagcttgaaaaatcaaaagaaatggattcatttcgtgggagtcggaggctgtggaatgtccgctctcgccatgcttgccgtaaaacaggtaagtttgctaacttcaatacaaacttttcgcgccaaccaatctgagatcaagatgaatcaggaaagtacgttaagtttatgttgatcgtcgattattttttattttagggttatgaagttagtgggtcggatcttgtatggagtaggttcatggataaactacaggaagcaggagtgcgtttgcatatttgtcattcagtctcgaatttgcaaaggcacaatggttcaagattgcctagtgctgtagtcatttcaagtgcgattccccaaaacaatgtagagattttacatgcaaagtccactggagtacctgtgtgagtataaattatgggtttttactctttcagaagggaaaatgggttcaagctattttgttcattttcaaattatttaattattaaaaactgttaaaatttattcattaattactgacttggacgaagtaagttagaacttagtcaaggaatactttttctatcttgtcatgacagtgagctagagttgaaatcgatgtcatgttgttgaaatcgtttgtcctaatgagctagagttgtaaaaaattattattattgtactagttgaaagctgataagaatgcttgctttcaatgaatatagaccctttcatgactgaacaacgtgtacattgtgtatgattgtttcctgttctttgccgtgtttgcgatcttggaagagaatgttgagtttggtagctggatagattaaggtttatcttagcttcattattctttttcgcatggcagattttttgtttttgttttccccgtttcttaaatacaacattagtaatatatatgagttcttatttcagatacaagcgagattattggttgggaaatttgacacagcaccataagctcattgctgtaagtggtagccatggtaagaatatacaagcattttctaatgtgtctatgcattcacacgcacatgtttataggatgctacttgataattgcagggaagagtacaactacagctatgcttgcttatgttttaaatgcaatgggtgatgatcttactgctatagttggggcagatgtgccacaggtattttcgggaatggaaaaagaaagcatagtgtttcccttttctcattttctatatgtttgcatgtttgtctcctgtgatttcgcctttttgattggatttagtaaaagtgaagtctgtggatgctctaaagtctgaaacagaattacatctaaacagatcgtgtatgcagttcacaggaggaaatattatttcaggaagcagtgaaacatttgtactagaggtactgacttgatgatttacgagagatttctaagctatatgttttaagtatttaattatttagcagtgtgaccttgctcggagttttcaaaataatgcactttaggtttaaaagctggattggtttgcccaatgaaaaatgactgaaaaatgttaagtggaagcctggcagggtatgatgatgtatgaggccttatcatatactaaacattgcttcgatattgtcctcttatatccaaggtccttgtcatctggaagagaatgaggctttagtagtttaatctccatacttgaatcattctccaaaaaggctgcaaatattcttttgtgatgtatctttgattgttttatatgtgcacagattgtaaggatcgaagccttatgctcatgcattttcttgtttgctaggctgatgaatacgatgggtgcttcttgcaattatcacctcaaatagctgtcgtgacaaacctggagtgggagcacgttgatattttcccagatgaggtttggagtctttatgttctggtacaaaagattcttttactatggtgccgtttggtaatacttttgctttttaattttttaatcacaaaatgaaagtaaaatctttgtttttaaaaaaaatatttttaaaaaacaaaa

SEQ ID NO: 295435 - DNA, 2274 bp, Cannabis indica
aagttcgggggaaaaaattactaattaacctaaaattaatgatacagtttaacgtatcgttttaacaattaaaataataataaatataataatattattttcacaagaattattactaagtaccaaataattaattttatttggtcaataaaattttgatttgaaaataatgtaataatagtaataatgactaaagcaagagaaatttaatttgatatacatttttttaatttggaagtcacaatttcaaatcattgttggcttccattggaattgtgtgtgagtaatcttctcttcaccttttctcaatctaggtttgagaatgcttggctctgtgagcccatgtgtctccaagtggttcgtgatagttcagacctatgtgcggatgagcctatggttgaaaaaaattaaattttagggttaaaagttaagagtttggggccaggactatatgggtaacttcaagaaacagctagcaaattgtaagaaataaatcaagcgattgaagagactttgagatcccgattctattaatatgtgtaagaaggaagagaaacgattggtggaaatttataatcaaagagaggtttattggaggacatgttgtaaacagatatggctttgagaaggtgatcaaaataacaagtttttttttatgcaaaagctacttctagtgacagcataattcaattcaacaactttttgattcctcgggctgcttggtcaattgggaaactggtcttcgtgaggtaataactggttattttagtgaggtaatactggtcttccgcgagtagatggtattattccttctattacccctgatcaaaatattactttactttgtcgtattactaatgaagaggtggaaaaagtcttgtttcaagtgcattcagacaagttaccagggcctgatggttttgactccagatttttattagaagtgttttggagggggggtggattctgatgtagtggctctagtcaatttttttttttttttttgattcatctactttgcctactaatttgaattggactaatattgttctcattccaaagaagaataatcagcttaatatggccaccttagacctatatctctctgtaatgtcctttataataaggtggtctctaaagtttaaaagttgttctaattccctaggtaatctcaaattattcgagtgcgtttatttcaggccagttgatatcttacaacattatggtttcatttgaaattatgcattatctcaaacgaaagcgtaagggtaaggaaggcttcatggcactcaagtttgatttaagtaagacttgtgatcatattgagtagagttttcttagggcaatgatgttttgaatgggctttgccacgttttgtggacctcattattttcactgttaattcggttcagtattttgttgttcatagtggatggcctttggggcctattgttcttttacatgggctcatgcaaggtgatctactctcactttatttgtcttattgtgtgttgaaggcttcgcttctttgattcaccattttgaaaatgtcatgatctgaaggaattaaagtggctaatggcgcacatgtagtttctcatatgttgtttgcagacgatagttacatttattatcgtgctaataataaagatgcaaatcatattatgcgcttgctgagtatttttgaggaagctttaggtcaaaaggctaactttgcaaagttatttgtattttggggattgctcctggtgatgctaatacgtatttaggtttgtcttgcattatgggtaagaataaatctactattttaggattccttaaagagaagatgcaaaagaaaatttagagttgggagggtcattttttatccaaggtcgttaagattatctattgtcttactcgtaactcttgtttttagtttgactgtattatcattgagagcaatattccctctgctttgtagtcttttataatagttgatttagctgtttaataaaagtatccattttcattaaaaaaacaagaaaaaataaataaaagaaaatatatcaatagatgaaaactaaagtaattaacttcatcaactattcgctatattatgcctcattaatacaaattttactctcccacttcttttcctaaaatcattaaataattaatagattcgattttagtatttctttatgagtaatttgcggcaaaaatacttaagttttatcacgagtagcagataaatacctaagtcatatttttagcggtaaaaataccttccgt

SEQ ID NO: 295436 - DNA, 906 bp, Cannabis indica
aaaaaattgttattccttgacccaatccaagttagccaaacttaaaactagaaaggccaagaagtacacctaagctaacctttaacactctgcacaaatatttgagagaaagttgcactgaaaaaaataaatgacaatgactctcaagaacctaaaacctactcacaaataggacattaaattaaatttaaatggatattacaagttaacaacttaattctaattagcaaatggccattcacgcttgccaaagaataaacttatgtttaggcacattgagcctacaccaaaaaactttgggcacttgctcacgatgaagaacactatgagaaagcttactaaccttgaagttttcattactacctgctttgaaaacattatctagcaaaaacaatttcttatgattgactagcttcctctgataccaactgacatctactttcaaagaataagaccaataatcttgatcctttaaataaatattatgtacccatttgacctaaagaagatattgcttcatagaaaggtcccaaataaacttagctaaaacaaccttagtgatattgccaatatcacctagttcctttggtaaaaaaaccttctcccaatacgtaaaatacaatttactttgattgtcattagctatccaaagagattgacgacacaatttatcaacttcttttgccacactctgtggagtaaaagaaagtactcatccagaaaccccataagtataaaaggagttagttaggttctcgctacaaaaataaatgcggcgactagcccaaatatgtaaccttgttaggctcggagttcctccgagttcaaatccatttggggcttcgacgatactagacgagaggagatgaggtggtgtgtggttttcgatgagagagagagagagag

SEQ ID NO: 295437 - DNA, 1864 bp, Cannabis indica
aaaatcacatatgattaacaaaataacaattttcaatcggcggcgacacctcctctaatcaggatagctcattgtctaaccaaatggcatgatttgccaaactatgaattgcataatttttatcgcgagctacatggaacaaaattacactaaaaaatttagataataaagttataacatccttaaacagcacccccaactcattaaaaaataccattcctttgttaatagttgttaccagagacaacgaatttaaaaagacctctctaattgggattctgcacaaatgggcccaagtacgtcctaccaatagagccacaattttgacttgtaatactaaaatacatgaaaacgaataacaccaagaaacaccaaaataacaatacataagcataatcactcataaaccaaattaaaactaaaaataaaaaacacaacataggtaaacaaggcccaaccaaagtaacggattaaaattaaaacatagtttatctagccaaaggtgttaccctttcgctagtaacaaaccaacaaaactcaaaaaaaaaaaaaacaaacattttcttcaaaaagaaaaaatacaactcaaggcatcaaacaacataatctaatataatagcactcaagaactgaatcaccaaatggctaactaaactttctaaaaaataacacctgtcaacactcctaaaatcaaaatctaatactaatcaaacttaatgctagcaaaacaaaagaaaaataaaatgaaaacttgtataaaatcgaattaagattgccttaaagttaacccaatatctaacctttgagaggcttgcatcactacaaaaatcataggtatcagtgaggataaattttgtaagtgaagtgtacgtttttagttagtaatgactatcaatggcgacatttcgttagtaaaaagttattggaaatagttcgtcgaacgaaaagtattatcaataacaacattaaaagtcgttggacaaaaataaatattaataacgacaatgtcatcattgataatatttttttttaatattctgggaaatcaatgacaatattgttgtcattgattatattatcaatgacgacaatatcgtcatcgacagactcgtccttttaaaaaaataattctaaatctatttcgatttttttaaaaaaaattaaattatattaaatatttactttatataattaattaatatatgaattcatttaattaagagtaaaaacctaaccatttgttcatactaaatattaagagtcataaacattacaatatccttaaaaactgcttactaaaagcgtaaagtaagtgttcataaaatatcaataaacataaaactgatagttcataaaactaaaataaaaattctaaaagaaatttaaggtagtgtcgtcatcatcactggcatctctaggaacattcgtcatctgtgggtagtatggcgacatctgcgaactcgtgatcatctgagatgtctgctgctcatgttgtgtcggcatcatcttcgatgtatgttgtccttgttgtgttggcatcatctgtgatgtctgctaatattgatgcccttgcagtgttgacatcatctgaacagtttgcggcatctgtgacatttattgtgttagcatcatttgtggcatccgagattgtgacacctgagacgtgtgaggcgactgcgtcatcatattcatcattacttgtgaattgtttgacaattttgataaaaactgcaagaatgactggtacatctgactgtgaaactgtttagtggttaatggtgcagacgaaggaacgagaggttgtgtagcagttgctgaaacaaaataagagtctgttgcggctgctgatgctgaaaatgttgga

SEQ ID NO: 295438 - DNA, 1956 bp, Cannabis indica
cttctttctttctctcatagttctacatcacacaaactacaacagaaaaagaattcacaatcgcaacagaaacacaagattgttagcaatccttctgctaataaaaaacaaaacagaacaagcttttcacaataacaacagagcaacgctaaatgacaccttctacataaaacaagctcaattgttaatattaagtacttcacctcgtcccctggggcacaaactgcaagcactacttgtgtaatactttgcttggctccattactaactagaatctgatcaggtgtgtaagaaattccattttcctctgaaaaagggacaacagttagaacctcaatctcgcagcacatacgcaatagtaaaaatattgaacatttatctccacaattgcagttgctaacctttaagcttatggcatattgcttctcgaacttctaaagttccagcattcggagtatacctcgtgtgcccttcacgaattgcatttatcccagcctaattttgcaatttccagtaaggaaaaatagatcacgaattggcatcacttaaagaaaagaactattatttttcacaaatagaaaatgctacaatacttgaagacaggggatagataaggtacctctgctattacagttggagtatcaaagtcgggttctccagctgctaatttaataacaggaacaccagcttgagcaagacttgtagccaaatctgatatagcaacagtctttgaaggttttaaagaatttactcgagggcttaaggagatatcaacttcctgttggtcaagattattcatcgcttttacaactgcactcaatctatgcgactcgacctgtcttgaagactctacagatctatataacaaacagtcagaactgcacaacacaatgtacttcctaacatcactcatgaattaacacacacacatacaatgacacaaatgcatataattatataagcttgagatatagtcccatttggataaaaaaggagatcggtcacacttcatgtaaatttgtaaaaattaatcaacagggcatgtaaagctgtactaaagcaatgtaatttaattgttattattgcttcattttatgtatgaacttacattttagcacttgtgtttctcaaagataatttaatttagtccaatatcaattatgaatactctcgagttctgaaactcttgtagcatagttctttaggattctagcttacataatttagtccaacatcaacggttctgttttgacagtaaatataatcaaaaacaaaataaaaaacgatttggttgacagtgatagtttctccaacaaaaaaaatgaaaacacaccattttcgtttaaatcgagggatctccaggagaggaaaaaagaacatagaaaggggaggaggaaaagaaagttacttgagaggaaggccagcgagctgataaggaaaagataaagatctgaagcagcgagtctgatcaggtcccgaatcggccacgagatatcggttactaaaaccggaacgagcgacgattgaggagcaactctgaaccgaattggccatgcgagatgacaatgccaatggcggtgttggagttttggtcaattctgtttggttgggcttttcggttaggtgggtgagggagtgagtgggtttaaaattaaactaaagttgggctatccaaacagcattttaaaatgttgacaggaaatggggttggtgggtaggaataaggagataaaataaaaataataaaaataaataaataaataagaggttggtggatagtacatcacggtcctaaaaaaaactgtgctaaatttgatttaaaaatagtaaatgttacatttagcaaattttgtaatgttataaattaattattattaatacagtagaacctctatttaagaatactctattcaagaataaccgttataaaaaaatcaagtcccgatttgggccagt

SEQ ID NO: 295439 - DNA, 9782 bp, Cannabis indica
gtccaaaatagtatttaccccattaaaatagtctaaatttagtgttttctcattatttcttcaattttttattttcttctgactgatgtaggaaattaattattctgtaaaactttgaagaaattcaagacccagatttgttgcaatccaaatatccaaatagcacaaactgtagggctaatagttgcaaattttatgaaagggagcataaaacacataatcatagagacaaaatgagaaaacactaaaacaaccatgtaagaagatattttaatattgcacaagttaccacaacatacctgaggttgaccggaaaggataattgttcgtatttttagtagtgtgacgttgatactctgtagataattttcaacatcacgcattgcgtcctttacagctataatcttctgaatagtatttgatggtggctgatcacggatagtaacttttccaaaggatcgtccaagacggccttgttcttttagccccttcagtgacaacatgctcgccgctgaaattatcaacaatgtagggaatacatatgacagcaaattcctgaaaaggaaaatcaagactttgctcaaataacagtcatgtcatggaaattttgaacaattgaatatgtataaacatacggttaaaatagagcttcttagggatggggttaaaagatttgctttctgtttggtttggcaaatccaaggattcatggaaagccttttgtcatattttcagataaggaatttatcttgcttctgtagaagagttgtttgcagcaatttttgacctcactattgcgtgtaatacaaattatcaatatggttttctagcctatcagcaagatgctttaaacttttaattaacaaaataagactgtttaatcaagaatacctcactagggactaatacaaaacagcaagaattaattatcggaacatcttgaagaagaaaaaatgattggaagagaaaggaggagtagagaaattaggaacgttcttgattttgaaccttttgctgtcagggtaagatatgggaccagaatttaactggaaaaatacatcatgagagggtataaactagtttcttgtttttcttttcgtcatttatacaaattaatgtgactaggtaagtttcaattcttcatacattaccaattaaagaatgacatttcaacggtagtatataaagttggtaataacagaatagtacttcaaataatgggtggaaacaaccaggtttcttgtaaatttgattagaaagcatgttatcattgaaacaacataatatctaagaacgaaagatcaacctgaatattacggcataggtgaacgcaagaaaagaaacagtcaagtgtggctcttcccagcacctgagcttttcaaacttcttggcagtaatagtgagaggaagcacaagttcctgaacgaaacaaatcccaacattctttaattatgtttttccaaaataatacagctaaaattcatttcaattgtagcatctacaatacagcgccacaatgcagaaactacaattactttaaacttagctgtcccataatgtaagtttcaacctttaagttataaactaatacagtcagtttttgtttaaacctttctagatttccttgaaaggattgtttcaatctttctcgccatactacactgtacctactggcgaacttgctttcttcattttttaacagacaatttgcttaaaacaatttgaacaaatccacactctttaactcaaaataccagactttacaattgcagaacattaataaagtgttataaataaagcttactcaaatagtaaagctatatttatgatcttaatgaaagcactctagttgaacaaataaaaaataatgcttcatgtgtattgtataaaaaattattatataaagtaatcacacaatacacaagccatcaatcaagtaatctgttagttatattgaggtgaataaataatcaaaataaagagagaaataatgttctgaacagtttcaccttgaagagatcaatattactaggtatccctttaagcattgcggcatcaattgtggcctgagttgtttcaaccatctcgcatttttgtctgcaagtttctgctgccttggctgtaagagttacatcggcaacaacaagatttttacttaaaactactccttctcttgatgaattgcttttccagaaattaatagaatcagtggaataccaagaaggagacctcatccactttcgcaagtaaacacttccatctatatcgaatacatgataactactttcacctacttcactagacgatcttgctcgtactggttggctatctacaagctttttaacaaggggtccaccccaataatttactgctagagtttgatagactacatcgccatatggcgcaaacttcagatatgagaactgaacaagtttgatgggatcatccactaacttccgcatgaattgaagggcctggagtctagctgtaccattaatagcactggtaattgctcttttcttccctttgtgagagccatagacataagacattgatccatcatcatcatcctctggtccataatcacggatgaattggtgtaaagcaataacttcactaataagtgcatgccagacatctcgtctcatttcccctcccaagtcaacaaattctaccactaatggtttcgacctatataaagcttatgttaggcttgtatacacatggaagaagaagaaacatgttagtaatcaatcaacgggtatgccattttctttatggtagggattatcttataaattcccgattaaagaaagtgaattttttctccttcatctctacacaatctatcaaatttagaagtactaagatctgaggatgaaaaataaaaaatagttaaacttactccacagatgttacagttgcttacttgatagtagaagaaatagaaactgcggagtcaaagcgaatagaatccaagggtccaacttttgctttctctacatgtgccccttcactactgagatcaattcttagagtacctttatggcctaatattccaactgcctgtaccatgattcaaaacattaatgtacatacacaaggaaaaaagagagtatagaagcatgagaaaagcatgtcttactcaatgcaatataaaaaataaccaaatgtcatctggaaaaagtaatcaagttggttgggtatttgggttgagagtgcgatgtgtctggaatagggggtggaaaaaatatatatttattttcacttttccttctttagggaaattgtgtagtaaaataaaaaagggtgaaaccttttaaaattttatgagaaattgaaaataaatgaggagagaaaaaagatgggtgcaaatagaatccactcaatttaaatcaattgtacttattgcatgacaagtaatacctcaaagtaaattgctttatcagtcagagtaagcttccccggccacgccatatggttatcccactttagaataggctgctcctggttggaaccaatgcacaagactttctcctcagaaaggtgggaatattcttcaatttggtatgattttcgcttttcatgaaccctgcacataatataaaatacaacaatatgagcttcttaaagcatggaagcaaaagatccaacagattgaaagcatagacatgcaaattatggtgatttatggtaaatggcaataacggggtgtacagatttctattcatagaatataagacaaaccacagggcacagttgctgaatgcttccatgtatttcttagttttattacatggaataccataagtataactttacccaagtttcatctttctccttcttatctctccactaaccagcccttgcttacctctcttaacctgtacatctaatcacctctcctgtatcatcattcctgtctctgacctttgctgatgtatatactcgatatatagtaacttgcatttgatcaacaagatgaaataatataattaactttctcatgttgaactggtatcatcatcaaattcatgtcactctgtacaaaccaggcaagccccatttttctctgctggttttccaggtccagcatcattgaggcttcttcatcacttgcaggagacatgaaattaaaaaatatataggtatggagctcaatacatttaccatcttccttcaaaccctaaacaattaaagtattatacagcaatttatactttgttatttgttaataatcttccatggcttctaccccatgaagacaataaatatcacaggtaccacaacttcttgcagaagtaatcagagattagagtctagagcaaagtgtttatttttaattacaaacaagaaaattattaaaaataacaagaacggaagtgaaaaaactccctcgaaaaagaaaaatggagctcacttgatcagttcccggacataagtaagccacaagcccaaagaaatgcccttttcatcaccagcaagagccttatatagactatgcgctgttgaccgatctgccaccccagaaatagcagaagcaatacgaacaaaggctttctctctaacaagcatcccctataatagcaaggacaaaacaatatttgagaccaaatactttaatggttacatcatcatttgttataaaagaaaatcctaagttttcggtagcatatttatgtgaagatcataactataaacaaaaatggtctcctaagattgacactgagccaacttatcctactttccatagataactcaccaccaaaaaattcttccgctgtatagacttgagaaattcatgacttgggcctctgggcctccctacttttttttttaattattattattttatattggaacaaagatacccatgaggattttcttctttctttttctgttattggaatttttttttccatgaaattccattctccttttatatttataatgtattgttttcaccttgtcaagcatggtagtaataatctagcaagttttttatcattattattattatttttgcgtgaggggccaaactagttgagaggcgatgaatcatcacttgtacaagctggtaaatctttcatgtctactatggatgaccctaagttcatttgaggtcacaaaactctgagaacaatattaaagcctgaaatatattgagcattgcgaattacctgaagtgaaactttttctgaagtgttggcagactctttacagtaaggattttcccatgccagcattgttatgaatacaagtctctgaaatgcaggttcctgtagagataccgatggtatcaaatcaacaacaacaacaacaacaacaataataataaatgcaggcagaagtctcaaaccatacagatgtctaagtaggatactaagtagccaaagggagtacttgtttcaaaatacacatccttagttcattttagttttcaacatcatatcaactatttaccaatgcagggttgcaagtgatactcatatgacgtctagtgaaacatcaaacataatgaaaagaagaaagaaaaaaagaaattcttccgttaccagttaccacagaccttaagggaaggatgaaaagctgaaccgtcccttgataagaatctaaagcagcagtattcgaccaaattacgagcatcactgtatacagatttaggaacaagtgccttaaatattttctgcattttttgtgcagtcaatccgttcagcctgcaggtcttaatttcagctagtcagatgacaattacaatattaggttagtaggcttagtctgtagaagttcttgacaagagcaatagtttagatgaaagcattcaacaagtttcacaagagaacaaatcatcactaaggtgataataatataaaacataaataaattaagcaagtaactgccacatgttttcacctgctaaattgctcaatagatacaatagcagctaaagaaagaaccccttgtggcattctgctgttaatcgtctgttctgccacgaatatgtcctccatggtagaatcatctaaagaattttcaggaacaggctttctactctggctagtggttagtggagatgccacttcgttgagaaacttttgggtcttttggaaccatgcattgaatttttcttgtactgcatctgtcaaaaaacacatacactcacagagtcagaacatggagctaaaataaagtcaaaggtagatatcctgcaacactttatgaaatatcaagcttgaattacagaataataagtaataaatagcactgctttttgtacttaatcaataaagtaatactttcagcatataatatttcatttattgaaagtttacacctttcaagaccacacaaaaaataaaagctttcttaaggtatgaagacgtaaaataattaactcgaaacctttaaattcactaggccatcaaaggtttttcaaaatttatgaggttttaaaatgctcaggatgaaaattattctgacaaaaagggagatgtcattttccctgcaagattgctcaaactcaatagatatttgatataaaaataattttcatgaagagagatggcttgaaccagaacaaagttttcaaagatcctctttaattcctaccggggagacaaaaacaatagtgcagtaacggtgaaaatgttttaatgaatatcacatttattgatgtatgtcttagacaaagaaagctagtgacaagtgaaagcacatgtatatatagtattttcttccttttatagtttttcttaagactgattcgagaaatgagtaagacgtctgactcgcataaaacctagtaaaactgtgtcaaatgagttaataatacatgcttcaggttagagtgcttaacattctagatgatagccatttatggttaccagattctagtgggaccttttcttctaaatcagcgtctactggttttcctcaagcaagaattctgctgggctgttctggacaaagaccctatggaaaagcagaggaccttctaaagttaaaattgtttgggtggctggtggctctagataaactgaatgtacatgccagagtgcaaaaaaaagcgaccattcttgtgcaagtcacctggctggtgtgcttgttgtaagaaaaatggggaagacgtggcacatttgtttttatgttgctgccttgcgcacgtagtctttggataaaactgataaacgaatttgagatgcaatggtttataccctgttcggttcctcaaatgatagtgagtaaggtgggggcagtaaacggagcacatgtttatggagaatggcggtcttggcagttttaaggactgtttggttagaaagaaataatagaatttttgaaggttctgagtgttcagcaaaagtcctatgggaaaaaaattagattttggacaacatcttgggtatacatgatgaagtattttgaaaatgtttcattttcagacataattagggactggagagcattgttgtagtttctttgctgctgcctcatatgaatattttctaatgtgagggatctggttttatgtgggtcctaggggattgcacctaaaacgtctgtttggggcagtgagtatgctcatggtgtttagattgcttcaggtttttgtgcttggcttttaactttataaccacggtcttcctccgccacaagtgagagttttttatttatatcgggagggggctagtctaagacaaaggcccctttctaaaaggtcatgtttttcttattaatttttgtgccttctaaaagagccattcttcataatataatagtgtatgttcaagcataatttaatagtctatcaataaaaggtaaaggccggacaaacagaatgtctgtgcaacaaattatacaggaacatagttaaagctctgtttttcttatcgattcgtgcctttacaataaactatgctacgttcaatcataatagacaatacaatgaacttgcaaggactgaacaaacagaatgtccatgcaacaaaacatgcagcgagtgacaagagaatcgtgccaaagaaaaatacagaaacaaataattattagctagcaacatttaccctctcatgtttctgctgctttcccttttttttctttttcattttttatgcatatttctccaattttctgtcttcccacctaacatgttccgtaaaactttagtaagagccacaatctaatattggaaaatgtagttggttattctgcgaatgaactcggtgcaaataatatattgcaatcagacagtttctggatcataaccaaacttgatattcttactcctacaagtgtagtcaaatcctatctatattggtttacttctttcttgcttatttgctgagagattgggaggttttgttttactttatagagtttttcagagtcccagtttttgtggttgtttggtgtctaagtttataggttcttccaaagtttgaaaatgatttgcagtgttcagatgaatcaattcccttgggttgtaatgatactttacacttaacaagaaagctactaaaaaacatgtgaatatattaataaatacatattaattaacatcacattcaacagttttcaactgaaactttacttcactttctcctccacaccattttcttcatctcatttttcttaagtcaactaaacttaacaagcagataaagataaactaaattaactgaaagacaataactgacacacgtgctttaaaaatgtgcgtgtgaagtacaacaaaagtatcaatttaccatttttcaaattcaacatacaaaattgctattttagcattaaagaaccaaaatttagacagcaactaaataagagaggtaaggaaatgaaaaaggaaagaaaggtcaccagtttttaagtcatggagcttccatctatcccccaaagactgtcccactatcttgaatcgagatttatgatactctgaataatcccttgtgtgacatgccaaccttgcagcttgggcagctttcaagtgagtaaaagacaacttagagagcattttgagtctcttctctcaaatgggtttggttttcaagactcaagctttgcgttcatgtttttttttttttagattttgagcaattttctggttgaatgggaaaaattaaggagtacccagttggagaacaaaaacaaagtttgacttacaattgagaaaagaaaaggatgtaagaaaatgaagaggaaaggagggtgttcttttgaagcgttttttactggaaattttgtagggctattcattgattggggggaagagaagatgaagatatagctccggcgaatggtgtagtactagacgataaaactggagaaaggtaaagccaagttcaatacgcatccgatccgagtgtgaaccaaacaccaaaatgttcaggacttctggtccaggttgttttgttttggttttatgttattttatgttttttttttcatgaaaataaacacaaattgggacatatattaaatatttctttctcctaaaaaaaattatatatttcttattccactcgttttgaaaaagtaacttggacaaatcacaaattgggatgtgtcttccaatttagatgtctccttcttgttggttttttcctaattttaacaaatctacaaattttatttctctcaaaaaagaaagaaaagttttatatcccccctactccctattataaaataatataaaatatataagaaaaaaaaatgaaattttatcaattttaatgggtgaactcctatttatacaaaaatatgactaaaaaaataagaaaataaat

SEQ ID NO: 295440 - DNA, 880 bp, Cannabis indica
ttgagataataccatgcagattacaagttaaaaccttgtcatgtctagctatgactcacttcattgttacaataataagaatatcaagaatagtgtgaaaagtatgagagaatgaaagagaatgagagagtaagagtgctctaagtaaaatatgtgtataagagtctagagaatcctccccattatgtgagatgaagtccctttacatagtagtagggcattacatgattcaaaatacataacaaatagaaaatatccctagaatatatggcagttacattttggtagagctttcataggagtttttggagatcttctagaaggaccatacaaagaaccgcaactcatttaggttgtcagactgcagactgtaagctgcccaacgttctataggttgtaagctacccaaccttctgcagggtgtaagctatttagccttctacaagttgtaagttgtctgacattcagcagactataagctgtctagccttgtacaggctgtaaggtgcctagcctactattgattgtaagtcgcccgacattctgcaagctgtaagctgtcaagccttctgcaagctgtaattgttagaaatattttatccagatctagatttactaacatgtatgtttgattataaatttataatctaacatcctaaatatgaattccataaaataatgaattaaacacatataaagttatagaaaaccttacattgatggcagtggaataatatgcctcctttgttcagatcattaacccttgatcccttctttcgtagagtatgaccatcatatgaacctggtttctgatcaaggtgacaagaacactacacaatcgtccacattatcttgagtatttactgttggaaattatttt

SEQ ID NO: 295441 - DNA, 1932 bp, Cannabis indica
ttttttttaaaaaaaaggaaggaacttaggatagactgaagagcataaaatagcatatttatccatctgtaaatgttatctctgtttgagttttgggctgagctgggccagccagtggcctccctccagcctttgctttagtttactattattgaaaataaagcttagctagctaaacacttgtgacttggtccatctagctctctttctctctaaaatattaataattttgtagggtcaatcctcttcttaataatcactcttcccctcgtggcattgattttcattctcatttccaatttgtactttgcatttcatacaaagaaagaccaaagagaaagtgagacccacaaaccacacacacacacacacaatttcttttcattttatttctctctctaaccaaacacaacaactcacaaccttttaatcatttaaacttaattagtactcacttaattaaaactcctttgaattatgatctaatgatttctttttattttattttatttattttttcttatcctattcaagttcaatccccccaaacttcaaggtccaatctttgcatttattattgtaagaaataaacttttattttaaggaaaaataataagcatagtgggccctacttacttcaaaattattgcttctttcttagtttgtgcacgtgtggtgttttttttttcttcctcttctctctcctttatgtttttcattttcaactctttttctgtttcaaaatagtatttttccaatgaaaacgttccttccacaaaccaaaaagaagaagatgagattgttaggctaaggcttttataaacagtgaaaattaggttgagaaaacagtaagcaacctgccttaattcaaagtaaagggttaagctagagtaaccgtgacagaccagacaagctgtcggtgaccgagcagtcaaaaccccgttgttcaacaaccaaaccgtgtgtgattgggccacgtcattaatctgaacaccaccacgtgttgatagcagcttgtgggtcccaccaccccaaatggccaattcaacatcaatagcattagtcttttattctaaaaataacccatctctcagtttttcagtgccaattttcattcaaatgggtatgagagaaagaaacgaagcgttcttattagaagaggagcttatagaaagagacagagagaaagaggagatcatcaacttatatgggtcccacttaactctcccccattttgagaaaacgacaaaaagtgggtccatgatggctgactcatactcacagtcacagtcgcagtcatatcatatagctagctaactaataaaaggaacaattcttccttatataggccagagcctgagtttatcatatttgttggggtttccggttaaacgacacgtcgtatgatcctttaataacggtagtacaaacttttgttcggagtttaagcattaatcttttctacattattaatatatttttctctttttcagaattggaacattgttagtgaatatttacctttctctttgacaagagcaaagatccaaagtaactgtgaaaaagaaagactgatttaccagctactttttagaattatgatatttttattccttttgttttattgctttctaccgctttttctcaagttttcccatcaaattaatatcaattgcgcttggcaagagctatatgaaaattaacaagcaatgtatgtatggaacaatgactcgagaaaacaaaatatgagtattaggcatcaccagggccgtctcaaacctattacgggcctaaggcgaaatttcaaaaatgggaccgttttctaaaaaaaatttaataaatatttttgtagatgaaatattaacttcattgaataaattagcattttaaatacaaaagatgtaagagttcaccagaaatagaaatatcaga

SEQ ID NO: 295442 - DNA, 3400 bp, Cannabis indica
gtaactatacatatactatagtatattatatttatatatatattcatatatatagtgtattcatatatatagtgcataattattaccagttagtaagtgttcaaatcttcaaactttatatatggcactaattttagaatttcatcatatttttattattattatttatcgtgattttcagaaacaagaaaattataagttaaagaaataattaaaataaatatttatatatatatatatttttttttacatattttaggcattaacaaattttagtttacgaattattatattgggtgatgatataacaattgttcttacactatcgtgcagagcttttgttctataatttgaagatcgcgaaccttttgcatggaggggatgaaatcctacttataggacattatgtaatacaggtcaggttaatttggagccattaactgtttacagtgtttagcctactgatggggtgattacattattatttattgaactagttttgagcctaaagcccaagatccaagtagtattgtaaattcgtgtgtattgtgtcgtgctgacccgaccaatattataccgtctttttttaaatgagagtcatgccataaaaaatataggtcgtgtcctaaggtaggcacgacacggctcgtaaacccaatatttctgtatcgtacttggattcgtaccattttttgctaagaaaaacgggccagcccattttcatactcgaactcaaattcctgttttatttttccatatttatttttacaattaatgagccaattattaaaataaatgtatttttaacaacttcaattatatttatataattttcagtaatattttacaaataatcatataaacaaaatattatataattattatattttgaatatttacttataaatacttaatttttatatcatactttataaataaattaatatataattttagttttataattttttttcaatagtgttaattatagaatcatattataagtattatatttaaattttattattattttaatttatttataattgataaatatatatctatttattattgataatattaaattattgaaacttttaatatgttgtgtcgtattttttggcttgtcgcatgtcgtgcttttcaggctaatctattcatgcttacattcgtgcttgtcatgttgtgccatgtttaagcccatatttttcatgtcatgttgtgccaatgtgtaccattgtatcgtatcatgccgaagcccatgaggtactaatgaagacacctgattggagcactgtaagaaacattagtgtaggtaaaaaaaatcatcactggtcacactagagcaagtaattttgataggaaaaatgtgttcataaataataatatctgaaaaattttattgatctcaagacaaagtaaagtgtaggctaccaaggggatatcccttactctattaatatataaatgtgtattaaattaatttggtaaaaaatccatcatattccagcaaaaatgaaaagtaggcttgatttctactcatatatattcaattagttaatttggctgaatgcagttaatttttggctctaggcaatctccaaatatacacttaggaaactttgaccacaaaataattacaatctaagttaacattaaatatcaaaatgttgacattattgtcctatatcgatacaactatatataatgcaatttgatgtattgtacaaattcaaatcttaaatattaaaaacaaactatatcattgatgaaagtcccttttaataccaacatggctactacttctagtccaaaactaatcatacaagcatgtctaatcattgtcgtttttcaatcaactattccaatttcaatgtcgttttctttcccaactagttcatattcacatatgccacgtcatcatccttatccttacccatcagtaccatcctctccgtctacacttcccaacccaatatctccggctccggcggatacactcccacagccggaatattctcccgcaccagctcccgagtcatttccatttccagacttttcacctggaccagctccggtgtcatacttgccagaattatcacccgaaccagctccggagtcatttccattgccagaattttcaccgggaccagctccggagtcattccctttggaacccatttctccagcagagccaccaattcaagtcggatcccctgttccgggaccggattatctcccaccacctcataaaccacgcgtttcccaccctattcgtcgaccacggagaggaattagagcagcttattggccttcattcgggtcatttccagcatccgccgtcgacaccacctacttcagccatatctactacgctttcctcttacccgacccgaaaacatataagctaaaaatcacgtctttagacatgacacagataccaaaatttatcaaatcactccaaaacaaatacccacctgtgaaaactctcctttcaatcggaggtggtgggaatgacccaaaagtgttctcagaaatggctagcagtagaagaacccgaaaaacattcatcaagtccaccattaaagtagctcggagatacggcttcgacggtattgatctggattgggaattcccagctaacgatgaggatatggagaatttagctttgttatacaaagaatggcgaagagctttgattttagactccataattggtagtggtaggaataggaataaggcaaggcttcttttaacctctgctgtatatttctcttcgagatttctgttcgataatttaagatcgtacccggttaaagtaatgggtcaaactcttgattgggtcaacccgatgtgttttgactatcacgggtcatgggaaaactttaccgggttacattcttctttaaatgacaggaatagtaatatcagtacaacattcggaatcgggtcgtggatcaactcgggtatgccggcccataagatcgtaatgggcttaccattgtatgggaggacttggaagctagaaaacccggacgagaatggagtcggggctccgactattggagttgggccaggagatggtgttttggtgtattctcaaatagttgagtttaacaagaggaacaaggttgttcctgtgttagatgaggaagcggcgtcgttttactcttacagtggagattcatggattggatatgaggatgtactttctattagaatcaaggtccgtttcgcaagatctttgggcttgggtggatatttcttttgggccttgggccaggataaggacttgaccatttctagtcaaggttagtaatctatttctcttttatctttttgacatttattaataatttgaggaaattacactctataccctttttatattgtccttttt

SEQ ID NO: 295443 - DNA, 2312 bp, Cannabis indica
taaatttcaaattgtttaactcttattcaaaatcaaatattgattatagcttttcaagacatcaaccctaacagttttcacttgttctattcatgtggttttcttagatcaatctttgttgatccgtgattagtctctaacaaaagtttattcatagtagaccaatacaatttggttgaaccagtgtaaaaccttggttgtctaagtctttgtccatttcttttattttgattgtgttatatgtttacaataacttgtaatataatttttggacaatgttttaagaattaagagacttgtcttgtgtttgaaatagtgaaactgtttatatattttttgagctcttgcattgtaatcttgaatttcttcttccttcttcctatgtacaaaatatccgacattatacttgttattaagttggaaaagagttcatcaatgaaaaggtcattttaatattttcttttttgatcaatgggggaattgtgaaattggtgtaagctgtagaaattggatagaaataaatgaaaagaagcaaagaataaaagtacgttacggtatatggtgcaaccattggtacatacaacaaaacaactaaaattttacaattagatacaagaaatgtacccatcaacacctcaaacatacacttctaactttcttttttctttttcttgaaaaataccattctaagttactcccagctcaagcataatcagtctcctctctttggtattccatctcatacctgtagttaaaaaattaaaataaataaataaacaagaaagtaaaaaaaactatttatttattaatgatcaataaaatatagctagagtgatgaataacagattttttaaaatgtaattctaataataaatttaaaaaagataaattaaaatgaacaaacattttaaagtttgatgttgtgcatttttagaaagttaccatagaaatttagaaaattctaaggtaagtattcttaaaaaaaaaaatgaacaaaaagataatttcattttaaaaataggagcagaatatgtaaattaattgagtggtgaatttatcttacaaagagggtgaaatttgagtggtgattggcttagacatccttggcaataagatcaccattaacgaactctctgtaagcagcaacaggccaactgaaccctctgaaaaccaaaccagtagccaaaggcacatcgataataatctccttctgcgtcggcttcttctctcctctaatggcgattaggtagctccgtccgacccacccaatccaaccggcgatgtacaagaacagcaatccaggcgtgataaactcaccccaatgcctctggtcaccgctcacgatcaggtgcggcagcccatccgcaccgcacaacagccccgattttccgtagaagtcgaatcgcctcttcgtcttctcgatcgtcgcgttgatggccagagccggagcagagtcagccgcgtacagcttcagcgacgattctagcttcttgatctgctgcttctcgcgcttggcgaactgcttcgaatccttacacggcgtcagcccggcgatgtcggctgcggctggcatcggcgcggccgagattaggatcgatgacagagctagagccgcggagaacgccttcagctggctctctacggctgcggaagaggaagaaatcttctccggctgggcggcggagcagacaacgaagctcgatttctgcggcaatcttggtgtgttgctcagcctaggcttgagcatggattttgagaggttagtggggattgtgagagacatcttcgttttcgtttctgctgtttaattacttaatcacaaccccagttgtatcgaatgatcgatacagaatgaagtttttattttctgggtgattttctcggaaagaaagattatttggaggggagtgtgagtggagagagaagggttttagattctatggaagggagttggataaggtaggagggttgaagaaagcttagttggagggttttgattggttgaggattgttttgttgtgtgatacttggattttctctatctatccttactagtattactgcttactctattttgtggataaaatatttctatcatatatatttttccttttcgtgtggtttccacgtacgtttttttttttttgaaacacaatatattgtaactaaaaaagaagcaatgagtacaggttacaatatattggaatattaccattccaaataatctctctctcaattcctcaaacttttctagctaatttataaggaacaatattaaattgtttagatatatgatagtggtgtttatcaaa

SEQ ID NO: 295444 - DNA, 3360 bp, Cannabis indica
gatgggtcagaaacgagccctagcagagcgttttttcctgtacggttatatctttccttcacactttttaaagagatgaaaatattttgatttattatatataattttagtcgattatttttaagaggcaatcagaatgagaattctcttttgaataaataaataaacagaaaagtactatggacaattttaataagtaattctagttttacatttttttttctttgtaataaattggacgaaaataataaattatatgacatttttctcattttgaagaaataagcacccctaaagcagaaaagaaaacaaaaataaacctcaattattattccaaaaatttaataagcattattggcaaattgtttctgaataaactttttttgagggtggaggactattaaattaatgccaatataattaaagtttaaagttgaggactaatttgcaataagaaaaatattcagaacataatagttgtgatgaaaattgagaactacaaacatacgacacatctatccttgactagagtcctttttaatttaaagataataaacataataattattgtgagttgtgtagacatttttgtctattctctttgtgaatttctttgggcatcacatttcatgcttgggttttatcattcattagttttttaataagcaaactatattgagcattgttatatagcctagcaagggtattattacatacataatgtgaactttatgtatatcttctttttcacagtgaagcttctcaatcagaaaagaaaaaaaaaagaagaaaaaaaaagatatgtgatttgcttaagaaggcaccaaaacacatatggccaaggtcgtactaaatgggcttgtgtgatgcatgcatgtgctttggagttgttatagggtttagggtcccatgtaatgtggttaccaagttattttcaatttgccattattcttttttatttatttattttacaattatattatttgctattaattctagctaaaggatataggtgcattatagtaaggataaacaatttttttcttttattaaaaaatatacttattgttagaaaatcaataaattgaagatataaacttgtatataatacaataataattagataataattatgcatacacacgtgattaatctataataattaccttacaatactctcaactaagtattgctccttaaatctttaaattagaaacaattttatttatttacagacaacttgtattgatagagctaaagagaaaacttaacaacatattcttaattggattgtgtctgttcattaaaaacttaagttaactataaaaactcacatttataatttaactagatttcaaatgcataaatatattaaactcattaactataaatcacaaataatatatactaactatctaataacttcaaatttggataaaactaataaaaatagatgtaaacccaaatggcttaaaacgaaataaatttatcaatgatattttttataaataaatacctaataaagcccaagcaacatttttcacaagtttcattttcaatatttttatttgtacttttaccttgttaaaaaacgcgcgtggggaacatttaaagtttacagaagacaaacatccaatgcccaaacaaatactgtataaataaatttttaatgattcagcaatgccaacttggaatatttgtgtttcttaattgtgaaaagtgatatatggatgacctttttgaatcctacgtggatgagataaagccacagttattatgctatccaaacaccaaagcccaaaatgggcttttgagcccaaaagagacgaggccgactcaacaataaccggctcttcggaatcataaagaaccactttactttactattgccacgtgtccttttgttctaatccattctcttccaaaccaccttacgccacttgtcaaatgataaggttacccatttcgccacgtggagacaaccgcctgcgctctcgtccagctacttagcttagggttcacccattgaatgtttcacacgtgtcatatttatctgaacgacaggtttatgagctgacaccattggtgccgtaccataggataaattaataattaattttttaatattattattttgatgaaattttggtcggaatcggcgacggttttggcgtaaagtggtgtctagggtggtgcgccacggttctagataacacctacactataaaatattctttttttttctaaaaaaagtaacaattatattatttttaattaagaaaaagtgacttggtttaatgtttttaattggaatatttaactcaatagatggttgttgcttgaaggcttgaatggctattttttttgtgggattaaaatatataagttgaagtgactgggttggtttttttgttttaaaatccaatttgattcaactttgtggataatattagtagtgttttcaagtgggtattactaatccatataacttggttagggatattttttagttttttaattgcccatttgataagcatagggtgggaacaatagtaattaatgtaagtaagaaatattatattcaggaaataaaaattaaaaagtatgaactattttggacctactcaaaaccacaaattataataataacagtaatagcaacagcaacaacaatgatattttgatgacactttttgcctactggacttataaaaagtgaaaagagagttaagtggtccatttcttggaagtttttctataatctatgcttgacttcaaatgaattgtcacaatgtgagcaaattataacttaggggcaccccacaatattattttctttttttagaattacttcaaatactattttcttaattttttttttttcaaatttacagtttgagtttctaaaatagttgcagcgctagttgcaataggggtttctatacgatttttttgttacaattttaattacagcgctaattgcaataggagtttatatgttaaattctgtaaaaatgcaaaaaaaaattattttgaagtgtaaaaataaaaaaattcttttttttttagtgtactaaaatcctatgtgaaagtttgtattagtcctataaacttttacccataaatctttaatattagtgtgtttcttttttttttaaaaaaaaaaagacttaataagtagtctcagttcaaaatctaaaactaatttaaaagaaataataatggagttgaactacgaagctcaaacaaaataaatagagccttttcaaaaaaaaaaaacaaaaaacaaaaaacaaaataaatagagttattttgagtataaatttgatataaactgcaacaaggagactagtggattat

SEQ ID NO: 295445 - DNA, 3533 bp, Cannabis indica
aacataaaatgttatttctgatctttattaataactaatccgattatattgaaatgagttttatttaggacataaaaccactactacaaaatgcttaatttgcgtcggtcaacgcgtctcaccaaaatagttgaccgaggccaaaaataagcagagattttatgcttcagtggataaccgaagctaaaagaaaacaattagcgtcacgtacttcagtgacactaaaagagcaaccgaggaaaaaagtataaaatttaaaatttgtcttacattttgcttcggtggaaaaaagacgctaatttaagaagtttgcgaccgttatccaccgaagcaaaaggatttaatttttataataactcaatatcgtttttatgagagtaataacccctttttatatccacgctcaacctcatttctaattgtcaaaagacctattgcaaaaccctagcacagccaccaaatcatcatcttcttccccatttcgaactacagctcaaaatcctcacctctactccacttctcagcgtgctcctctcagcatcctaaccccaaaatgatcctcatccctggaaaccaaaccccagacaacttggcgacccaaacccatttcgtcccgcccacccctaacggatgaacctaaggaccccaacccaggagaaaattgagcccaagcctctctctcgtctaccccttctctttcgtcctctcttcgtccgtccgtggtaaccaagtccagctgccctccactcgtggtcctctgcctcatctggtatatatattatttaattatttatttactatatataataaaaataaaaattatatataaaatatataatacatatatatacaggatgttattggttcactacaacaatgtaatattgggattatttctcttgaaaagtattatttaggttctgtgatactcttgactcagcaagaatttctctaagatttcggttttcatttttcacatgatcatgaaatggaaaactttatttataaactgaccacaattacacaaggttgggcaaagataaggggagagttgttttagtttgaggtgctctagtctatttagttttgaacaattaattatataccgatctttgctttcacataattaaaaatttgagattccatccgtgactgcgctgggatgccatattagtatatcatttccaccagttttgcttttgaaaaaccaaagcaatttctattggtcttcctcgttttggtagctgtgtaacttgtgtcttctttgtataatattgtattataatttagaaaagcttagtattccttctaggatttgggatagtgttggaattaatagaagttttatgggtttgactttcttgaagttggtaatttttttatttcttgaatattgaaacttgtgtttaataacaatagatagttatagagtttaaagtgtaaaatttcatgtttgtaccaataaatggagttttgtcaaatatttgattcttccatgtttcttttccacacatatatatattgagacagagagggaaagagattggttatattttttctcattatgtttcgataaaataatgagacattgatatatatgaaagagttaaattaaatttgtatttagacatgttattgcaaacttgctctatatgcttatgatgttcataacaaattttatgatgtttgcatatccagggacatctcttctagaccatgggatgtggtttgttttattgagcattagtgtgtctcaaatctgttgagacttttaatgattttgatcctatgctacatcagtaagtaaatttctttcaaccctttctttttttttgttggattgaaattgttttgtttgtaaaattgttgttctgtttttatttgcttctagctttattgttcttctacctattattcaagattgagatttgccaacgcagagtaaaaagtctttgtaagatgtgttgggctgcttgtgaggctgattgagaagaagaagagaactgtttgagaacaactcctttagtagttcaagtagacatttgaaggggcttttgctattattataatgggacttgctctatatgcttatcccatttaatatgaggtactaagtctatatttcaaactttgttatgttttaaatttttacttttttatttatcttaataaattaagattttcatatgtctattttatatggttaatttctttctatactttgttccaatcatgttaatttggtgcatgtttttttttatcgttatttatgttaagtaatttttttctcttctttttttaagagcgaaggcaattgatgctacatcacttatgacttatatttatgaacagttttggaagtgtttacttatttttaattatttttcatctttcatttactttttgatttgtttccctgtaattctctgatttcactagattttattttgatgaaacaaaacttgcttggtatatattagaagaactagttagtaggagctatggtgatcgatcgagaaacaaaacttgagccttattacatctgtccctctcgtttctctatctatctacatatatatatatatatatatatttctctctctttctctctcttgttgggtggttgaatggttatagtaaggctgggtatgaaaattctcatgttatattgtttatgattagatttgctatgagatttgagggcttccattaggctggttatatatactcattgtggtattcaagttttttttttccaattcattttataattctcttttaattgtctcactttataactttgttaattttcctcgtatattagaaaagagaagatgatattataaggatatatcatatcacagtgaatattatttttattttcaatatgtgcattactttttcataagcatttgctccattcatattcatgtgtcatatggtgctttaggttggtctctgatgctcaactcaccatttatcaaaacatttggtatgtaattatgtaaaacaagtctttccctcacaattgttcttatttagtattcatcgaatttcaacattgtattttgtttgggacttgattgtgttaacacaaaaaaaaaaatgtttcttggactttgatgtttgtttagaaaattatgtcctggtgaaaataagttacttaagattattattattattatttggccaaaatggtgtatagctaaatttgattagttttgctttcttggttatcaattattagttctaacaacaaaagttgttatctgataccatcttgtatttaagattgctaaattttgactgttattaaaatttgtatgtacgtatgtatatcagtaatatacttgttttgttgcaggttccatgtcgataaaatgtcttctacccatgtttacgttcgactgcataatgggcaaaccattgatgatataagtgaaggattactggaagactgtgctcagcttgtcaaagtaaattccatacaaggtaaaatcttggcttgtttttctttcttgtaatttgattaa

SEQ ID NO: 295446 - DNA, 1310 bp, Cannabis indica
atatatatatatttatattatagcttttccttttttcctggtgagtggtctcgtgtgtttgtagttatatggttttttaatatttaaattttaacatcgatcagttggatcagttcagttcaacctcaaatatttatatatatatatatatatatatatacacaatatatgatcatcgaggcacgcgtaatttgatggttgacgttcttcaacttaattatatgtacacacattataacataaatatataatacaataagtctgaacatatatattatagtaatatcagctcaatattgagttgagctttttgttttgtgttttgtttttagcaatatatattgatgaatataatgacttaattaaattatttatttgtatattaattgctatgttacgatatttagtaggttaatttgtacgtacgtaggtattatattattctactatataatatctcataatattatcttcgtattctctatataaataatatatttaatcatcaaacattatatattgattcgattcaaagtatacattttaatataacaactatataatatacatacaaaaaaaaagggttaactaattattgtaaagtacttaatcttatatttgtgcttaattatttaaaccagttactaaaatttcttgtttcctctttttgaggttgtctactatatagatagacgtaaaatattggtcggaatattttatcttaattagagaaataaacaaatgaataagtataacttccaaagaatataataaataattaaggtttttattgtccatagcttgaattgttgaatataaagtaatgttaagataaggtggataagggttttatctcaaaattaattgagaaatatcctattcatctcatatatatgatattattttttcatatatatacattagcgatttgaaaccgattctattacattgactgaaaaatctcaaatggagattaaaggttgagaagtgaaagctttttaactgctgtgatatattatatatgttggaatttaagataatgtatatgttgtatttcaaaactaattaacaatgaaaatagtagcaattatattatttttttacaacaatgtgagactaattaatatatatgtgtttatatatttctctaaacacaaaattataatgtgactgctatatactacttaaactgcataattataattaattaagatataaaatgatgaaaagagaaaatgtagatatatatatagggatatgattttatcctgtactttcccggattgtaatccgtgatgtacgacagccgt

SEQ ID NO: 295447 - DNA, 5358 bp, Cannabis indica
tttttttataaatcaatatgttagactttgactagacgcagacccaattccccccaaggccctggcgctaaacctggcctctgaccaggaccggctctgaattaaaatgggctatagcctatagaacaaaaaaaaattgagcccttactataaagataaatggtatttttaaaaaaaaattaaaaatatgtgtttttttaaagaattttttttatttggacccctaaaatgagtgggctctaggcgctagcctagcctgcctatgcctaaggccagccctgcctctgacccgaacccgaattcaaccccggacctagaccccggcttaaataaaattaaaaaatataaatgaaaataaactttacaaaaacaaatttttgttttctgttcctaaaaattgaaaaacaaaagtagttacaatgtaattaaaaaattaaaaaacaaaagtgttaccaaataacacttacatttatgtattaatgcatatatattatataattattttatattttaaataatatgtgttatttagccgagtgtaaaagacactgtaataatatgccttatttagcaatttggtttctttttttcattttaattgtcttttaactccttctaacttcttccttcttctttttctcttttaactcctcttccctccttcatctttgtcccttgtaaccccactatccccttctcttctataaatactaagccctgttctcatacccccgtgttctctcaattgccatggaccatctactatctcatatgaactctaccataactctaattggaggctgaaaaggaagttcatatttttctagatcttattccctccgaaaggtcatcttctctagacaatactctttatgatcgtgttctttctggtagagatataaacatcaagacttttagaatcaaaatgggtgattaattaaaaggaaagtatccagacgctataactgataaccgtacgggcctttttaccatttcctttggttgctcaggagataagaggaagcttcttctgttggaaccttggtatttctagaaccaccacatgattttagggacgtcatctgttctgcaaaatgtgtttgtggaatccttgcatttctcccctttttgggtccaactccaccgtgttccctttcttagcaaatcctaaaccttggctattggggcaagtaatactattggaaagtttcttgatgttcatgaggagtcactaagtgagggctgtggggcgctttttttgtttcaagcattgattgatgtgtccaaatcagtattaaggggaaaatggtaaggcttaaagataatcaggatgagttttgattagagtttcgatctgagactactagagtttttgttttgagtgtggtaccattggccgtccttttgataaattgtcatggcttccttgataaaatctataatggtattgaacccactcttcaataaggtccatctatgattggtgctcctcttcctactttgggctatgatcgataaaggactgatttccataaaggaaatgcttggccttttatgacccgattaactaaaaaatcttctactgctgtaattcctagtcttgccacaagacctttaccccatccgcaatcattaacagtctctgaatcatcctctgctcctgttacacaaccactaaattttctactcttcctaaccatgcaaatcaagctatgcctttagtgactaatgtggctggtattattattgaccattttgaaaatattccagagatgccttttcccctttattttctatcccctttggcacttataggcttgatctcctgtagtaatttttttcgctactttctctcttgctcctgctactgttacggaatttaactttgcaagtctatcttctttttgttcataacatgttatttctcctgcaactaaagtcactattcctctcgagcaggtgacaccatattggaggagcattagcaatttaagtgtgtcaatcagcttccttggtcgatcaatattcttggtttttgccatggatattttttaaaaacaaagaaagcaaagaaaagaaaagagtgtagaaagagattggggaacaatactagggcgtgtgaagaataaataaaaaattaaattggtcaaatagagaaagagagggtaaacagaataggaaacaaaaaaccaaccgtcctcatcaagcaataactgccccttcaaacaaacactttccattttaaaaattgattttagtttttcttaataaatgatccgcacaaaaataacacaaaaggaaacaaaagagaaattaaacaatatatttcaaaatatgttgtaaggtccatctttttgatagattatatccaaattgattccagattaatctagtcacgtttgcttatcgtaactagatgtgaatgttcttttggtatccacgtcagtcggtcttaagtctgttatcatctatattgaaaattatgttaagtctcgttagggttgtatgtttataaatagttggttctatttagagatttaactaacttttctaattaaattcttagatagttctagcagtatagagtaacatcgagggttgtagctggcgttgccattttgttttacaggtatgattgaagatcttggaggatttatacagaaagatcagagcctgattgagctgagttttgacttgagggattttagttccatcttcatcatcatatctgaagggatttcagattgaagaaaagtgttgaagaagagctcttcatgtgcacaaggggatcttgtgtattcaaccaagaatcttggttagtgtgggtaatatttcactggattttgtaaaagattgtattcaataccttattgtgaactggtatttgtaatgtaaatctttgaatatggtggatgttattaccctggtttggggaacccaagcactagtcggttggaatgtgtttccagtgcggatgaagcttgtaaatcagagtcttctttattgattgatcatttacttgtttcttgaatagtaaagttacaattgatagttgattccttaagaaactcggtaatttgaatcaagtaaataggctaaattattctttcattttctatcagagctagaaaattttagataaattttgtgttagatcttatacttgccaggtatttgattcgaaaaaagtcagttgtttctaatttatgatttgtgttttttattttatcgccactaatcctctctgagttacatctcgaagagctatattacggtggtctgtgttttctttgtgttcttctatgcatgatgaaaatgttcagggaaggtggatctacctcgagacctccaatgttggaaggggctaactacccttactagaataccaagatgtgagccttcttaagagcagttgatgaacaggtctagatggccatagaataaggttgaataagtcctaccatgactgagaatgaaatcattaaaccaaaacccatgagcatgtggaccactgataaaatggagagggcaaattttaactcaaagcccttgcatgcactgtttaatgttgtctccacgaaccagttaaaggttattgctaactatgaaattgcaaaagaagcttgggagaagttaaaaataaagaatgaaggaacaaatgctaaaaaaagaaatcaaggctatgagcattggcaaaggtatttgaaaatctatatacatggaggaagatgagacaattgcaaaatttcatgctaagttgtgtaatatttccaatgagtcctatgctctgggaaaaacctactttaactcaaagctagttcaaaaattgcttggagtactaccaagaagattcatgtctaaagtgacctctattgaagaaatgaggaacattgaggaactttatctctatgagctcattggttcactatagaactatgagttgtcactgtctagatggaagaaatcaaagaaacaaaaggatgcggctaaagataaatttgatgcgagcattgctctaattcatcaagaagataagaaactaaccccagaggaaatcaatggtatctctgacaagacagttgatcagttaacaagaaactatacaaaattcttggaaaaagaactacaagaaaaaatttctggttggtaaagaaaatgctcccaagaaaaacaaaggggggaacttcatataatttcaaccacctattgaccaaaagaaccgaggaattaagtgtagagaatgtgacagctttggacacattcaggcagagtgtgcgaacactctcaaaaagaagaaggcccatgctacaacatggagtgacagtgaggaagagaagaactctactgtaagtgaaagtactgataaggaaaaacaggtggtagcattcatggcccaaagtagtcattcagttgagtcttaagatgatggagtccccacttcatcagaaggggacagtgagggtagacataatgcatacaaggagatgtttgcccaatgggaatacaggactaagcaaattaaaggtttgaaaagcgccatggagcaagtggaaactgaaaaaggcaagttagaagatacagttatgaatctcaacatgcttcttgatgagaaggataatgagatatacaaacttattgttgatctggttagaactaaataggctctgaaatttattcctccggccacaactattatcaatcagactctacaacttcaaaaaccctatgtgatcaaatctccattggttacaggatgctatacaaatagggaaattatttgttcgttaaagattaacacacttcaactgtcaatttgaccaaaaaggatggcgagaaactagacatttcttctacagttaacggttcagattcttctttgagtggtcatgttccatctagacgtaccgagttgaagttcgaaggaataagaatagtccctagaactctgtcacaaatttaacaattcattccaatatgtcacttctgcaacaggaagggtcacatttgtcccaagtactataaaatgcagaactacttgaaagttatgattaatcggccaaatagctttcaacaaccaattagaacttaagggcgcaaaactcatcgggaatggagaacaaaattggaccctaaactaaatgttggagtggtggctaaggtgcctctgtctacttttatggagggacagtggtactttgatagtggatgttctcaacacatgacttggaataaaaaattgttggttaactacaaaaaggaaaaggagggtgttgtgacatttggtgatggaaacaagggaaagattgttggaaaaggtgatgtaaacctaaatggtgtggctgttgggttttgtgccct

SEQ ID NO: 295448 - DNA, 1628 bp, Cannabis indica
tcatatttagggtgttaatcaagatacttgtgagcagatctaagatcctggtaaaataatttccaacagttacatcataacaaacttaacaacctcctggtaacaaaatctccacgtcaacacaagaaaaggtgctttcggatgagacatatgctaccgggacaatggaccgaagtgtatgctgaagggacttcccgaatagaataagagccagctagagttgactatccggaactcccttccaagaggcacaactagatatccggaactcccttccggaggtggagtagctttcctgaagactacacctggagtacacatgattgtcattcgggaacttcctttcggatggcaacaatcattccacaagacttcttctttatggagatcttttcatttagaagaactataccacatcatcattattgaacatgaaagagggtcccacattcgaaactttttcttgtccagcatgaatattttttttagtttaaataataaataaatatttctctctctatatatatatatctctatgaattagaatttgtattgcttcaaaatcatattacacgcttaacaacaccatacaaagtcggcaactttggttcactaagctttacaaactacaattatatctattataatttctctatccattctaagtaagctttattcactttcttgggtaaaataaaaggcagtctacttctaatgccatgcttagtatatccaataatagttgataatgataaaacttttcggtgccacaaagcttcattcttgtttctccatagatggtaaatcactgcagcaactaccaaactaactatttgcttcttttaactagaccatcaagctctcgaaatcgaccttagcatcacttgaagttgatgccctgttgttctccattccaaccattgtttgatagtatcaatacattttttgctatacatacattcaaaatagagatgtcgaatgttttcttattgctcacaacaaactaagcacttattatctgaacaaacattaaatttgaatagcctctcctttgtttgcaatctagctcttatcgtaagccacattataaattaatgtttaggaacattaaaatacccccaaacatgagttctccagtttacagacaccagactcggtttgagccaagagagtcctttgctaatagaataggggaaagaaataaattattgctttgtacatacctgtttaatcttctctttcactttgattatttgtcgccaataccagctattatttacaagattccaccatgcttggttttttatgtgcataatattgtcccattttacccaaaagatatcttatttggttgccaccctccaaacatacttttccaatgctgttattgttggaatatgttttaccaggatctagatttactaccatgtatgttatttaacatcctaaacatgaatatctaaaacaatgtaaataaacacatataaagtttaggaaaccttacattgggtgcagcggaatattaatggctccttccactcagatttctaacccttgtatcatgtctgtcgcagaatatcactaagatctgagcccgaatgtccttctcttgattttggattcttcac

SEQ ID NO: 295449 - DNA, 2476 bp, Cannabis indica
taaggtacgcttccgctatttgagttttttctctttaaatcaacaaaggtattctttagatctttggttacacacttataattatatgtaatatgtttatctatagaattaaatcttgttgttgtatattttttgtgtgttaaagaattttaacaatttactcaaattaaaataattttttttatatatatatatagtagacttaaattgctaagaaaataaaagatcaaggaacattcgacaataaaaatacgatcctactcccaaggcatataaagcctaaaatgaagttaaacttcgagagccttacatacatagtttaatcatttttaaaataacaactctaatactttttgtgtagtggtgtaatacttttataagttcttaaaagtttctagattcaattgcgcatatttaatatttctaaaaaaattaaaatatggaggttggaaattgatactttaatctcctactttaaaataaggaagcagggaatgagagatgtggcgaggtgttataaatgtgctttacatttagagaatgatgattggtttaatgccatttggggttgtgctcagattaaaaatctttgaaaacttgatggctttaggaagattgttagaaggtgtgggaatgaagatcctattgactttcttgactgtattgcaagggtgctacctaaggacatgtttgatttctttgcccttaatgtggcaggtttggtatatgtgtaagtgctttatatccttcatttgttccagcagtggagcgggctttgaattggattgctgattatttacacgaattttgggagaggaactatggagggcgactggttgtagagaggccaaagtgtagatggaagcctccagggcttggggaggtgaagattaatgttgacgttgcggttagtaagactaatggttcctgtagtactggcgaggtggtttgaaatcgtttgggggaggttattgtagcacaaggtatttttttgagtagatccttttctcctattgttgttggattattagctattaaacatgggattgaattggttggtcttttatctctggagcgctgtatgatttcttctgattgtagcttggttgtagctaagttaggaaggccgcctgagttgactagcgaatgggatttgcttattgcagatatacgtcagttgattatggaatttggtatcatagatgtgtctttcaaatcacgttctttgaatgaagtggggaattttatagctaaggatgttttatgttgtaaaacttttgatttttgggatggagatgttcctctaatggctatctctgctgtgttagaagatttgcctctccttatgtaatgatttgtggtgatttactgttttagttcaagaaaaaaaaatctccgtactttaaaatgacattttttattactatgcttaacactattttgatatatattttattatttaatatattatttatatactaataatttttttttcacaattttaaaatctaattgtttgggaacccaaaatacacgcttagctcacctcatcttaggccatctccaatggcatttaaaaatttatataatataatttttcccataaaatgcttcaaccgagcagtgaaatccaatttagtttgaaggagtctacaatatcctactaataataataataaatactataaacaactatatttttttttggggtaaattttatttatattccaaaaatttctaaacacatctcattttaataattttattttatataaatttatatcttaaattatactaagtttttttaatttttttactttttatactaacttttttcttcttttctttttatttttaattttatttcagtttaaagaacttttcagtctagcaaagttatttctgtgtttcgtcatggttgtgtgcatgaaaattcacactttgtgatgttcttttctattcctttctaatctttcatatcaacgattagtcattccttataagacatttctttcactctatttaaatcatcaagattgataagttttttttatttttttctttccaagcaagcggattaagaaacttgggcactcctagtttctttgatcttctttccctgtaatatctagtctcttagcattcatgaagctgtttttcaacaactacaggacccagaattactgttccaaggagtctcaggtgggcagcttgcggagctgtttcgatgagctcaacctcagcactgctggtacgtttattgtgtgcggagtgtgaaccccaaaacatagctgtttatgacaagggaaagtagccttttgacttctcattcactgccatcattgactgatcttcctgtattttagtttgtatacagttgttttgtagttttattatagttttgctactttcatatgttatttcactataaaattaatatgcaactatttgcacaaaacttactatgtataactac

SEQ ID NO: 295450 - DNA, 1755 bp, Cannabis indica
ggtcaagttaataatttgtaacatgtataattacaatcttctttcatctgtgtatgacttagcaacatgattcattatggtcatatcattgattcattatggtctattaaaaacttaaggaaccatttaatcccccacaattactatatatgttctctaatcaatcaatcacgtatttctaatccaatgtaattgtaattgaaattgaaatcaatttgaaatcacctcaatgtcatgagaattttgagtttgtgtagctcctccatgactttcttctcgactgtgtggattgagttgggaagcttctgctggggtctcaagtaataatcccctgattcttcttcactcatctgattaacaacatcaagaaaaatatttagaactttatcaacagaggtcgaacaagtctattctctgtacgtgaagaagtggtagtgaagaagtggtagcgtaaacattgttgtagaattgcaaagctcttctcctttccatggcctggaataaaggagttccaaaagaatcgcgattgtgatggaaaccagatttaagtagcctctgtccttaggtttcggccggagatggtggtccaatcagaatgcgattgcgatggaaactctaatctctctgtctcaagtctcaacggacagattttagagatagaaaagaaactattagtttgtgattaaaaaactgtattttctaagagggaaagttaactctatatgcatttattgggtcaaaatttatcctctaattatttgtgtatcaatattatttaattacgtcaatttttcattgagcccaaaatcactcctcccattgttcaactcattctctccctccattctccctctctcttcaagagaaccgtactaccgcgaccactgccaccatccaagactaccgccgccatccaagactactaccaccatccaacaccactcgacccactagaaacccaatcggactaaccctctcgactccatttcaatctgtatgagcccacgccaatctccttcctcaacagcgaacgaagagaccaccgccatgaatggagagacctatatgagtttattgatttagaattaaaatatagacgaatctttgttatctatgagtttatgttagatttagaatgttgagtttggtcgaatctgcgttttgggcagaaaataagttttacgccaggtttgatgcctttctgttgttgaaatgagtgaaggttgaagacataggtccgatgtaggctcgatgtaggtctgatagtggcccgatgctatccatttatttattttttatgttattattgtacacaaaaatgggtaccatcggacctacgtctacaacctttactaattctaacaatagaaaggcatagagttgcatcggaccagtattgcaccatatatatagtgcatatttgagtagcatcgagccactgtttaggggtgagcaaaaaatcaaagaaattgaccaaaccgagtacaccgaccgtccgaacaccgaaaaaactaacaccaaaaaaattgaaaaaccgaaaaaaccgccttcgattaaaactgcctttgcacggtcggttttagtgtcaatggcaaaccaaccaattaaaccgcgaaccgaccaaacatatatattatcactatacatatataatataattatttttgtacatatttaatatacaattttattaaactagttttacttcttatctttttatttaaagtcttagttattcattgctttattttatta

SEQ ID NO: 295451 - DNA, 5111 bp, Cannabis indica
ttttttgaatgccgaaacaagtaaatggtgcatcaatacatccattttaagagggtatattgtaaaattactctaagttatattattaaaagactccacaactaaatgagcaggatttataaataaaaggtattaaataattattattaaaaatataagatactaaattttcatattaataaaatataaggtactaaataaatatttaccaaaaagaaagatagtggcgtcgtcttttgtaaactttctttctatgatatggctcaccctcacatacactctcaactctgcaccctgcaactctggctgggatttcaccatcttccacgtctacttgctctctctctctctctaaaaaagtgtgaagattttctctttcatactagttctctttcttcgcgctttcagtcactgactcttagattgcactttcaggaaagttgtatctttttttatttttattttcacatgtttaatgcatgtggaacttaatttccccaaaatatagtgtctcttgttttgaactttagtaggttttaaaagaatttccacgtagattattaggtcttgaggattctaactattttctttggattacttggttttttccgttatctttttctagatggtgtttggttgaaattattaattaatgaagaaagtataatctgggttttctaaacttttttatttaatgattagaaaagttgaaaagaatgaatttttaatgccaaaggagcttaatttggaggttttttgagatctttggttgtcataaagaattggtttgactactactttacttattaaactattttaacttactgataaggactttattatttaaaaagaaagattttattctgtaaattttaactgcaaaaagaaacaccattattttttttttcatataaagttcaactgatattgtctcatagcggggttttggcctggctttttatttctccatgagtttctttattctgattctttgaactatgcattcagaatcaagagtagtttctttggaagctattgaaaatgaacaagtgctttgatctttggaggcatttctgagttagcaaagaagttatttttccaaagctttcatcatgcctttatctgagctatatcgcttagctagaaggagggttgatacaactcaagattttccgtaagcccttttattctctattggtatttttttttgtttcattcatgtcattgaattgcattatagtttcctatttaaactttgtttttttttctttttttgatgcagacccccaaatgatgtttttgagcttgtatgggagaatggtcagatttcaacacaaggtcagtccactagaactagaaaagacccaacttctcactatttaccatcttatacccaaaaatctcgagacaaagatgtaggaaatagaacaacttgtaagacaggaaagtttggaactgtggatgctgtactaaatgaaattccaatgtctgtgccatctgatgaagtgggtttgagtcatgatgatgatatgatgccatggttgaattatccaattgatggatctttacaacatgaatattgtcctgatatgttgcctgagttatctggtgtgactgttaatgacatttccaagagtaataattttgtatcaaatgataaaagtagttgtaacctgctatatagggactcgaatgctagttctgtaggttatggtagtagtttggatcaaaggcaggggtctaaggttggtgctaatattttaagatctaaaactggtactactcagttgtatcaatcatcatcatcccaggattgccaaacatcctttccatcttttagatcaagaggagtggatgcaattgctgacaacacaagtagtgctgcccgccactgtgtttgtggcgattcagctctcattccatctcctggtagttttcctagccaaaaaatgcagaagaaagatcctataccacctactaatagttccaatgtagttaatttctctcatttctcccgacctgttgcccttgtaaagactaatcataagaacaccaatgactctaatgcaccgaacatggagagttttccaaataaggataatggttctgcggcaaatagtactagtcctcctaagccaacactaattgattcaagtagtagtttaaggaaggaaactagtacacattgccaaaaaatggcttctggtattgacttgaaactttcagaggctaggcctcttgaggagccatgtgctgctaaagatacagaagctgtttccctggaagatgcttctaagaatgatttaaacttcagtcaaattccctgtgaaagtgcaactcgagctccacgggatggtgaaaaggctacagagcctgttgttgcttcttcttccgtttgctcaggcaatagtgtggagagagcttcagatgatccaactcatgttttgaagaggaaatttcgcgacactgaggattctgaatgccatagtgatgtaagtcaaaatactgatttttagacatccttttcagtaatttcgagtcttcatttcactcttttcgtttcctccataaaccaagaagatgtcatcatgttcaggatgttgatgaagaatcagtgggtgttaaaaagactgctcatactcgaggctcggggtccaagagaagcagggcagcagaagtgcataatttatctgaaagggtaaggagttcagtaatactagttttcgctataaagaagtttatagttccctttgcagttcttatttgaattctttttgaattttaacatcaagctgctactttattttgaccttattaaacagcgacgaagggatagaattaacgagaagatgcgggccttacaagaactcataccaaattgcaataaggtttggagatgtgtccatatttcttggaattactaaattatgtacactttccaattgatatagagactggtttgtccttaaattatggtagtgtatttatgtagccaattaaagatttgttaatctctgactgtcaaacttaaaactctattgtatttctcttgaattcaaagtttaacttttctctgaaaaaatagttacacagtggagataatcctaataatcatagaacttgagaagtctcactttcttaaatttaggctaatatttcattcttacacacacacacacatatatgtgtatatatatttcttttatatgttttggctgatgttcttgtttaacaatgtcataattaggtagacaaagcttcaatgcttgatgaagctattgagtatctaaagacacttcaacttcaagtacaggtagacttcctctaactctaatagattcagatttgagaattaactctttaatttgtatgttgatttatattatggtactatttttgaattttatgcagattatgtcaatgggagcaggtttgtgtatgccaccaatgatgttaccaccaggaatgcaacatatgcatgcatcccatatggcacatttctctccaatgagtattggaatgggaatgagtatgggcatgggttacggagtgagtatgcccgacatgaatggaggatcatctggctatcctatgattcaagttccccctatgcacgcagcacattatcctggcccacctattcctgggcactctgctggcatgcatgggatgacaggtcctaaccttcaggtgtttgggctgcctggtcaaggaatttccatgccaatgcaacgtgcacccttagtacctatgatgggaggaactttcatgaagccatctatgggattaaatgcttctggggtcggcgggtctgtggagaatatggagtcagctcgtccgtatacctcaaaggatccagtgcagaatacgaccactcaagtggtgcagagcaatggtatcggtggctccacgaattagacatctactcaggtctgtgcatgaggtgtgacataatattttcttagagaagaaagccaacatgttggtccctttgttatcttttgttcaccctcatgtaacttcatttcttctcagtataattctgattggagttaaaaataggattacttatcgtcactgtttttcttctggagtacataatctctatcataataacctacttctagataataggttcttaagttatttagttattttaaatttccttaattgtttcagtatctttatcattgagaatcaatcttatttaaactttcctctaaaaagaaaagagagattgtaaatacataattaaaatgtaatgaagattgatggattggatgtgtaaaatgactaaatggattgtttatggaaaagtactcctttggcatcaatgttccatgatgagtattgaaatgttctcttggagaaaccttattctgttacaccatatagtaattctctgcttttggagagaaaaaaagttggaagtggggtttatttcataaatttaaagtacttggtttctgttctacaattcgctgccatgtttatgcattctgctatttactttgatcatcatttgacaatacaattcacattcattcttctcttgtgattctagtgtcaacccacaaatgaggggttcgaataggctgctttggtgcagagcaatgttcaagtatcagatgtcaatggcagcaaagttcccgactctactaacgataaacgaggtcgggtcctaacaagtaagtaaatattgaccaaaatgctttctctttatgtgtactttacttttgtttcaggttatgaaatgataaccagctctaatcttttttttatttcaggagataaacccaatttgcaactgcttattttcttgcttgtgattttcaaattatcacaaaaatttagctaagcaccagtactagtaggttagaacttaagagtcaatgagtttgagcatgtacaataatttcaggagggtactaattttgttgtcttgagaaaactcagacttttcttttcctttctttcttttcattttgtaaattaaactagtgacatgtgttgttaatgtaatgcaagagttatacacaacaatattatcaaggctaattagtaatttttctccccgaactttgacatgtactaaatcatgcccccctgaa

SEQ ID NO: 295452 - DNA, 4696 bp, Cannabis indica
acatatatataacaaaaaattaacaacaaatgaacaaaatttcaacataaaaagaccgtgttttatgtaaataaaatcaaaaaaatcgtaaaaatgtttaaaattccgtaaaaccgtatttttgttgtttttgtacatttgtaaaattaaccctaaaatttaacactaaatttcaaaagatttatttgaaaagtataaaccaagcgtttgaagccacgtgggctcggaaagttcaggatgaataacattatttttttcagttatttatttgctactaattaattttttattaattgaaagatttttcacttcttatttattcatgtgaatatatatttcatttttcaataaaaataaatagtttctttaatttccaaacacagttataaaaattaggcccaatattaactattgtctgacctgaatgacacaaattttacatctttgagatggtcttataatgatgccatggttgattttagatattttccaaaaatgataacaaattaaaataaaaaacaaatagtaacatatagggatatttgcaatataaaatatgtactttcctcaaataaaacagatgtatgttgcgagtgttttgtaaaaatagcgtttatgtaaatttttattggccaaataattttacaaaatttttattagcaaaataaccatgtatggtcgcacaaacgatcaaaaattacactgtgcgaccataaaacaaccatagatttacactgtgcgaccatcatggttacataaaataaattaagtgagattattttacaaattttagcatttcacattgttagtttgacaaatttcacacaagaaaagtatgggaataagggagaagaaatttccaatttagagctatttatagtccctgacaatatacaagataaacagactcactttacaatcaaacacttttgcaagtcaagatgccatatatgatatataccctttttgcaagtcgatcacataatagttcagaaagaattcataaaatgtcaatgcaaatgcataattgacaaatttacaaaaaagtaggattctaaatgtctgaacttgctgaacaaaagtgtctggtttaccctatttaagcccaaaatcaatatttagggtaccagaacatacccttaatgccctctggatcaggttcgaaacccaggtttcgataaaattccacaactgaaaaaaccataacgaacagctcaagttcaagcttcaagtattaaagtataacagcatgcaaatctagaaaaagggtgcaaaatctaaaaaatctttggttgattagcaaataacctaaaggaaagaacactcaaagaatatggaaaatttaacaataaaaattaactaatctagaaaaacaaatccttaattgtaatccaaaatccactatataataatgttgtcataccttggctatccgcgaagagtgtaatattgcctatgtccctctgcagaagtgcccttattatcttttcgacaagagccttaccaaggccttgaccctgaatgataggacagtcagaaagctacagtatcagattgaatacagtcagaattaatgtgttattgtgttgacaaatcacaaaaccatgtccaactatttttcagttagtttcgccttcaataaagtgcaacaaaataccccagatagccgaaacattacattacccgatcaacaaccacaacaataatgaatttggcacaaaaaatttccattgcttcataacattgaaataaatttacgacaatgtaggtttggctcacctaagtgtttaactaaaaaaggaaaaagcaatgcacaatttacacatataaatgaaacctggtaagaaggatcaacaaggacatcccagattgtcgcattaaaggcatgatctgatgtagcacgagccattccaattagcgtcttttgatcatctccctctgtcaaataacttcaaatacactaagataatcatcaaatagttttatatgtaacaagaagcatattgtataacatgcattacaaattcaataggaaataagggcatgacaagactgttatgtttgctgcatacctgatcctggtaactttcgaactgaatgcaaagtagctaccatgtagctattttttaaagcagcagccatttttgacagaggcctccgaggccaacctacctatgaaacgtaaaaatcaaatttaacattttccactacggaaaatgcagtgataaaattcattcacatttctttaagaatctgaatttcaatcagagatgattcaatcatattacttacaaaatgggatttcctaataataggtataatcctttgaagcatgtgaactttgtacagagaacaaaaattaccttatcacataaagattggagatcataaatatcaatttctccaccagaagaaaatatgatctgttcaattgcaccatctggttcagtcttttcaacaagaacaaattcttcgggcaaaggttcttcctcttcttcaagtgtggagggaggttccacaacttgtgtagtactattcttaagaaacctgaaacaatatgcatttatttatacagctattcgcaagtaaattatgagtaatacataaaatcacaacttctttcataacaaagaataaacttgctaacattaaagttccacataagaaactaaacaaaatatcaaattacccagatttaatggaatcccaaaatccagccttcagtcgaaaacccttatgtttcttactagctgcaagaagaacaatacccagtacagacacacacacatacatgtactatcagatgcaaaatattgttaatttaaaatcaattactctgcatgggttaacacctagtttctcataattacttttatacgaaagaagtttaagggccatgcggttaatggctcgtttccacttctatggttttgtaagggaaacaacagaaactgcctattaaatcatgttgagaagagcatttctggaaacacccttgatttgagattcaaaaaagacaaggaaaagtcccacacttatttactctattttggttccgcttcgataataacataacattttgcagcctaaacagctacctcaccatcctgatccagtcatattcatcatatctttaattatttctatctcttttaataaactaaaaataaaaatcgcttttgtaatctctatctacataacttgattggcaaaacaaaatcatcaaagaaacaaaatttaagaatttaattttatgtttctctcaatttcataattgttttgcatggaatgcttataatccaagtttaaaagattaggagtaaccacgtagaagatacatattgattgttttatggctaacacttggttgaagggaaaagcacacacccattaacacttttcttggtcaagaaaaaggcaatttctagctacaaaatggcaaatacgaatacaagtgtaatgagtgtgcataccatgttttgctatctgggtatgtagattgtacggagacattaaccaattggtttcaccacaaggcaaacccaacgaaacattagggaacctacaataaaaggatttgaaagcggaaattgttgggttaagcaacacttatggtttgtttactttgaaattgaaactattaataggcaaacatgtctgaaaattacttacagggaagaggacatgagcttcactgctgccattttttagggcggattgggcggttttatgcaattttttgagcagagtaggttgtgaaaaaatcaaatttatcaaccaaagagatacactccaaaactgatgataaatctgaaaagtgtgtataaaatcaatatcaagattccagtgtactcatacaaacaaaagattataaaatctaattatgaaaaacaaaaccatactaataatatatctcttatctatataataaatgcctatatagcagaatcaaatactaacagcaatgctgaagagatggaaatgaataaaccacaagtgtccacaacttctctaaaaaaggattaccactgtgttcaatgctgaatcttcaaaaagtggaggccttttcagattgtctcctagatattaaggcgattaactcgaaacagctcttcctagttcttatatggggttaattgtgtaaaactgtcaaagagtaataaaagagctggacaaagttattgtgtcacactgtgtgagaacaaacaatgagatggcacataatttggctagaactagaagaagcttgaggttgaggatgaatgaggcacaggtaacttgttactggaactaacttctactgtttctttctagctttagttttttccttttgttaagcttctgttttggcttaagatcactttccacccaaaactagatatagaattatcccaaacttaaacagaattatttttattgaaccaaaattatgaaaatttctttagccctgaccccttattacgtttcaaacggaaaaagattgagagcaaaatctcttctgaaacatccaaattagaacaaaatctcgtagaggattgtatgagagagttcctggtataaggattgtatacacatagttcaagtgtaaaggactatgaagataccagaacatgtagtaacgtttcaaattaaaactactaaacattataaactaataatgacaaacctaactcttattgaaaaaaaaaataaaaaa

SEQ ID NO: 295453 - DNA, 2678 bp, Cannabis indica
tctttctttcttctctgttttctaacacaatgattattttgatacagttgtgtccctgtaattgaattttcagtttttaggcaaaaaatattatgacattaatatttggctttggacgcatcatgttggggagtgactttgtattaaggtgttgtggtgtagttcttgtaagttgaagaagatgcggaaggaatttccatcattctaaggtaattctctccttttcttatttctcttatttttttttcattccaaggaattttgacaatcatctccttgaatgcctcaaggtctctcgctcttcttttaatgtaatttgatatatttgaacatattatagaactttgaagttattctcattgttgtgccttagtatctaaccttgctgatccaaaagcaagttggatctattttaagtgtcggtaaagatgaaaaatgtgttgtatagcttgattggaataagcacatataacaaatgtgagtttttagattgaaatcagaatactaatataagatttatgtccaatatatatgttatttttattattcaccataatacattttaaaaacattattaatcgttaatatttatttcctaacatattataggtgattttactattggatatgcttctttctaatttgaggtacacattatgctatttaatctctatccatctctcctggtatgtttagtgaaaagatttactcaagtttagcacttacagagttttattcgggtttatgaagatttaaggagtcaacctgcattcattaatcatgttgtaacaactaatctacagttgggagctcctgggtatgttgtacctccttcaggaagccttgatgaagctttgatggttagtgacaactaacaagtttttataatccatgaaattatatcttaaaggggttaaaaatttgagactagaaattttttactaaagatgaatgtcttacttatatgtctctatatattcttaaaaatattgtctcttcttttaagtgtttgaatatgtgcaatagacacatgatgttccatctagatcttatttgaggtatgtaatatattttgacattatttttctaagaaaatttcagacttttcatattttatgtagaccttcatttgttatgttgatatagatggagatcttaattaaatcatgtgcccggtagtgaataaatgccatattattttaacatttatgctaaagaaaatctcaatttatcctattgccattattttttcttattttctcacaactatgagttattgcacaatagatgagaaattgtaggtggtgtgtagagactaatgctaagaacttgaacaataaatgtgaaagtaagtatttagtcttttagtatgtccattttgtggccctaaataaataaataataaatattattttcatatattgttatgacttatatatacataattatattttccaaaccaaatataataacacaactattactctaataaaataaatcattcacataatcattacctttagttacataaatctaaataaaaataaagaactaaactttaaataaaattaatatttacgtgccttggcacgtaacttttacctagttttaatgtaaaggcataaagaactgaatttctctttttaccaaatttaattggttccgtgtagaaaatgatttcgttttttttcttctccttaactatatttgttttattattattttagtttgatttgtttttcttttcttttccaaacacattttatccccatagaaattcaactcttccacctctcaaagaggaagagtataaacttgttatgccaaataagagcacttacattcgctcctttaaaatagacaaaataatagttaaattatatcatacatcaagtgatagtgatgtattttaaataattttaaacttgttctaaacttgtttaaaatgaataaattaatattatgtatttaaaatgaataaatattcattttaataatatagagagattaatgtatagtgtaatgtaaaagtatgaggtaaaataaagaaagagaaatgctaaagggcaccagtggtgcctagtaccctcccatgtgtcaatatcgttattggtccaactaagtatcgagtcccatataatttaatataatagtttttagggagtatcactagccaatcgcaacgcgacatgtcgagaaggtgctaagcaccaccagtgccttatagcaatgctcataaagaaaataaagttttggtgatgtattttaaaaaataggataggaaagctaatgtgagtgctagaacatagtaagcacattaagagcatctccaatggagataacatctagttgccacaaataaatacatcatcttaaaatatttttgttattattttctcttttatttacatacgatttgacatattttttttaaaaaaaaaaaatcttaaatagttaacaattctaaacatatatataaactttaaattaatcattttttttaatagatgatatgagagaatctttaatagcatctctaataaagcaatatttatagttgccaaaagcacacatgttataccctaattttgcaaaaatagaaagagtaatttacggtataaatacttaagtttagctgtcagttgtaaataaatatataagttatttagtactataat

SEQ ID NO: 295454 - DNA, 3433 bp, Cannabis indica
aataactaataatatttttttttcaattattaattgtatcacttctaaataaagtagattataccgaacataaaatttagtatacgtgcctcgcacgtaattttttactagtagaatagatatatacatatatatatattgatactatatatttaggtgtccataaacattaataccacatatggttttacataaaaatattacacaaaatataatttaatataatactatacaatacaatacgatgtaatataacgtaccaaacgaatctaagtgtaacaaataatacagttagggcagagtagccgctagaataaagttcgagtatttaagcgtaccaaattataaaatttgggtaattttgtcacaattaaccctgttagataaaattagactttgtattacaaattacaataaaggttgtgcagggttccaccttttaattcttgaaacaagcaaatcagcaagaaatagcaccaggcttcaaaagaatgtgaggtctaagtacagcaggaatagaatacatctaaaaactccattgtcgaatcaatccactcaacccacttttaccaaaatccacctcatccatgttgacaaacaatgctgagaaagatgttctggtagatcgacctaccacaagacaaggaacaatatttagatactcaaaaagtaaaatgagcttttctggcattttggttgggataaaataaaacaatattaaaccagaagagaaatatcttaacctaataacaataaatgaaaaatgcagagcatatgaaggcctagaaaagagattgtgaagaaaaagatcactctaatctgtgcattgtcaaatgttaagagaataatgaatatcattaacaaattagacaactcataataaaaatgaacgctgcagattaaaacttgaaaactatattaagccaagctactttactatgactttgcctttgatagaagagtcgaaatatttgcaataatctaaacagtagttctaagagtaaagagaactaaaattatgcttaacttacaatgctccatgatgtagagtactcatcagtcgaaagaaaaaaagtttcactgttagattgtagatccaacccatcattcgtagtattgaaatcaagaaactcattatcatatttattgtcacggtcaagtttcctcctctttttcttactactttttctcctgtgcttggatttttttgacactccatggtccaagtcagaggcacattcttcagatactccatcatcatttagtaaagtatatgaattagatctgcgaaaacttattgcatttttcgtgaagaatgactcccaagactcaaccgtctggcgtccctctaaaagcctgcaataaaaggcccatgactgaagcaccagccatttaaatgcttctactgtcttcagtttgaagcacccttttatgattgttgccaagctattttcttgatcagggatagcaaaaatttgggacactatatctttggtttctgcttctgcttcctcatcacttaaaaggcgtagaagctcacgtcttttagtcagcagcgcatttaataataatatctgatcaaaagacccaaaatcactgcacttggaaagaattatctcaaacatacacgacgagttacctaaatccttatgctccatactaggttgaagatatctttgaagcaatttcagaaattcatacaagtcctgctcttcaagagtaataagaaggtgctgacacaggtaagagaaagattcctctgttaggaactcggtgatggcattccatacatctcttgacttttccttatacatcatatcaataaaataatctcgaaagaagtttctatcaatgaacaaaatctcaccatcttttagtgactcagcaaactcactcgatgaccagaattcaggaacattttgaagaaaattctccacagttctttgaacatccaaatcaagaaagtaatggggctttgtcgcaaccactgctggtgattgcccatgttttcccttccactcaagttcctcccaacatatatctcgatttatgaaagcaaacttggataatgccttagcaccttttccatgctctattccgccaccagttgcaccaaaattagagaaccacttaaatattcgtgttgggtggcctgtaaccaaatattataccatgatcagaattctacaggatccacaagaactggagcagtctgcaaaaatcctatatatgagccatgtattcactattcattaataggaaaatgaaattaagaaccacaatgatcattcaaagttatgcaagcatcaaacacataaaacattgaattgctcgcagaagacatataagtatcagagattacttgagtgcaggataaaattaaactaaaggacttaaagttaaactcagaattgaaaaccatcaggaaggaaagactatttcaacacagcataacccaaatctaattagaacttcacttgccttcaaagaatttctctagtatgtaacttttcttggatatgagataccctgctttttgtggcatcttgtcgaatatcatttcaaggagctgagatgctaaactatactttattggcttagacctcagtaagtccataaacatctcacattgatggcggcaggcaatggtacttatgccagaaatcgtcttacaaagccatagccgagcttccgatcgacctttagatatcaagaaggactgaaccacagactccaacttacttaagagagatattctaagcttggtagagtcataagctccaacatcattccaattgggttccgtcaagaacaaatgaaccattgtaagtctggaatatgaagagttttctcaaaaccttaacaagatcctggacaataaagccatgcccaatttgattaaacagacactatatataagacaatgaatatcagaatttaaaattttgggatttaaagaagagccgttgacatcatagacaagcaagcttcgagctttagaaaaccaacaaatgtaaagtactaaggcaagcgttttcatcgtcacattgctaaagctatgaagggtccattggacacagcacgttttctcttaattgttttaataaacatgtttggagaagaaacgaataatcatcaatcctccaggattactcaaaaaatatgaacaataaacagtaatatagaatacctggcagcgatgaagggtagagaacagccctagagagttggctggagagagagagaagttaggggtttcaagggtttgtcagtgaatttgataaagaagcaaaatgaagagattcaagagaaagcagtgtgtgctagtaatcaaggctgaagaatgaagaagaggaaaggatggagaattagcagctaaagtattagtcaatattttcgcattcaataaaataaacaaacaaaaaaaaaaaca

SEQ ID NO: 295455 - DNA, 3185 bp, Cannabis indica
gtatttgctataaatacttctggatgtaataaagtgaactttgtttttcaagttaattctctctaaaattctctgttcttctcaaaattcatactctgaattctacatagtatcaaatttccattgactcacgtcaactatggaatttacttccactgatccagctctcaaaactctagaggacctcactcatgccactatagctcctgcgatccaaatgaactccacatctccacatggaatcctttctctcattctctcatgtctacgttaactgtcaaactcgatgtactaatctcctttcttggaaattgcaagtcgttccaacagtcatcggccatgactttgacaaaattctcttcacaggccatccaccaccttcaaccttaatcaatagcaaccctaacgttaaatatggctagtggaagcgcaaagattaactgttattatcttggttgttttcttccatgacggaggatgttcttgcctttgttgctcacttcctcacctctgcttacaaatggcttgtgttagaacagatgttctctagtcaatcaaaagcttgacttctgcgattaaaagagtcagttctcaattgtttgcaaaggtggtctctcaatctctaactatgtggacaaagtgcaatccattgatggttctcatatcccaactcaagacatcattctacagcttttgaatggccttgggtctgaatttgacccagtcgtctccgatatcactacaagaagtgatttgcttactctttaagaggttcaagcgctcttgctttctcatgagagtcgtcttgagcaccacgacaccatggtcgatctcaccatgaagatgcaagcgaatgtggcaattgggaattcaagaaacacaccttacagactacctcagggaaccaagaatgttggacgtggtttctttcgtggatccaattccaacaatcgacaacaatgccaattatgtcttcgatttggccatacaactccagtgtgtcattattgatttgataagaagtgggttcctcccaaaccaagcacctttggccccaatggaaacactagcaataccactactcatcccctcgtgcctacatagcagagcaagaatttgattatgatcctcaagcctttgccacctctttcctcctaattttggtgatgactcgagttgatttgtagacacgggtgccaccaatcatatctctcaaggcacaaacaatcttgacttcgccatggtttacactggttttgagggtcttactattggaaatggcaagaagctcaaaatctctaatattggcttacccaattcacctactcctaattcttatcccataagattaaattttgttctacatgttccctctattacaaagaatttagttagtgtattccaactaactaatgacaatcatgtttaccttgaattctataaaacatgttgctttgttaaggacaaggaaactaagagggtgttgcttaagagaacccttaaggatggcctatacctactaggagagtcttccagtcacccaagattgaacatgccaagtcaaacaatgtcatattcttgtaatcctactattatgttgtgtaatattcatcataacaatgtccatgtaaccacagaaacctcttgtacagattgtgatatcaataaaatcaatgtttctgatatctctaattcttcaccagttgtttttcacactagtagcaagcataataacataaataattagcatcacaaacttagccatcccttattagctgtcttaagaaatattttatcattggtcaatcattcaagcaacttcaatcaattaaaattttgtaaagcgtgtcaattagggaaaatccataagcaacatttttccccatatctagctctagagcctctcaacctttagaattgattcatactgatctatatgggtcctcacatttagtgtctaaagatggatataaatactattttcatttcttagatgactatagtaaataaatctggataaatctcttagttctcaagtctcaagaatttgacatgttcatcaaattcaaaagcatggtgggaaaacaattcaatttaccaattaagaaagttcaggatgatggggaagtgaatacaaaccatttgccaaattcttaactgattaaggcatactatttcaacacccttgtccaaaaatgagtgaacaaaatgggagagttgaacaaaagtacaagcacatcacaataactggcctcaccatgcttacacattctagcctaaacttctcttattggtgggatgcatttcataatgttgtctttgtcatcaatagattgctaacaccagtgctaaataacaagcctccagttcagtgtcgctttggcactacactagattattcaattctcaagccatttgggtgtgcttgctacccttatttacggccgtacaacagatacaaaatggaatacaagtctcagatgtgcatctttctgggatactcttccactcacaaagggtatctatgtgaaaatcaagaatgcatatagtatatagcttgtaatgttgtgtttgatgaaaattcttttttggcttcggttccatccacttcacatcatgtatcctctaactcaactttgaatgttcccactgcttttttttttctgcatctcagtgtgtaccacaaaatactaatgcccactctatacttgttgtccctgagcaaactataccttctaatatggccacctcatccagtaccaacctcctggtctcctctactcgctgcccacatatgtcacccctagcatctcccccagtacctcaaacagttgtaatacaaccattaaccactaaaaccaccatacaaccttgatcgtcacaaatagatttaccacaaatctctcccctagacatttacccctgccaaatccgcaaaccaaagtgtcctcatctcaaccgcaacctaatttacctaagccttctttacaatcttccccttcccttcctcgagagacaacatcaactataataggtattagacaacatggcatgagaaccaggtcacaaagtggaataactaagccaaaagtaagaaatggccacaaggtatcctttgccagaatcatcacttcccaatgaactaaaattgctcaagacagctattgttggttttatggtactaa

SEQ ID NO: 295456 - DNA, 1486 bp, Cannabis indica
acaatccaatggaatagcaaagatttgggttgtcccaagccccaaagcgacttcccattttcccataaaatgattcagagaatttaagctctcctgtcagattgtttccattcaggtagagagctccaacacatggcagagcagcaagcattggtgagagatttcctgaaaggttgttatcacttaaatccagaaacctcaccctctttaattctgatacagactctggaatctcccctgtcaaaccagtgttagagagatctaacatctctaattgctttagctttttccattcaagcctcattaggtctccaccaattggattattagccaagaccatctgttgtaatgaaaacaactcctcaaatgacttagtcaacccaccagaaattttgttgttcctcaaatccagaagagtcagaacctttagaccactaatctcatttggcaacttgccttcaaataagttgttgctcaaatcaagcttcagtagtgaggttaatctcccaagtgttggtggcaaaggcccagatagtaagttcctactcagatcaaaaattaaaagcttactcaatccaccaaagctatgaggaatgtgaccagagaacctgttttcagcaagaactagcctttgcaactcagctaagttgccaatgttagctggtaattggccttctaatccattctcaagaagtactaatgattggagtttcacaaggctaccaaaattagctggaatttcaccaacaagaccgggattcaatcgaaactctaatgactctaagctgttggatagtgcttcccagcttctacttggaatggtaactgggtggttttgcctcgaaaagcaattgaagaaggataaagcttttaagtgcttaagctgctcaaagagtggagatctaaactcaacatcttttgtacaaccaagagagttctcatgaactggtccaatatttaaggcagttacataccaaagcccatcaaatatatcacaagacaccccctgttaacaaaaacaccaattagaattaaaattaatgtactgctatttatttggtaatttcttttatatatatacatatacttttgctttatgacataataactgagctcaaacagtggtatacatgattttaaacttttggcttacgaaagttaataatacactgtctacatgactaaaggtgatccaaaaaggtttgtgttgtttcctgacataaataatgcaacaatattaaagttacatgatatttagtaggaaacaagtttttgaaatgtgaagccaaaaacagaaatcttaattccaccttcactaaatgtaaataccaatgaaattgaacttgtacttattttattttccacagatttgtataatatcattttgcgactttgttctactcatcaccaaaccaaattttgtagtaataataagttgttaggtcacagctacctttgataataaatggtagacgcgggtaaaccg

SEQ ID NO: 295457 - DNA, 5195 bp, Cannabis indica
cacatgcctatctcgcacacccttggcttggccctgacccaatcgagatatgtacatctttcacacaagttctcctaaaataagagagaccttacaaacaaaagagagttgcattgtatggagaaaaaaaatcaaaccaaaccaaacaagaaaacttggaaatggtatgatctcatttggaaatagtatgctatgaaatgtctcattacacatatcaaaccaaacaagaaaaatcatcccatcagccaaattattcacccaatagtaagcacctttacagtaaatgccattgtctctggtaaacatacatgcattaacttctatatcagtaataaacttccaataaatagttcctaaagtgtgcaccacagctattggatctaccaaatcctcaccccaatcgaaaatcttaacatacttgtaagtattagattcgggatcatacccaaatccacatcctatacctcatcgaattcctcatgaatctcgggtagagatagaaacttgaattctttgagtgctgggttgaacaaaatagccgacgttgcagattcctcatcaaaaatgtgaatgatgccattacaatgaaagacaacgcaacctaatggcaagtcctctgcatcttcctccattaccggcggcgatataggtggaaatttcacttcttcaatgacacaagaaaggtagtcatcatcatcatcatcatcatcatggccaccctcgcaaaaagaaatcattgcgaatctttgaaaagcggtacagcacaactggggtttggctgattcttctagatgaacccaaccgataaagatgttcaccattttcatcttggcaatgccaagaaggtgtttgtttacaaaataacgtctttcaatcatattgaaccaagacttacaaacaaacttacaaattgtaagagagtcagcatccaaactcaataaaattctctccactaactcctctggtagctgccaaaacttgcttgtttttccaaaattaatatctaatattcagtaaaaaaaacaatagtgagtcactaaagcatgaaattactacgattcaaccttaaaactagtatttattgattgattggagatttatagaaagtgtatactaactagtttgaatcgaatcgaatgagttgtcatattccttcttcctggaaaataagatacatgaaaactgtaaattacaattataaatataaacaatgtatgttgtgatgtagagcgagtagactcacgtttgaggtgattcagctttgtcagtagccatggctttgagttggtcttcgagatcagaaacttgtgagtttgttaacccaatttttgttttctgataattgaataaatgctatgagtgtgatcgaaatttataataataaaaaaaagaaattcagaagaaaatgcctaaaacaacaaagtttttatatggagaatgtaatgtaatatccccatttccaagaaaaaaaaagaagaaaaatggaggataagtcctttcttctttcttttcttttcttatgcaacgaaataagttgtctttttaattatgaaattgattgtttccaatcaaataatggaatgaataaaataagcttaacatcaaataagataaaaatgttaagtaagagaatgtatttaatactaaatggaaagtcaatactaatatttttaccacatgtttaatcacacaaacatagatagcaaaagcaaatgactaattctacattatgattatgaaaataagatcaataaacaagaaagaaggagaagctaaagaacatgcaaagctaccacttttctcatttatgaactaaactaaattaaattactgttttgaaatccaaaacttcatcaacccaatatttaccaaattaaagtgtgccatttcctacttacaagtatactaaattacctcatcaaacttctcaaagtcactgtatttgctttgcaatttatcaacaaacactctatcaaatcatatgccttccattatgtgtttcttacttcatcaccagtaatctccacatgaacactgcccgccattaaaatggtgaaaacggctattgtctctcacaatgatctccctccctaaaattttcgacataaatttgattgctgtgtgacagtccacacaaacccgaatgttctttgtgattcgaatagttgtaccagcaggcgagttgatgaccccaaaggcaatagcgagtctttcgctatggctaaacaacaatgttttcttttgttcctcatcaacatcatggagaacctcatttgtgtcagcaacatacccttctctttccatcttctccaaaagaactttcaaagcctcattaattctgtcatagtaagggtgtgatttgtctcctgcactaaaagcatgaaccttgtttttaatctcaatccagctacaagctggcttctttctcattcccttgttcctcatacagattctcagctttgccacttctttccatctcccagaaatagcgtaaacatttgacaaaagcacgtaagcagccatgttgtcaggatcaacaccaaatattttctcagcaactttcacagccaattcggtttttttatgaattctgcaaccagccagcaatgtaagccatacacttccagttggttctatatgcatattcaaaataagctcataagcttcctctaaccttccagctcgaccaagaaggtctgcaactgcagcatagtgctccaaaccaggagcaatcccataattttcagtcatagaattaaaatactcccacgctctatcgatcaatccagcatgactacaagcagttaatatagctataaatgagacataaccaggttttattccctctttttccatttgttcaaatagggaaatggcatcatttccatagccattcaaagcatatcccataatgatggcagtccatgacactatgtcatgtgactctattctatcgaaaatccacctagccatcctaatgttcccacatttaccatacatgtctacaagtgagctagctatatacacattttcatcgaatctacccctaataatgtatccatggagttgcttacctaaatgaagagttgttaagtgagcacaagcaggcatgatactcgaaaaggttaccggcattggctgaattttagcacttaacatcagcctaaagaatctcagaccttcatcaaatgctccattctgtacacaacctgcaatgatcgaattccatgaaatggcatcacgacgaggtaaaagatcgaaaacacgaagtgaatcttccattctagtacactttgcatacatgtcaattaagctgcttccaatgaatacatctgaatcaaacccactccttatggcataaccatgaatctctttacctttaataacatccacatattcagcaaatataggaacaacactagacaaagtgaaagaatcaggctttagattagcattccccatttccctaagcattatcaaagcctcttcatacataccattctgtacattccccgcaatcactgtattccacgaaacaacatcccttttcggcatcaattcaaacacttttctcacactatcatcaaaagatcctatttttatttcactttcagaagaaccaaagcttagatctttagtacaacaaactccctttcgttgaggaatttcatcaaacacattaagagcaacaaagccctgaaatttaaaatacatattcatgagagcattacacgtatacaactccgaacccataccacaacgaataatagacccatgaaccgattgacccaatctcaaatccatgattacagcacatgattttaggacagaagggaagatattatgatctgggtatatcccaaagccacgcatttgaataaaagaatagagagcttgatgaaaaagagtatgggaagtgtaggctctgatgatggatttccatgctactaaggaaggaggagagtgaagtgtgtgaaagagaagaatggtgtaatgtaagagattgttgaagtttgagtagattgaaattagtgttgatgtgtgagaagaagatgaggtattaccagttatgataatttgagcatgaagttgtaaagcttgaaactttgttttgacattacctggattcgaaagaatccttgtcagcatagttcggttcatcggatcatctactggtctgcgatgatcactgatcaaccaccagtaactgcaatcactgatcaaattggaatattttgacacgaaataaattatgtctatttaaattattggattcgaaaactttgtctaattctacttcactttattaacaaaagcatggcgtaaataaaagtctacagagcacaacatttgatatatgttaaaatttagaagatgttaaaatttatagacacgatttaatacatgcacaatcatagcagtagtaaaattgaacgaaattggactgaagtccttatatctaataatttctaatattttagatcaacaatctgaaattattggattaagagttgaaatctttatatccaacaatcttaatcaacgcgtttgtgaagatcaccaaccaccaacagctccaatcattagatatagtagaggattgaatttattgagaagagaattagaatagtgatttttaattttatttttgagaacaatcaaccattttttttttttcaaatttaaaacattggattcgaattagttaccataaccctaacaaaattcatttatgggctgtttagtatgatttaattggcttttttttcttttcttccgaactttgacatgtaccaaattgtatctttgaactttttagatggtaaaattcttctcgaactattgagattattgaattcaaaaactttcgtccaattttactaacggatgcctaacttggatgagaatttaagatcgcgattcattacatgttaaagtttgaaagtacaatttatatcaaagttcaagaggcataatttagaatatggacaatcgacatattagtaaaattaaacgaaattgaatagaagtcaacgtgaaaagtttaagagtatgatttgataccaaggcagcaaggccgaccctggcataggagggttagtcctgtatctagggctcacactttttgagggtccaaaataaaaaaataaaaagttttattaggcttttatttaagtaaaattaaatgtattgta

SEQ ID NO: 295458 - DNA, 5075 bp, Cannabis indica
aaagacaaaagcattttcttcctccaagaagatgacataatgggcgtgaaattttgctaaagtctttaatgaatcttctataggaactagtatggcctaagaatgatctaattttttttactgtcttaggtggagaaagttttaaaataagatctactttggatttatcaacttctatttcttgagatgaaatcacatgccctaagacaattccctttttaaccatgaaatgacatttttccccattgagaactaaattttttctttgaaacggattaaaacaagagaaagatggtgcaaacagtcatcaaaagaatttcaaaacacaaaaaaactatccataaacacttcaagatttctttcaaccatatcagaaaatattgctatcatacatctttgaaaggttccagaagcattacaaagaccaaaatgtatgtgacgatataaagtaatcattctcactacttacctaacaaagtaattctaatacctcacctagcatactaatgtactatcattgtcaaatcagacaatctgaaaatcattctctagtattcataaatctcattgcctaataaggcaagatgatgccctaacctggtattcatatatcacattgcctaataagacaagtcgatgccttaactcgacatccatatataacatttcctaataaggcaagtcgatgccctaacctgactttcatatatcttagtcattgcctaataagacaatcgtcaagtggaaaacctaacagcagttttcatttatagttatgacttttgatacctaatccttcggtatccaaacatcattgtctaataaggcaaactttttaacattgtataataagataactttctcatcattttctaataatgcatcctttttagtcatataatgataataatcgtattttaacctcaatataatcgattcacaatgattacaattgtgttgtaacataacatgctatgtagtacaatgtacttttcttactttaaatctagattcatgcatgttggccaacccaaatggagaaacatgcttgatgatctcagccctatgtcgtaacaacggtaaaccaataagtgtctatcccaaaatactgcttaatattcgcataagaaaatctaaagttttctaccaaatctcatggtatgaacaccctaaaataaaaaattatatttagctctaaaacatataccttattatagagctcgttgcaagctttaacatggtatatagaacgtctaaaatagacacctgagtgaaaagatatggccaaaatacgacttttgatcttcccaaaattcccaaaaacggttaaccattttctgggatttcctggcatgaaacggttaaccgtttgtcctaaaaggtggatcatttttcgttattaatgggaaccccgagttttacacatcttaaaaaatctaccaaaacttaaccaattgattccaaatatcatagaacacctatataacatccatacaataatttcaacgtaatagaaataaaaaacaagcccttaagcaaaaaatgtcattagagcttcagctttagcttgtgaaggctctttcacattcttcatcccaagtaaacttcttgtttcatttgaggacattaaagaatgggagacacgtgtcagtggactacaaaatgaacctattcagtgcaaccactcgcctcgtcaagcactggacctccttcctgctcttaggcgattccatatccatcaacgctttcatctttttaaagtcccctcaatgcctctctcatttaccatgattcttaagaattttctagatgacacaccaaacacacatttcaatggattcaaattcattcggcacttgcagagagtaatgaacattttctctaagtctttaattaagtcttttaccttcttggtttttaacagcatgtcatccacgtcaacctccatgttgggatcgattgggttggcaacatcttattgagaagcctttgatacgttgcctacgcgttgttgagactaaaaggaatgaccggatagaaatacaaacctcgatcaataatgaacgaggtgtgctcctcatctgcgagatttatgggtatttggatgtatcctgtgtatgcatccataaagcaaagcaactcatgtcccactgttgaatccactaactcatctatgcccgataatggaaagttgttttttgagcaagctttattgaagtgagtgaagtcaatgcacactctcaatttcctattgggcattggaaccaacacgtgattcaacatccaaactgggtaaaatgcttcatgaatgaacttgataatttcaagccaatccatctctcctttcaaggctgtgtactactaaaaatttagagccatttccttttgccttactggctttatattagggtctatattgagatggtggcacattaccgtttggttgattccttccatgtcttcgtgcccctaggaaaatacatctacattcctttcttgaaacttcattaactcttttttaagggcttctagaataccttttccaatcttgaggactttgagcggattctctaaaatgacaacctcctctagttcctcctctgactttactctcacttcattgtaaatctgtgggtctagttcaaacaagttttctatgactttgttgagtcctcaatgaattgtcattgtcatcgaccctcgaggtttggtgcaatccttagtgacatgttgtagcattcccgggcttccttctattctcctttcaaggtggcaattcctctgggaattaggaatttcattgccagggatatactgaagtgatttacttcaactggttgagcaacggtcttcccaacacggtattgtaagctgcagggtaatccaccaccaagaaggtggccatcaccgtggaatgccaagtccgttctccaacagtcaggactaactctgtagtctctgacggttaaagtgagtctccagtgaactcgtattggtgaggcacaattcttcaaatctttaggtcaaaactccatcttcttgatggttgtgaagtacaagatgtccattgaacttctattaccaactagagtttgatgcaatctcgtattgtccatctgaaccgtgagcaccaacaaatcattgtagggaaaatgcaccccacttgcatctttctctgtgaaagtgactgagtcaattttccctttgaagcttttcaaaggtctttgttccaggctcaagactaggggctcccaccttgcctctcaggtgtatttgtctctccccttgcgagtgtcttctcctataccaggccctcctcgaacggttctgatgtctcttaatacctttggggctacgtcgtgtatttcttgcagatgcctttcatctggcctctgattttctcttctatataccctcaagtatccatgctgtatcaattcttcaatctcaaccttgaggtgtttgcagtcctccatgaggtgcccgatatccttgtggaattggtaatacttattaggatctcttgtggttatttccttccttatgggtggtggtcttttgaacgatacttgatgcttattctccatgaaaatacgctctctcaagtgagtctattccgtataataggtgtatttatggtgttatggctctacatctctcttgatcttcttattttgaccatcttccttgtattcaaatccccttttcttctgtggttcttcaacttgtgccttcctaggatgatcactctttccccctcccaagttctcatgtctatcctccaccaagatatatctttaggctccctcataaaagtcctccagatcgtccaactctctcttgagtatattgttccatagcttactttttggcctaactccagcagctatggcaatcttatgctcatctttgaataatctcctgactttagctactttagcgatgaaacgctggatatagcttttcaagcttttgatctctccttgcttaatgttggccaaactcgtccttggaatgatatagtctcaggaagcacggtgttgggccaagaactcatcaacaaattttttccaagacgtaataaactcaggagttaatcttttgaacaatttttatgtcgtacctccgagtgttaccacaaagcattgacaccttgctttgcttgtaaccctcttcatttttatgatttcattgaaggcatccaaataacattttggatcagtgattccctcgtatggtagtatattgggctctttgaaattagggggtagttgttcggattagaatttcttgagaaaggctactcatcatcaaactcatcttcgtcccaactaccctcctctaatggcctgagatacatgattgtcccaaagagacaagctatcgctttaggatgcaaaccacaggcgcaggagtgatcttgtgcctcatacactttgtccggtatcaggtggttccaggtcgcagaggtggtggcagcagcgtacccttggtcgggtcctcagaccttacaggtccaatgcctccactactcgtacctccttgctttcaaagcttccatgaggtgtggtaatacgcttttcccttgcacgccttgtcgtttgattcctcctctaatggcattctcttcgatgtgcattcaaatttcacctttattttcctttacacaaacaacacatgcatattacacaacacacaaactcatgagagccctaatacacacccacaccacgacacttacacacaggcacgacttgcgtgcgagcccccacatgggctcgcacgcaagtcaccaacccacgcacacgacacacacgaatgtaggcatgtcaaaaagatccatttagttggagcgggttggagctccgacccgacgaatcacctctgatccgaaacattcggatacttattggatcttggatcagatctgctccgccccgcctaattcttttctggatcggatcttatccgacccgatttcaatttattttacaaaaacttaattgaagacttagatcccttgggacctggactcgtacctggacccagactcggacccggacccggacccaaac

SEQ ID NO: 295459 - DNA, 4017 bp, Cannabis indica
ttcatatttatgagttaatggaaatagtagtaacatgtgtaagagaattgtaacattgagtatttttacctctaaatataaaaataaaatatttaagtgtataaaatctgaaacattaagtatttatgccgtaatttacctaaaaaaaaatattacaattctatgttaccacaaacttatgctaagtatcaatgggtgaaatccataatatcacacactaatttagtattatgaaacctcaatacttaaaaattagcattttagtgaaaaaaaaaaaaaacaaacaaacaatagaagaaaagaaagagcattaactccataaaaggtatatgattggtgatatacaaagctaaaatctaggatgtgggaagaagaatgggcccctcttttgaaaggttaccctattggtactttatttacctgcctataatggatttgcatatggacccccaaaggcattaaatttgtgagctagtggtgttgataatgggggaaatcaaagaagaaaaataaagagaatggcaaacaaaagatgagaaaagagttagtttctgtttattgttggccttttgtttcttatcaagattccatacttatctgttctccaatattatcatttaaattttattacataagacaaaattcaaatgctggctgaccacaagcttctaagattttaacaacagatgttcaaaagtgggactatggtatttttagcccttttctttgtttcttctgtttttgcattacaaagatactataactgtacaattttatttcttcttcttttctaaattgaagaataagaagaaacaagcaatttctctttgtatataatgctagcaactgtaattaaaataataattgacccatccattgaattgaagggttattttatcattattacaattctttccatgtgctcacatttaaatatttaatataaagaaatccatagctcatggcatagaagtttacctgctcagtaatctaaaagaaagaaatgctactatatatatgtatgtatattatagctcatacacacatgtatacacactgatttattattattaattctctagctttgagtataatttaaaaaaagggaatcaagaatatccatggcccatacagagagtgccatcatgtgaaacaaggaataaaaaattattttactcttctaatttttttcctttcatttattgttcaagatgacatttttatgatacaaagctttattgaaattgctggcacattaaattggtgtgccttaaaagcttcttcaaggggatcatattaggaccaccataaggtgagagtgagagagacaggcattgctaaccatttatttattttttaaaatgaagtaagaaaaaggaagaaaaaattgaatgggcttagacacctgtgtttgtttgtgtcctagagaaccatatgggtcactggtaaactctctaaaaagaataacatgaaataaataactaagttataaactattgaagttatcaaagactttggtcggctatgcttaaaaagattacaaagattctttcttcaattgacctcattagtcaaagagcaagcaacccttgtggcttgccttatgtggtgcacgcttgtttggtgttttgatcaaacatctattatctaattggtatttttttgcaaatgggcaattaaataatcacttaaactttatctctagggtctataaacaagtatgaaaataacaaaatttctcaaagagtgagagagagaagcaaagctcaatctttcttatgaccttgacagataagataaattcatggtttcagagttcaatggtggtaaaaaacactccacatgaaagtttccaagaaaagagctaagcaaatcatgaagcaaataaataaacttagtagtttaagtgcataaagagttaaaagtttttaagtatcctaatgctaaaaaccaccatgagggtacatgacattccttggaactcttgtgacgactaatgaaaacttcatgatggagcaattactttcttcacccgtgatgataataacttcacaatcacatatccacaaaactataggtcccactttctggactcacattctattattatcattatacaatgtgaaaatgggcactctactattagttagctgtgctaattgtctccaatgatcaatatcattttcattggctttatgatccaaatccaaagggtgattttcatagaaggaaaaaattagctccacaacaactaattttctttgtggaaattattccataatcgtcaaacacaccttttataaaattctacttaaaagaatgaaagaactaaaatctttctccactatctatgatttttacagctgttcagtcacaaccaccatgcactaatataatacatttatataaagtttccttgcttctttcttaccagcatgcactaatacattttggttttttccttaatatatatatatatatatatatatatatatatatctatgtgtgtgtgtgcatgaatttcctgttgcagctctagctcaggaataggctacaaatagtgattgttatatttagtttttccatataaactgataaatgttaagacacatataaaaaagaaccttctaacaacgaaaaatggtttacaaagtcttctcagatatggataaaagttggatgacagaagaaaaagaagcccacaattaacagttaccataaacataaaaaggccaccaaattcaagcagttcttaagtagaaaatagcctgataagaaatgctttgatccaacaaatttcagcaaagaaccttgataaaggtcacccagaaaggaaacaaaaaaaacagtacccagcttcacttatttctacaagtagttttctctttacctactaaactcaatgataaaggatggctaagtatatgtatatatacataaatccgcttttaaacaaaaaaagttgatggatcatgccttcttcactcaagtgaccaatttcagctacatgttatcatgcacaccttttgtatcctaaaaagaaaaaaagtgccataaaccttctttcttaaagctactatgtctttgaaaagtttcaaagtgaagtccaacactacaaaaacatggtcaaagtaaaacttgacatgctcagaactgataggagatgaacaatatgacagaaaatataatcaagtagatgaattatgtgaagattgatatgcaaagtacacatactttgggtttaatctttattgatgtacttcattatatcacatactactatttgtaaagtaccaccttttcatagaggaaaaaaaaagcaattaaatcttgggagctaaagaaagaaagggtggatcataccaactaataatggttttgacaattaacatttatctcgttacctctgcaaaaatttcattcacatctaggcggtaagttctctttcccaaacaagaaatcccacaattacctgaaacaagacataattttcaagctttatctcagttatcacctaaaagcacaaatcttttggggatgttgtcttttaagacattacagtcttttaagatcataaaacagcctgcagcatacaattctcggattggcttctcgaatgctatttatgtctgcaacaagagaagcaaatctgaatggaatagtagtgctagacaatctacctatcttgagcatatgcacaaagggtaatataattaagcttaaatatttcattagtttgcaataattttaagtaccttattaaaaccatcagatataatctaatttacagtttcattatttcaactggtgaactcaatatttcacaaaatctaagtagtatgttttttccaaccttaatatgtagttttgcatcatatacctatcttttttgctattgaccatatccatccatccatcaaattctgctaaaattccctttactacttggacagtagaacctggagtagggtgttcatccgattcaatcgtacttttggtcaaacacatccaatccgc

SEQ ID NO: 295460 - DNA, 2620 bp, Cannabis indica
tattttattttaattttttgtcaaacgatttgagaattaagcgaatgattatttgactcgtttttctaattctattcctggtcatgtctcaaatggagagatgagttgattgccattaataaaattccattatttattctgtaggaaattacccctttaaccctacacccaacagaaaaaataaatcaaatggtcaatgttaattttaaccatttacttcgagtcaaacctcagttgaccccaatcgaaattgtaccgttttgattacaaacaaaaccctcaaaataaatctctcgaaccctagtatgcttcacgcaccacaacaaaggaaaccctagtagagcttcgagtttcttaagaagaaactcgaagtatggatctctcttaaatctagccttcttactctcccagatcaaagactaagccacacaaacaaacccacacacagtaatttgaaaaataaaaaaaggaaagatcacaccagcaaaattatagaggttccccaaatgttgttgggtacttcctctttcgagctcgcctaaaaaatgactcgtttccactattagatctccaaagatcaacttagtacagtaatggattccaaatcacaggtattgattggtcatccttttccttttacatgtatttctcttcatgtttgtttctctctgtttttttttttaactatttttcttctctttgtgtatgttctctcctggaaatggacctccgagcactaaccctagggttccaagacttagctctataagtctcttcctttctcctctttaatctattttttctgatcttctgagcttgtatttatagctttttaatctattttttctgatcttctgagcttgtatttatagctttaggaaataggtaagagagctgagagttagttgcaacggttttaacaaactttgcaactaactttggttctgcttaatagttggttaaggttgaaggccatttgcatgtaattttacttttatgtccttgtgtttattgtaatttatttgtgctaatatgttcagtgtatatgggtatttactccaacaaattctatctgactcctcatatgcactattagttgtttgccatggattatctgaggattttagctcgaaccccttaggggatttactaacccgtgtctatttagggaaaccaccttagttcccacatttgtagtatttacttctatataggcaccttgtcaatttcaatttttcttgagtaatcttgtccctgatgaaatgatatttaatctctatgtcttttgttcaatcatggaacacaagattattgcataggtagatgatactctggctatttgagtatatagtagggatcttctcaactaggtttagctcttccataagttctctcaaccatagtgcttccaccactggttgcaattgagctttccaactagtgcaatttccccttgctaagaaaaaaataggctgatgtagatcttttagtgtcattatctcctgcatagtcggcatctatgaatctctcaatgttctgatgtgtctggtgtgcctggtatattagtcctactatatagatgtgccctttaagtatctcacaagccatttcatggctttccaatgctctttccctcaactagacatgaacttgcttagaacactgattgcatagtcaaggtcgggtctagtactaaccatgagatacattgtgggccatgatggattagagtagggaacttctgccatttcatctttatgtcttaaggaacattgtcttatgtggtattggtaggtaattggttgtgtaatagtcttagcatctttcatagaaatttttgatcttggcaacgtactcttcatggtgtagcattagtttcctcttgtctctatccattatgatgtttattcccaaaatcttagttgctaccccaaagtccttcatctcaaacttagatttgagtaaccctttagccttgtcaacattggccctttctttacaattagcatgccacccacttagaataatggtcgtagtaacttctgttaaatccattgttagtcataaaggtgctaaatattttgttccattgtcttggggattgagtccatataaagacttatctagcttacatgcatgcccttatttgcctttgacttcaaaacccttagactgctctatataaatcgatgtcttcttccaggtccccgtatagaaaagttatagttacatagatatcaccactatcataaccatcacttaagttagcattgtgatagggtatagtcattcttattcttactttgtttgcttgaatcttcttgatgatctgaatttggctttcttccccttctcttgtagaagtaacattctcttttgaaatgtccaggctttccacaatgataatacctattagggtctttatgacctttagaattagatcttcatttgttgtgatggttgtatcttttgtgaaccctctaccaacgtttctgcctctatttttccaaggtttcatctgtgttggtcttcccttacttagatttaaatctccattagaacacccaggtctttgtactttcatctctaaatctgtggactttaatgctgagattacttt

SEQ ID NO: 295461 - DNA, 7459 bp, Cannabis indica
tttcactacatacatacatagatacatgccagatcaatttctactttatagtctgttccttctgatttcctgttaatctttacaggtgcgggcattgcattacttgcattccaaccgcattatccatcgtgatatgaaacctcagaacattctaattggtgctggatctgtaattaaggttgacggttaagagaataaacattttcttaatgttgcgaaattaattattaatgtcaatatcttctatatacagatgttttatagcatttctacattcatgtgattttaaaaatttccttggtaacagctttgtgattttggatttgcacgtgcaatgtctacaaataccgttgttctacgatctataaaaggtagcttatttgagcctgaaatgacttatgtacttttctagtttattgtcagtgaacgatcatataaaatcctgacaagctatactgctgtctttgctgttttgatattattttggcatttaggcactccactgtatatggctccagaattggtacgggaacaaccttataaccatactgctgatttatggtctcttggagtcatactgtacgtaacctttttttcgcatcatattttaatgatctggtttgactttactagttgaattttttgccaagattcttttgattagacttgcaaactattttaggcggatatctacttccttgttgttagctgaaattgttgttttgttacagtatagttgcggcttaatatattctcttcttgaaatgattttcatttccaatataaatactgattgttgggatggtattgattgcttgtcagcaaaataagtttaatgtatttttctggaaaaagaatacaaaaactggagctttacattttttcttgcaaagttccctatgccattgtttctatctttgttgaaacctgaaattaaattgtatgtatataacaggtatgaattatttgttggtcagcctccattttatacaaattctgtatatgcgctcatccgccacattgttaaggtaagttcagttaaaaagaatatgaattttgctatagttttaagtataagcccgcaatcttaattttcataaatgtgccaggatccagtcaaatatcctgataacatgagtccaaatttcagaagtttcttgaagggattgctcaataaggttgtcatattataatcaggaccttcccttttctaaatttataaattttatactactgacgtctaattttaatatttttcttatatgtgagggcacaggtacctcaaagtcgattgacatggccatctcttcttgaacatccatttgttaaggaaacctctgatgaactggagtccagggtaaataatattctattatatctaattcttatttagatactggcacctgaacattgtgtgattatttttattctataattccaattacatgactgttaaactttttttttccctttccagaatttacgctctgtaaatggtagagactatgatgcagcatggaagggagaagggggcagaacttatttgccatcaggttagctacttccagtccttggtgtcatttcacttaatacatttacttttcatcatttcttaatagttactgattatcttgttgcaggcaaaataaattccccttgtcctttaaagagtagtaatgggccggcctgtcagaatgatatgcagacgcagttaaatgtccctgccactactgcgggcaattcttctccacaggacttccaaggttttgcagatccaattgatgttaaagagccaggtagatgcatgtctacatgactttttccttgcattgccttattagttattattgtatgccagattacaatttgttgtatttattgtataagttatgaccataattttgattttgagaatattttggtcatgtctcaatgaaattgacagcctataaattatattcaccacttatagaatagtagaatgaagtgaactaagtaattttgttttaggtggccaaacatttgatagactggaaagtgcttcacgtacagtcaaaggagcacaaattatttgtcaagatactgaggctctacgccatgtcttgttaccactaaaaagatggccgaaaggatcttcaactccttgcaggtaaatctagttgcattctttatatcattagccatgtcactgactcacaacatcacaccatacatgtacaaagggttttatatatttatttaacactttggtgctgtgccaaatttgcagtgatcatgatattcttagttcgaatcagtcactaagaattctatcaaatttagttgctgctggcaccattcatgccagtggactacttgatgaaataatacgtgaacttcttgttttcactgccattattgttggcttgaagtcatctgacgttaatgacttgaaagcaaaggtgcttttcttaatttagaacgtagtagagtttgattattcattgcctatctgtatgttaatgactgtgatgcatgttgttagattgtttggagaaagtggaaaatggagatgattggctgttatcagatcacgatcttctgtctttagtttcatgttatttacgtcctactgttatattcatatgctcttctttggtctataacatatcagtcatctgtgtatttatttgcacattttttggcaggtttaatgatgatgtgtcattttcccccttccaattgatatgtatttatcaagcttgatccagacatttgttcctatgcttttcttagcattaatcagaaattgtttatgatatgttttgtatatgtcttgtgaaatttaataatctctcaaacagttcttgaagtagaagagctaaataaatgctctgaatgatttttctcagcgatgactttgactaattcaaacctgatttctttgtagagtttatgtatcgtgaaaattttgatggacaataggggaggaagtggcattacgggttcatacttcaggcactgggttgctttggctgacatattttcacaggttttaatctttttgggacacactggtagctcaaaataatgtcagttgcttctaagtatctcattttgttaaatatgtaggttgttggctgcagtgaagatgtgcttgggaaagttctgtatgagtccactgcctgcattactgtcatattgtcttcagtttcccaaagtttaaagacttactttttgagttctgatcgtaatgacattactgttcctatcgagacacttaaacagatcttggaacatgctaaaacatctggtttagtggatcaaatgtgtctttgtttagctatcacgggctcaagtcttatctcgggttcttctgagatgctgcgtgctgctagtgaagcctgccgagctatatggtcactaatagatgcatcagaaattttacacatgaaaggaagtgcaaatcagtttccccttactgcaatgcaaagtcattctttggcccgacttgacatcagtgatcaggaaagacggtccttgcttaattcagagtcagcaaaagtttctgatgcagtgacaaaggcattcctcagatcaaaggctgtccaggttgctatttactattgtcttcatcaacgtaatgaggcttcattatgtgctggcattcaggtatatatctcccattcttattatcaacattttacaatttctttagcaggggcatagattctcagtgattatgaaaagctgttgaatttacgtgatgtttctaatgcttattctcctctttaacttgagtattttaacatgagggatgatgtaattggtatatatgtttcagcttttgttgagatgctgtctacatagtggaatggtgcctggtgttttgtgtggtcttccaagttccctaccagtaactactgttgtcagcggcggaggggatggcaccattatttcagaagttttctctatactttcattttgtgcttcctcttctaataaagatacggaaacaggtgaagcaaataatttaaagtgcaaattagccaatcccagtgtattggttcagcattcttgtctcattgttgcaacaattgcacaatgtttaaaggcaactggaagaaactcggcactatttatgcttacaacatcccaaaagaagcaggtttctcgacttatgattcttgcccattatttctcttctgatgacagaacaaaaacttccttccaaccccatattgcctcagctatgttggcttttgcttccattctatccctcgaagttggatcttctgttgaatcctctgtttctgagatagcagtgcctttgattcctcgaactgcctcactttttgaatgccttaaaatttcattaggcaatgaaaatgaaattagtaccgaggctgcaaatggtgctctttcgtattggcatgggcttaaggatggatgtgttggtttgttagaatccaggctgaggtggggaggaccactcgctgttcaacagctgtgtgcaagtggcatccctctgcttctactcgagttgttagctaaaaaaccttcaaaagtttcacctgaaggaattgacagtaccaaagataaagctggactttctcctacaggagtagtgtggacagtttcatctataagccattgtctttctgggggaagcactacttttcggcagattatgaagagtgatcatatgaaactgatatctgatttgattggtgatgtacatctcaagcttgtaagatgctgggttggtcctggtggaggcagggatggtgtaagagatataataaattcagtaattgatctagtagcatttcctctcgttgctttacagaatgctccagggctgccttctgctaccgcctctgttaatagtggatttattctcaatatgggttcaccaggtggtagggtgtgtatggaagacaaggacatggtgaaagtaattgaagaagatatgggaaagtatattaaaattcttttggaggttagatcttttgccctctttatttcattccaaatccagttaatgtttttcttaattactaattatttattttaatatttttctgtaacatgtatatatataatgtgcaccatagtattaaaaataaataaaaaaaaccacactacatgctaagtcttctcaaccaaataaccaacgaaccccactttgttaaataaaactttcccattgtatgtaatattttggtgcacacatcatttgtatcttataaaggatctaaatattttttttcacctagtttttaaactccatatacagtaactcgggtaggaatcatgtgctctataataacgtgggtagaatgttttagtttggaagggtgttttatgtgtagaattaagaaaaaatgtacaaagatggaagatctagatccaaaaaaaaaaaaattcttccttagtttcaaaacgccatatttatattaagttgtctagaaattctgtgcgctctataactgaatgtttaaaactcatgtacaaccttgtcatactcacaccattcactaattctatgctgttttcattactgattttttatttatttttttatttttggttaatcgttatggaggataactaaaaaaatgttgcaaactgtgccttttagttcacttgacgactaaatttagttatgtggccgtgaagcataatgacgttaaacttgaaagggacctatatatgttactcatttcatttcttctgaagtttccaggtgggaatgcctgtggtcattttacgatgtttggaacttatggactcgaaagatttaggaaggcctgttgcctttcttgctaaaatgatgaactatcgacctctggcaattcaacttgtaaataaaggtttgttggaacctaataggtggagaaggttgtttgattcttcaagccctaaagaagtcacactggacgctcttatgattgtttcagatttggctcgcatggataaggtgtgtttgtttttggtttcattaccatttgtgcaacgtgtatgcattaatatatgttttgataaacaaatttatggtcgtctggatctgccataaaattgttcaataggtttttgacacttgttgttttcagggactttatgaacacatcaacagggcttctattttggagcacctgaaggaattttttactcacgaagatcccaacatccgtgcaaaaacatgtagtgctctaggcaacatgtgccggcatagctcctacttttataatgctcttgtaagttatgaagacaaaaccatacatacatactattatgagcacacacaaattcatccattggtcctgtttacttttagcttagtacctgggatgctgggcttacttcaaattgtgttttcacttttcacatgatattggtgttccaggcaatgcatcaaatcatcggccttctaattgatcgatgctctgatcctgacaaacgcacacgaaaatttgcatgttttgctgtaagtttgttgctatactagaggaaaacatttccaactgtttccgttttgttaaaactacatttttagtaagaagctctcacagttgatttaagtgttctgaagtagtgcatgagaaagcatagatatcccttatcatatatatggctgatttgtaatttgttttcctatgcagattggaaatgctgcttaccacaacgacacattgtatcaagagctgaggagatccatacctcagcttggtaatctgctgctttcagaagaagacaacaagactaaatcgaatgctgcaggtgcattaagtaatcttgttcgcaattccagcgagctttgtgaagacattgtgtctagaggagccttgcaggtttgtgggcattgttttttttggttgcttttctatactaccacatcatacaaccgcatgacatgttttagttttggattagtaagttacttctgtgtgtatttcttaatctaggtcagaattagtttcttttgttatatcagctagataatttcatcggatcttttgctgtccgatactatgaatatatacattgaacaaaatctacgtgcagtgagcgagaacagtatatacactacttgggtgtttttctggttccttggtgagaaaaattagcttcaagacttgagtatgttgtttatatgtgttagatattagatgtatattagctgtaagagagttagatatttagtagatatttagtagatatttagtctcctaactctgtatataaatatgtattattctatgaaatctacacacaattcgaatcactattttctacatggtatcagagcattgtgattcaaaattcgaaattcgaaattagggttctaaaaaaaaaaaaaaaaaaaaattaagggtttgagtttagggttgttttcgaaaatcctatttggagtgaacattctttctcaccgcccacataggaggactgcccagccgccgatctacaaacccccgaa

SEQ ID NO: 295462 - DNA, 1993 bp, Cannabis indica
taaaatatttccaacagagacttgctgtaaaattttgcttaaaaacatgtttagaagggtgtccaagtttctaatgccaggtatttagattagattgcttgcaagaaagataaacagtaggacgataatgtgaaagatcaacatttttattacttgactcaagattacaagtagtagttgtgtttacaaggctactgttatcttgataagtacagatcatagaagtgggattacaagcataaaccatagactttcttgatttagccacatctggttattgggcatgatcagcaagcacatatagcccttctttaagcattcccttgagtagcaccttcccagtttgtttgtccttgacaaagcagcatgttttgtgaaattcaagaaacacattattgtcacgagttagttgagaaacactaactactttttttttaattgaaggaacatgaagcacagaatttagactaagtggtatggaatgaactgaagataaagtgttggatccaatatgagaaattgacaatttcttaccgtctcccacagccacaccctctgagcctgtgtaaggaacaacaatgtctaaattgtctgtaccagaagtaatgttgttggtagcaccagtgtccacgaaccagcctgaatcatctccaaaatcaagcaagaaggatgtagcatacgcttgaggatcgtagtcaaactcatgttcagtgacaagagcacgaggataatgattagatgtgttggtgggctgactggttgtgcctggtttagagcccggttcttgtcaaagcgataatggcacacaagggcagtgtggcgaaatcgtaggcacaattggcactggagcctattgttctgattacttccacaaaagcctcctcgattgccaatcttgaagccttgtagtggtctgtaggggttagttcttgatcctgagaaggccacattgggttgtagcttcatggtgagatcagtaacggagttatgatgctctaggcaactttcatgtgaaagaagaagagcctgtacttcctcaagagtaagagaatcactgcgcacggtgatgcccgaaaccacagagtcgaactctagtccaaaaccatttagcagctgaagaataaaatcttgatttggaattggtgatccagcaatggctagggagtccgtgatcgattgcatcttgttgacataatcagaaatggagaggctaccttttctgagtgtaaagaactgacttttgagttgaagaagcctagccttagattgactggagaacctctgttccagtgcacgctaaacagagtgtgatgatgtgaaattggcaacggaagcaaggacaccttcattcatgggggaacgaatccaagaaaacagtagctgatcttgacatttccattgattgtaagctggatttggtgcaccggtgaccaatgtgacaggaggaggaatccctgcgagcaagatgtcatcaagatcgttccctataacagttggaagaacctgagatttctaagacaagaacttagattgatcaaatttgacggttaatgttgaagaaagagagtgagaaaaaggattctaggaggaattctgcagattgatgtgggtgtcggttgtctgagtaaggaccggggaagccatgggagcttgaacaggatcagtggacgtagactccattgaagacttaggtcaaggcgactgataccatgtagtaaaacagaatagcagagaaagaaaagaatgcgaaaacgaaaaagaaaatatgaacaactcactttattgaattgaaagagatcagtatttacacaagtgaaataggctccagaaaagccaaagcagaaaaactgaaaaactgaacagttagttgagaagacacatcaactaactttaaccactttttaacagaacacttagttatctgttatacttatgattatactaaaataattggaagtattgaaattaaaaaaaaatagtaaatttattgtgg

SEQ ID NO: 295463 - DNA, 3246 bp, Cannabis indica
aaaaaaaacaagaagaagaaaaactgggtcttgaaagaaattcgatatatttatagccaaaagtttgttcgggtatttcgggaattcggtattgatcgtgattatttctgtgtttatttttggaaaccaattgggtttttgaatagaaattggcgtggctttttggaattagcctaaaggttttgtgtagatctgaggctttaattttttgaagaagaatcgaagaaagccatgtcggtcccgacaatagcactttacgctagtccgccgagcagtgtgtgctcgacgacgcatccttgccaaatcaatggtcatatcactcatgatttcgagttaagctctcgatcttcaacgtctgcgtcgactgcatccacgtctcagaagccagtcgttggcgggctttcgtgtatgttttcttctcactcggtgaagcatgcttcgtcatcgtcgagtttctcgggtggaggagaagaattgggttctctatggcatgatagaagcgaagaattgagtagctcttttcgctattcctcgagtaaaattaatggggtttctttgagtaatgatcacagcccggtctcggtgtttcagggcccgatttcgtataacagtagcggggttactgggtccgctagaagcccgccgatgaggatttcccgcgaaaagattagtagtggggaaacgaattctcagaactcatttggcttttctaacgggtttgtgaggggagctttgggatcgtcatgtgtagattacgattcgaggagtgttggaatcggaggggatgatttggatgtgggttcatcagctgcgcttttggacgaattaacattcaatatagaggatgggtttacggaaagtaattccgagccttacgccaaagatttgcttctggatgcacagttgcggcacaagatattccacgatgaatttgttgtgaaggcctttcacgaggtcgaaaaagcccataaaggacaggtgagtttgatttaaatgtcatgagatttcttcctttttaggatattggttatgagatttcttctattctaggatattggttgtgtttgttgattaattttgtatttgcattgtttggtttgttgtgttgtagatgcgattgagtggcgatccatatttgcagcattgtgtggaaacagcggtgatgctggcattgattggtgctaattccacagtagttgctgcagggcttttacatgatacgcttgatgattcttctatgacttatgatgatattcgcagggcatttggatcaggggttgctgatttagttggaggagtaagcatctgaatcttcagaactcgtttgttaatcattgtgtgaatatttattgtgatatagctttttgagagaaattatgttggaattactgtgtttttcttgtttgcctgtttctttctagagaaaatatgttttcaaggcttctttgttttcccttatagcgtctgatctgtgcaactgccaattgttttaggtatctaagctaagtcagttgagtaagcttgcgcgtgataacaatacagctagtaagaaaatagaagcagatcgtctacatactatgtttcttgcaatggaagatgcaagagctgtcctcattaaattggcagatcgactacataacatgatgacactggatgcacttccctatgagaaacagcagagatttgcaaaggagactttggagatttttgttccattggcaaaccgtttaggaatctctacttggaaggagcaacttgaaaatttatgcttcaaacaccttaacccggatcagcacgaagagctatcctctaagcttctcgagtcttttgatgagacaatgattatttccgccacaaagaaactagagaaatctctcaaggataatgccatttcttaccattatatctctggccggcataagagcttgtatagcatctatgcaaaaatgttgaagtgcgtagcctctacctctcttgaacacaattagaatttggatgttttaggggtgacattgattgtatactttcgttaatttttatttaacgaatggttcttgctttaatctgcaggaagaagcttaacatggatgaaattcatgatattcacgggctgcgtttgattgttgaaaaagaggaagactgttacaaggcattggaagttgttcacagactatggtctgaggtgcctgaaaagttcaaagactacataactaaacccaagtttaatgggtatgacacccttgaagctagcactatgtttattaacaaggcttctttatttctatgaagtttctaactgttgttttataatgtttaggtaccgatctcttcacacagtagttatgggtgaaggaacggttccacttgaagtccaaatccgaacgaaagagatgcatttgcaagcagagtttggatttgcagctcattggcgatacaaagaaggtgactgtaagcactcttctttcgtgcttcagatggttgagtgggcccgatgggttgttacttggcagtgcgaggcaatgagcagagaccagtcatgcattgattatcccgattcagtcaaaccaccatgcacgttcccttctcataatgaggattgcccatatttttacaaacctcactgtgggtctgatggtctggtttttgtcatcataatcgagaatgagaaggttagcttcagaatctttaaccatttgagttgctccatcttataaagatgttcagaatttagaacttgttttagtctttttgttcaacagttccattttttagtttctaacgatgtatgtatgttgttttgttttaaaatgactgcagatgtcagtgcaggaggttccagcaaactcaacaattatggatcttttggaaacatctggtcgggggagcttgagatggtccccatatgggttcccattgaaggaagaactgaggccaagactgaaccataagcctgttagtgatccaatgtccaagctgaatatgggagatgtggtagagctcactccggctataccacacaagtctctgaccgagtacagagaagagatccaacgaatgtacgaccgtggcttgacggtatcaagtacaggaccagtatcaagtacagggccatcttcaagtagcatgcctgcctggagaagttgaccttttgtgttctattccacaatatctatatagtatatttactttagcatcatttgttattcatgtacataaatgaaacccaaaaaaatagaaaaaaaaaaa

SEQ ID NO: 295464 - DNA, 1479 bp, Cannabis indica
agttgtacaagctcattatatttccttttgtgaaactattaagtaaaaatataagtatgcaggataaaacaatacgaatgactaatttaccaaaaaaaaaaacaattatactatttcttattttttttctttgtagtattaataaaagttgatatcccaaatatttgattttaaaaataaataaaatgaaagcatttggtagaagtagtaatatgaacatactcaaaatccaatttcatacatcacagccgagtagagtaatgccaagttagcattcaaaaaaaaaggtttgaactactcaaaaatcagattattacaaagattgaaactttggaataaggtaagagaaacaaaattcaatgcttcatgaagaaactccataaggtatgagtgcagcagccacaatcctaccttcctcgttcagtatattgtaagtcgaaatagcgtttctctgaaacaaaagtaaatggatatcgttagaaaaactcgaagctcagactttgtgggagcgaaccgtatcatcgtgcctaaccattcgagcttatcgctctttcggtgttgttaagaatttcacttgatgtcaatcctatatattatctaaggaatgaacatgaatactcaccaactacaatccaactttttatggttaaagagttcatatagtagcaaacttactgaatcaagaacttccaatttcattcctgttgatcgtatgaagcgctttagttcaggatctactggtacaatgttcctcccacaaccgagaatcaaaatctctataaattgtcaaagaggaaaggttaatagaaatgtcagaagccaatagaaggttgataatgacacaattacatatggtaaagacaaatcgggttcttaacataaagttgtacctggtataggacgcacaattttgaagatggaaagactgcatcataagataaaacaaaacatcagataacaacataacacaggtagagaaggacaagccatctcagaaaaacacgagacaatccgaacacaacacataatagctaccaataattattttaagaatcttgttcagaatcattctttaccacctaaaataagataatagtacatgtttgaattcgaactatgtaaagttttaatcagatatcaaagatgtctcactagttggtcatcaagtattgacaatttttcccatagaatatgagaatcccttccaatgcttttatcaatctccaataaataagaaatggtcaccacccatttcagaagggtcattctgatccaataggagaccaaaaagtctgcaaaacattcagcatttgcatattccgaattcgcatggggacaatcaagatgttaactctcctttctacctacagtttacaacttctgttatctctccaaactaataagtctaccataaaaagtctcatttccacgacttcttaagcaacttaaaaaaaagataatttcaattttgtagtccag

SEQ ID NO: 295465 - DNA, 3112 bp, Cannabis indica
ttttccttctttctttggctgtacattttcttcctatagcatatttgattaacctgaataatcaaaatactgctgggagcaaggattagaaaaactcccaaaatagcaaatattaaacatttattttgctgaagcattttctttctgaatccactgctgcgccggttttcttgtgttatgctttgctctatggttcctcatgccacctcggtatctatgatcgcttttgttaggcctctgggatgaagcaccactatgcactctagaggccactggggggtctgcattatgttgttgctcgttggattccgctgtgggaggtgttactggttgtggaagaaacatacctggtaaaacccttacttcttttttaggttcaattagaccgctgttttcttgctgtaacttaaatgttgcctcaaatctttgtcttctgatgttctcttgatcagaatgaaggatcttctcactatcttctatatcattttcagcaatgttctacaacaacccaatcacagatagtcaagaaagctttcgcaacttcaaatgtaggatagaagagaatcgatgcgaatagcaatataaaacaaacactaatcaataggtgcttttttttgtgaaagggaatctataggtgcttcatatacaataaatagtaatgtcacaatgatatataaataaaaaataagacacagagtagtatctccaaatcatagttggttaaaattaacagctactcagttaaatgtcatagtaaatggaccaaatgaaaaatgtagaaaaggcaataatagcagagctatcaaattcatcattctttgtttgaacaagttggatatatggtattcatatacccataaccaaataacagggtatcaatgcgttcataggtctgtatgaaaaactaataacagcttatcaatgatgccatgcacttgatcaattggaactatgtatcttacccagaaatttaatctatacaactataagcatactaacataatgcaaggatgatagattctataccaattgggtaggaagggagtcaaccaagttgagtacatgttcaaagtccttggtgtgaaaaaccatgcgacaaacagggcaatttcccatactatcttctgcatccccatctgcattcaacgacagctaatcaatcagtctttaaatttagtttatagcaaaaagttgtgctgaaaaaactaaaaccataaaatggtatagcaacaagaattttctatcataattatcctcgagcaaattaacctcactaatgtctagccatgtataaaacataatgctacagccacattaagttgtgatccaagagtaccttttctattttcaatttttcttacaggatgcccagaggaacttgatgaattactaggattggttttttgttctgtttgaagccatgtccaccacctaataatgcactcactgccaaagtactagaaatatataaatgaatattgaggtggaaaataaatttatgcaccaaaagctggtaactataagatttcaattagagaataaaccaaccagtgaaagcaatgaaaacatgacatcaacttcataaatggcaaaatcttattcttctcatcttggtggactaaaggatccaaacacaatggacaatcaccatctgggtgattcattagagagagcttctccacagcttcctagaaaattttgaaaacccaatcgactgttagaagggacaaaaaataaatatagaagacacagaaaagaaagaaaccagaagttaagcatgtctttcattctacaatattatcataaccaacatatacatttttcaaaaatggagaaaataaggaatcatgagaaataacttcaacagaacaatagaactgtagataaacaaaactaaatgaatcaatccttatcaacaaggatgcactgtattgcaagtaattgtagggaaagacacaagtagacagcatcttctatcagctaaagcttgatgaaaataaaataaaaaatcagctgaagctcgatgtcatgtatggaatccagaaatgcttacaatctaacaaaacccgattcaaattttaagctaataatcatattgaaattcaagttgttccacaagcaaggtgaaattcattcaaaagaaaaatcacctatcttcatagttctaaaggaaagagttgggctatattccctttccaccaaatccataaacaagttgggatgttattcagttggagtagctcacaaggttttgattaatgacaaatgcggatcactataattaagtaacatccataacccagaacaatttttgataatcgtcaaaacaaaaaacaaaaaagttacctcacaaagagctaccaacattaagcaagaagagagctcagtagctttggctcgaatacaagtcaatagatgttttttcctttcttcatcaagaccctttgaatctaaaagatcaatctgaggcagctctttcggatactatcacaacaaacaaaaagcaaaaagcccctattaacataaattaaatgaaaaaaaaaaaataaagaacttttatatgatcaagtaatacctgtgaaccagctcttatcccaataacagcttccacaaactacaacgaacaaagaataataaaaatcaaaatcaccaaaatagataaatgaatcatagaaacgaatactaatatccttaattaaaatcaaaaactacacacacaaactaggcaattgaatgaatcatagtttgtttggtttctgattgtgtcctaccttttccgaggaaccaaacaatgaaataaatcagaagaagaagaagaagaagaagaggacctgctcggaagtaatatcagcggtgcgaggctttatgtggagatgaagatgaggagggaaggaatcgaagaccacgcaatcgtcggcgtagactgcttgaacagcctcgagctccgcagcgatttcctcttcttcggcggccattgttactctcacttgcaggcaaagctccgactgagaaggaatttttttttatatacttatttgtaattttgatttcttattagcatttctgtggcaaaactctaatttatataaatggagaaagaaaaaaaaaagaa

SEQ ID NO: 295466 - DNA, 4075 bp, Cannabis indica
gagtttcagttccatggtagggtatggtagaatccaaatgttttaccaaaactgacatggttgttgcgccaatgccacataccagagatcatcatcaccaatctcaagaatcatagagttttcagtgcctgcggatcatgaggagtgtgaagttcagttaagaaggcttgagaggaagaagaactaccatacttgggagtgacccaatttttgtcaaaccgatagtggcaaacggcggctatgtgcccaaatcaaagacacactttacacagaagtctagaaccagctccacgaccaaaggggcgaccacgacccatgtcaccaatgtgtcctctatcggatccttgaaatccaccaattcttgatgagtttagactcaagttggcttgcattttgagagacaaatctgaaacattactgtgggattcctatttggtttcatgcgagagcaatagggtctggacttcctcaaaggaaagaaggtcattgcgagatgtttttccaaacaaaactggatcaaattctagaccaagaccattcaagagttgcaaacaagatcctaagtgttcacaggagatccaacaatttcgagagcatctgcagcagctcgagctttatcacattttcaacaatggataagtttcctttctaaagatgagagaatatgcccttcaattgcagtaagcgagcctttgtttggctagagaatcgttgttccaaagctctccaaactgagtgagaagtggtaaatgtagctacagaggcaagaattggttcaaacatcgacaaccgaagccaagaaagcaagaattgatccttctttttccattgaagatactccgaattaggagttccaataactaaattcgttggaggagaaacatcaaagaatagaatctaatcaaggtcgtgacttattactgtaggaactacatgagatttccaagattagttgatgtgatcaagctatagggtaagggaagaagatagtgaattcacgaatggattctatgtaatcgaggaaggagtagaagtagcaagagtcgttgaggtaaatgtagctacagaggcaagaattggttcaaacatcgacaactgaagccaagaaagcaagaattgatccttctttttccattgaagatactccgaattaggagttccagtaactaaattcgttggaggagaaacatcaaagaatagaatctaatcaaggtcgtgacttattactgtaggaactacatgatatttccaagattagttgatgtgatcaagctatagggtaagggaagaagatagtgaattcacgaatggattctaggtaatcgaggaaggagtagaagtagcaagagtcgttgaggctagaggattgagtggaagactccattgacattagtcaaagacgataataccatatagaaggtaaaacttataaaaaagatgctagaagcgagaacaagaagagagaaaacaaagagaacagagcagaaatgatgagctaaaagcttgcctaaaaaaagggctaagttcctttatttatagaccaagaattataatacagacagaaaagtagtaagtctaataacaactaacaactaattaaccgctaactgctaagtaaaatcttcagtaattagtgggttaacagcaacaatccatttaatatagaaagatcattattatcacaaaaacctcaccagtgcaaagtgaaacgatgcaccttaggaaagctgttagatgtaaaatggttgggtatatatgttatatctaattctagttacaaattgtacatagactcatcatggctcaaggaatttcactggacagttaacaagttatttatcattaatccttcaccaacaattggatattctggggataacttccactctccatccaccaagaacttgatttcatactttccaggtctcagcatcaatgtggtcgagaacttggtgtaagaacctgtatattctgatgacaaatattctccttggctccatccgtcaaagcttcccatcacttggacactctaataccaaaatcaagaatatgctttcactattttacaatcaacaatctactttcacaatacaaaacaagtactagctcacctctgccataccataccaaaataagggaacctccttgcattgtgctgcaccaatatccttgacctgctcctctaacttctcaagcacagcttcaaattgcaataaagacaaaacaaatattcaacgaaatttctaaagacttgagaatattaagacctactcaactaaatgggaacattaagttataaatcataaacacttgctaacacatgcaattttctttgtaccaagaacattcagatataacgagttcattactatcactgaataacagaagaccatgaggacataatacgaacaatcataagaatacccaacatgtctataccttcaagtcgggaaagaaggtgagattgaatatattttccattgatttttctcgaaccctttggaatgccagacttggctatttcttctgcaagtttgactaatgcctgttcaaacaactcacaagattaaatatgtcccaacattattctacaaagtgtagccttagaaaagattttttaacaataaaatgcatgctgacagaagtctcgtggaattatatttatgttaaataatcaatttcttcaagtacttttggccaacacgtgcttgcagacattagtgtcaaaaattcaaaaacatacggtaaaataatttcttaagtcaaagtaatgtttgacttccttttcaaacgtgtcttgaaatgatgttcgaatgtcttcaacacgaaatgatgtgtctagttaaatgatggtcgaactaccagggccaaaaaaaagtgtttctgggacctagtgaaaatgaagagtatgacttgccaaggatataagattagtaagttcttgtaaaattgatgtcacgtataaagagaacattacacttactctcccgctgtatctttttacaacaagaaactttgctcttcaaaaatgtaattatttaagctcatccaagtatccaaccagtccaaaatgtgttatctagatagttttacagaataattatgaattactaacagctctataatcaactactaactactgattcataaattatgcacgcaatctaatgactgaaatggtagacctcaaaaggtagcagttttggacacattgaaaatgtaaatgatctgatgagggcaggcattcatttttataggaattggctattcggtgtaatagctttaaatatgacatttgatggatatatgtggtaattatgggcataaaaacaatttcaaaactcctatgctatgaaatccagacattataggaacacacaaatgtgataataacgtagaccttggaattgctctggtgagaagagaacactgtactcatgcagaaaagtcagagaagagaagattgtggtggtacctgaatttcaagttcaattacagcaagttcacttttgaattccaccaaggcttcctcctttacatgcagctgcaatataacagatagacgattaaggtttataggcttttgttaacagtaaatttaaatttaaatgccctgattggatagtaaccaaaaacaaaaggatagaaaatggaatgtgtagtctttcattgaatgtgaaatagataggacctggactctcccaacaagaaagagcttgtacaattacaaaatagtgagatggtccacagtaacctcattcaactcccctcaaatacgccagctagagaataactaactatttattcaatttaggaaatccaccacagcccaaaaagtctctttcccactatacccttgtcccacatatacttctaagcatatttctttgtcgtaaaccttacaggagcccttatcattacacccaagttgcatcagaagatggcagatcctccattgaataagaactttaggaaaacagtgagtatgatgtcctgattcatcattgtttaaaacgggggaagatcgtaagctatgtcctccatcacgatgtcgaatgaaactatccatggaatc

SEQ ID NO: 295467 - DNA, 1929 bp, Cannabis indica
atttgtaaatgtatgtcgatgtggagaaggaatataaataattacggtaatgatgaatatatagatttctagtcttatgttaggcgccgtgaatgatgaggtttcgtattatagtgtaatgtttgaaaatttagtatatgcattaggctatctctgctgtacattggaacgaacaatccctttttgaaaaaattttaaggtgttaaaaaaaagtcaatgaaagaaattttttgttgaaacatcaaaagataatgatgaataatttggatgtgaaatgccaacacggtagttcttgttgaatttgggaattcgtacactggcgtcacacttcattttgttacctttgaaatggtaattgtcaattgtgtataatgtatggtcaaaatgatggctaagtttcacgcccaccgttttaactttgaatgtagtgtcacctttgataaggtattaaaataaaaaactgtaaaatgataggggcattccgagaattgaactcgggacctctcgcaccctaagcgagaatcataccactagaccaaatgcccaaccatatgctttgtctattgtctttttaattttgtctcatgtttttataacgtggtgtgtaggaaattaggaaaaactattattctgcttattataataaaattaatattagtcacatataaattttgaacgttgaatattattaacacttttcatgttggcaattgttttcttttgaaaaatttccaacatacatcatttattattatatttgtcatatctaatcttcaatacacaaaaagtctacactctattttcaaatgatcattcttccctgttttccctttctatttatatgaatgtgtgttggctagtgttactagcttctagaatcaagaaatgttctttacaataattaaattctctaatatatcgtcttctttcatttagtttaaaaaatttacacttaaatacatttaaatctctatttttatttaattcatattgaatagtaagtagtgcaaaaaaagtccgatgagaaccaacatagtaacaaaagaaattataaacaatctcactgtacattaattgtgattaacaaaaaaaatttaaattaaatagtccagagtaatatatatatatatataaatatatatataaataaataaaaacttttccaaatcaaacatcatttactgaaaacataatatgcatgtatagacattatatataacatagtgcagttgagtttggaaatacaaaggcttcatcctaatagtcaaagttacttctaaaactgaatcctaaaactcaaactaagtcactccaataattgcacaagtaatgcatgtttgaactcatcatccaaactaaagaaatagtcagtaatagcttgattttgaacaagaagtttcccaactcttactcgttgtgtatttgtcaatccattgatctttttaagttcactaaataatctcatcctcctgtcagcagcgtcagcgtgatgttgaaaacaattggcaagtctggcaatgctctcacaagaagccgcatggatcttactccattgttttactgcatcaatcaacaagcaaactaatgcatcttcactcctaaatctcttcctattcattttacctgatattgatgagtctgaacgtgagctagtctgactagcgctggcaacaccatccaacgcgtccaatggattggaagtaatttcaatgttatcattctcaatatctttagcaatttcttcaaccttgttaggcaatccctttgcagtggcaccttcttcagtagccccattctttgcaattgcaaatacaactattaactcatcataatgaggaaaggacttgtatcttaaacctttggcacttggatgactctgaaaatagaaagatagatagaaagacaaaaaaaaattgaacaactacatga

SEQ ID NO: 295468 - DNA, 7451 bp, Cannabis indica
aagagggtaaaaataaaagagaacaatataaaaaaggtatagagtgtaatttcctccaaaaagtgttacctatcaggttttggttaaaatagctaagtattttcagcccaatttttgaccatttgagcccaatggaagcaaatccaaaatacccaatgggccgagaatagaaaagtagagcccatgagatagagccgcataaaaataaaagataatggaggaaacgccgccgcattaggaggaagaaagtgggattaataataataataataataataataatatcaaccttcaccaccaccgacacacaccgacattttctctgggtcaatggaacttccaattccataacactcgacaaaatctcatctctggactaaacttcaccaaagattcaatcttttttcttcaaattttcctattttatttctttacattaattacactcacatagttctcattattattcttcttaacccaaagataacaactttatttcaattcttcatcagaacgctgttaaaaatcttatcttctctctctcatggcctgcaaatatggtactttgattatcatcaccattacccaattactcgctttcttctttgttccacaatttgctcaatccgacccttcggattcggattgttcccaccgttggatccatatacgccgtctaccgccaagattcaatcttgatctattggccaactgctctgaatatccactttctggtgacttctgctcttacttgcctaaccatggtttgggtcacaagacccacaatcgttcccagagctggtaccgaacagacccttcaatgctagaactcgtcttccatcgccggatgctcgagtacccgtgtctcacttcagatcctgctgccgctgacgccgtttacctcccttactacgccggaattgatgctctcagatacttgtacggtcccgacgttaactccagcgccgaacacggactcgacttgttccaattcttgcagaaggacgagcccaaagcgtggaaacggaatatgggtcacgaccatttcttggttatggctcgtccggcctgggatttctctcagcctcccggtaatgacccaccgatttggggaacgtcgtttctggaactgcccgagttctttaatgtcacggctttaacggttgaggcccgagcctggccgtggcaggatcaggcggtgccttatccgacgtcgtttcatcctcccactctgtcgtttctcgaggcttggactcagcgtgtccgccgcgctaaacggagcactctggtgctcttcgtcggcggcggtggagtttccgccacacccaatattcgccggagcataaggaatgagtgcgagaactccaccgctctttgcagcattgtggattgctctaatgggatttgtgagcacgacccgattcggttcatgaagccaatgttacaagcgagcttttgtcttcaaccgccgggggatactccgacgcggaggtccaccttcgacagcatcctagccggttgtatacctgtgttcttcgaggaactttctgccaagtcgcagtacacgtggcacttgcctgaggatgagtacgaggaattctctgtgactattcctaaggaagaagttgtgttcaaagggttgagaatactcgacgtgttgagcagtattccaaggtctaaagtcaagagcttgagagagaaagttatggagcttataccaaagattatgtatagaagacatatgagttcgatgggtttgagaaccaagaaagatgcttttgatttagccattgatggtactcttcggaggattaaatctagacttgaacaactaagtttttgttcagtgacctttagtttttttttccttttcttcctttctctttcttttgttgtaattatttatcatatatattctttccctcttgtaattggaagttacgagagtttatagctttgtgatgtaagtttcatgagaggtttataaatgtaacatcaattttggcagtatctatggtatattatcttagatttcctctgttttgttgatgatttttaacagcacatttatgagaattccagacttgtatcaatatcaacatcaaaagaaagaaataaatcaattttattaagtttgccaaagctaataaagagtaacataagcaaaaacaaacaaaaggaagctcactgatgcagaatttgcatgccaactgccaaggtaataatacacatgacatttgaagctataaactgcataattgctggttctaaatggaaaattctctttcttttttgtacttttttctctttcttttttttactttttttttttttttttctctttttcattttgatgttttatgagggccaagagggtgtagtggtttcatttcacttcaacatcatccccatcttagaatagcagatccccaagtgagaccagcaccgaaccctgcagttgcaatagtatggcctgctttcaccttcccacttcgaacggcttcatccaatgccagtggtatggaagcagcacttgtattgccgtagttcgccaaatttgatatgactcgttcttgtggaacttccaaccggttagcaacagcatctataatcctctggtttgcctgtccacaaaagacctctattacaatctaatttgacagcagaaagagcaagtgtagtttcaagttaattttgcagcattcaagctaaaaactcgcctagcttccatacctgatggagcagcaaccaatcaatgctagaacaagtgacaccggccttttctagagcagattcgattgactgtggtacacatcgcacagcgaatcgaaagacctctttcccattcatctgaatgcacgaataagaagcttgtctcggggggaaatctaccactgaaccgttggtacctatagcatggtcggtttcatttcctttgatgcttgcatttagatgcctgcacaagaaggaaagtatataccatcaaagaatgtgttcctgtaacaatgctcttgcaaagatcactaaagatgaccgaatctgccacaaaggagagactaagaaaggtaagtaccttagaccatcaccatcactatgtaagtcaaaaccaaataaaccatcttcttcactgtcacaggcctgtatgataattcaattataaaagggcaaatttagtaattacagccattgaacaatacttcataaacaatacaagattaccattatcttaagctattactgaaacagcaactcaactctcaagacaacgaagtaataagtcataacagcatttctgaagttttaactgatagttcaacataatgaaaagttgacaattgttgacaaggagaaaaagaaatgcaggagagagaatacaagtatttgaaggaatttcatttttcttaagcacatcatttactttaaaatatttcaacatggatgcttgtcaacaagcataaatctattcaccgtcaaaagaaaaattgtgtccaataaatgtctggctggcttggcatcaaacattttgctgggtgtttaggctaggaacatgataaggaacataataggtatgaagtatgaacattggcaacctgagagagaaataatgacctgtagtaacacagcacccgcagcatccccaaagagtatacatgatcctctgtcagtccaatcaacgtagcgggagagggcatcagcaccaatcaccagaacattcttaaaaccacctcctgtttatacatgcattcatagtctcaaatgttttgtaagtataaatagaatttcttacagttaaacagaattgttacccctgatgtgacaagcagctgaaattagacccaataaaaatccactacatgcagccgtaatatcataagccagcgggtttcctttgcagcctagtgctttttggatctgagagtttcaaatataatagataaataagatcatgaaatagtatggctgaattgggatggctgtatattatcaagcaaattttaaataaatcaggagaactgacactgttatcaaaatgtaaataatgcaccaaactcacaattcttggctagtaagttatctaatggcatgaaatgcataaaactgtttgtgtgtgtgacagtagatggaaagaaaagtatagaagaatacacaactaaaaatggccaaacatataagggtgcaccatgcagatgaattcctattattctctgcttaatccaataacaaggtacattgagtattatatacctggggacctgtgccaaagagatcctcaggtgtggacgtacacatcaagactaggtctacatcatcaggatcaacctgtgccatctcaagtgccttcctcgccgcctctacagataaacctgttaagctatctttgcctgcaacagaaaattagagccattattaagatgtaatttcaagaaaaattaggcctccaaattttacatgtatcaaaaaggacacctcaaaatgaccatagatcaacccagacacaactcagattcaacaagaggcccggttagtgcaagcattaccacctcagactgtagcagcatataattttaaggtagttgacattattaatagaatgaactgacctgagatgacccgtcgattacgaataccagtgcgaacagatatccattcatcattagtatcaactatttttgatagatcatcatttgaaatcttaagtgctggtactgctgagccacatcctactagcttgcagccttgactgacaagcctgtaaaaatataaatactcattcaataaaggagcagagcaagtgaaagtgaaagtgcacacacagcacacagttttccattttcaacagcaagtgctctttcaactttcaagccaaatatgcacacaaaactaccagaaaaaacaaaaacaaaaaaattctaagacaagactttcaaagaactgatacgaccactaaaataattttagcaaatacattttaatttgaattagaaagagatagtaacctgcggtgctagaaagaagaaatagcatatgtaacattataacagaaatagattatataaactaaaaatcttttaaccacctaacaaataataaaacacacacatctttaaatcaggacttggaaattctcactaactagacatgaagtgaagagtttatagattttacttggttccattcaatgaaagttaaagctttcacccataaatggaatcatgatcaagcttctgcttcctatcaatcattaacttcaaaagtaccccttgactaatagatatacataagtaaaactcacgcttctaacttttaatcaccatttgattagttaaactcacgagactcaatcccatgtaattaatttagttatcgttctcattaagaaagaatttgaagtttgagaagaaaactcattatatgattttacaccatcatcacatgcaaccgtaacccgctcaaataaaccttcgatacaatcgagaaaagtgaaaataaccgaggaaacacctacaatgattcaaaaactgctgtctctttcaacaatctcaaacaccgtgttcacaaaatcaataatcagataagattgtaaacgaagaacaatactccccaaaccaatgttcacgctactcattttacaaaattcttcactaacaaaaaccagcctcgtaaaacgactcaatatgcattggtatctcatttttataggcgatgaaaggaagaagtggggtcaaattgctcaagcatgaaaggaaactcacctgcgtactcgagattcagaagcggagattcctgaagcgccttcaatggtgctagaacagaatacccttttcgagattccataggaagagcaaaacccagatcggtaaatgcctattgaaggctgattcatcctcctaaggctcggaactgaaggagcagtaaataacccagatgtatttgccatttaaaactaccaccaaaaacccaacagaacttaaattacagggaccagaaagaagcaagctttaaatgtcaaaatgattaaaagagaagatctttcagctcagaggacgaaatagaagaatgtaacaacaagaatatgagaagcccattagatatgagaaagacacaaaggacttgtttcggaaagtacaaggcaaaggtgggcgattacgtcaaaaacccaaattgaggagactccaatgtttttccaatctctcaacgaaaaatcttgtccctcactttcttacttgatgtgttaatgttttattattgagcagagaggtccaggtgagagagagtcatgcaatgcttcttccccattcccaagatttattttttatatatattttttctttttattttttttaacgacaatatttatttccctgaataattaattatatgaatttttatgtcaaaaaaaaaaaaaaattatatgaattttgaaattcttttccaaagtgttcatccaaatccaagtaggcaactacttagtaactgagcttgacacataaccaaatttgctagcatttataaaacctcatttaacaataataagaaacattattacacaagaggctagtccactataatagcatctctcgcaacagagggaatgaccccatatttaacgaagcacaaacttaaaaatctaaaactcatttagccaaaagattagcaacaaggttagcttagtgcattatatgcataaaattttgcagccccttaatcgagcaagatggcgaatatgattaatgataggggtggggtgcacagatcattcaatccagccaattcagattgaatttgatcgtgttggttttctcatcccataatgtaaaggaattatgtatggaaaatttaattaattatgcataggggaaattagtttcttaaattaatgttaattgtggttatagacatagtttagtaactgtgtaattacaagatagggtaaatactagggtggtaattatacactttagtaattagattatattttaaaatttaggtgtgtttagatataaggtggtaattacaaatgaattcctaatattttgtttggcaaaatagttagtgattacatgagaaaataatattttttagtagctaatgtttaatatggaaagttttggggccatgagaattggagagtgtaattgaaacccctcaattagttctaattacacagttacattgtaattacatggtcagccaaatatgtcaaattgtgtaattacctccaattacacacaaatccaattacattgtggctttccaaacgcctagtgattttatatttccatgtaaagaggagtcgaattccctctctctcaatataaaaaaaaactaatattggttattattgggtgtgtttagaagtaactgtgtaattactaggtagagtaattactagggtagtaattacatagtttagtaattacactatattttaaaatgcaaggtgtgtttgg

SEQ ID NO: 295469 - DNA, 4697 bp, Cannabis indica
atctaagatcctggtcaaatatttacaacaaaaagggtactcttcaaggagatcatgtttctcctctcctctttgtcttgattgtggagtatcttaccagattattggctcaaacttctacttaaaaaagggtttagtaaccacccttgttgcaagcatctcaggcttttgaatttgtgttttgcagacgatttgttcattgcaaaggtaatacaaactcagcgaggagagtttatcaggcttttagagtttttgtgattctataggactttctgggaacaagtctaagtctcatatctactttggtgcagttaaagaggattgtaagtctaagtaactatacttggtgcaattggaagaagggtttttcccttataatatttgggggtccatttgagacctacaaagtggaaagcttctgattgtgctatgattttagataagccgaatagaatcctcaactcttaggctagtgggaacctttcttttactagtcgagctcagcgaattcaatctattttattggggataggggatttttggatgagtctattcatccttcctcaaaaaattctgcaatagacaaaagttgtagagatattttgtgggaaatgaagggtaatagaagcaaaatgcaccttcaatcttgggagaaggttttccttcccaaaaatcttagtggtattgggttccaaaagggtaaaaggtggaatatggcattaatggcgatgtttctttgggctatttcctgtaaacaagaaagcctttgggttaaatagattattatcatctatcttaagggtcataacatctgaaatatctcaattaaacaaatgagttggtatttcaagaagcttttgaggcttcaaaggacaaccgatgagtcctctttgatacaagctatagaggtaaatttcggggataacacttttataattctttattgaatgctagaaatgttgactatgcatttgacatagattgattattcccaagcacaaattcatttattggcatgtgtgtaataaccaactcctaactagagacaacttgagtagaatcatgtatatctcctctgttttgtgctcagtttgtgagaggcatagtgagtctcataatcacctattcatggactgcatcttcaccaagaaacttactgcaaaaataggaagctagttaggttttctcaagtggtcgaaagacctctaagatctgcaaaattagtgtttgaagtcaatctttgacttaaaacattaaatgattaatgttgtaattgctgctactctttattacatttgcaaaaacagtaattgtgtttatttgagacaacttgtaatgttgtttgtacccttagtagagaaattaaaagtgttattaagtttagggcgttgggttcaatttgtaaaaaagtaaaagaatgaggtgattatgtaaacaatgtcatagagagctggtgagtgtttcgtttggtgtaaacaacagtcaaaaagagaaaaaaaaaaacacattgttatttttgaatatttctgaaacaatccttgtatttcttttaaatgtaaatgattttatgatatttaagatataattgatatagcccctgaactttagcagaaaaaaaaaatcatatcccctaaatgttaaatattccccctaaactattactattaagaaactacgagacttccgttaaataactcatgcatacagtacaaagcattaagaaaataccaaaactttcaataaagatcagaaacggactctggcaaacccaaatagaacatgatttaccagttgaaaagaatatgtatatatagacacccagtacagaaaactaccctcaagactttgtatggggaacaataaagctgacctaaagttcatatattttctgactgaaataaatatcctttcaccactaattttgtattcatgtttatcacgactagtattcattataccaaggtctatctaccgaaccaaaccctagtgaaggtgtgttgtcctataagcacacatctaagtgcctgtatttccccttctctgaactggtttgtaaagaactacagtaacaaattttgaacgaaaacgatgagtgaaccctaaggccactacagatcgtggggtctccctttcctcgatgtaaagatggtttacgatcacatttggtggggttggaagagatccaatatcatctctgcttgctggacagcgaagaatggtgtgatgcagatgaggtggaacaacgggaggatcttgggcctcgtcttcattcccagggtacacattgttgtaacttgaatctggtgattttggaacttcaaatccaatgacagttggttcctcctacatgaagatcttatgtttgagacctgtatgatttcagtattcaataaaatcatcaagaagttcatatgtgcggcttacatgttcttcatggtattggttgttcatgttgaattgcattcactctgcctatcagcacaaatcatcaacagcagaagaatataaaatcgagtgcctgaaggacaagtagtctttccaatcagcatatactcttatgttatattagcataatccaataaagccttgaaaatgtctaattgtaagaaatttgacattacatgactcccatccttctttacgttttaaacaattctaaaacaaagatgttaatagacttgaattgcattatattaaaaaatagattccactacagctcccagtaaacgactcagcaaagagaatctactacaatatgtcgaaaacatgaacacaataaaacgtacgagttatacacatatagttgattacaaatttggttgtttaacaggaaaaaaaataatatttcggtaaaaaattacataagtaagcagtgagtgaagtcaccaaaaccaattatgtcaactattagttactcttcacctccactccttaatctcacgcacaccactagagctaatttctagtggcatcatttacatccaaaataaagtctcaaaaacttaactaatttccttgtatgacctaatggacctttgttttactttatttttctatgatcattttcagagttttatgttttttttttttttgttctgaacaatcaagttttattttttagtcattatttaactattttccaatgagtccatattgttcaaaaaaaaaaaatgagtacatcatagtagatcatatgactatctcttccttctagtgacaattgtaaagataatcctgttaaaaataactacgctgaaattaaaaaaccattcaattgaagcagatccatattcagaagtaactgagtatccaacgagctttaatctaaagtacactgattttctttccttctccttttctgtacaacttcaatatctatgaccatgttagatgtctttgaaaaagttggtgattatatcacaaaaggacccaaaaacttcaatttctatgaccatgttagatgtctttgaaaaagttggtgattatatcacaaaaggaccaaaaacttcaatttctatgaccatgttgtgattatatcacaaaaggaccaaaaactaataaccaattgaagagttagaacaatcataaacaatggggatgttgtagggtctaagtatggctgtttgcattttgcaaaatactgacccagtgaactctgtccaaatacaggagctttataagctcccggcaaactaagaatttgtgctttttatatggcactatatattcgctgaaagagtaaacatccaactccacaaattctcatcaacaataacaaagaaaatgtaccagataaagacggtgtcaatcattcttaattaaactaaatttggactcgagtgaataccacaaatgatttctagtactcacccaacccaacatcaaggttttcctgctggaggctggaacacaaaacatgttcagtctctacctgaataatttacaagtgcaagctcaccatatccggaataccggtcacacactaaggctaaggagcatatggttgaaggcactactcacattaactttttggaagacaatggctgaaactgaataggatcatacaattaaaattatttaaaaaatgaagatacttaatgcaaagcggatcactagagcctaatgcaaatttaatgtaagtaggcataggcatcctataaattacaagtagcccctttcaaagtgcaatgagagatttcacaagaccacaattagagtatggattttcgtctcttgtaattccaagctaagaaaaagctaatgagcatactttttttattaattatacaaagaattatgcacaataataagcagctaggttattcatccttataaagtataagtgttatcaacacaaaagtgcatctatgtccacaaagcattttataatcgggcattgcatatgcattgctttagttgtgagttacccatcatcacatattcaaatatcacatagcgtagggccatggatttgcaatgtgcatattttaaagacttcaaatttcacggtataagcatttttttcctaggagtttttgtgcttattgttacaaattgttgattaactttaggttttcttgttctgtttaccatggttttcctccgccataagtgaggctttcaatttatatcaaggggacgccggtctaagacaagtggtctctttctcttttttttttaaaaaagaaaaaagttgt

SEQ ID NO: 295470 - DNA, 6655 bp, Cannabis indica
gaaacataagtctaatttagtggtactcagttcaattttctgtgagatcgacctcacatgtgtgagtactacttgattatgtgcacttacgtagttattcatatttttcgtaacagtgattagttttctttttgtaatttcattacatatgtatagaaagctaaaattatatatgttcctagaaattacttgaaatctcattaagctctttaaagtaggactgaacattttgaccgggtttgacctagatctggccaacccgcccagacccgacccggtcaacctgtaaaactaaaaaaatcccattctgttcgggcaggtttggtccaacccggtacactttcgggcagattcacagaatgattttttatagttatcgggttttgggttggacccgaacccgcctgccaacccagttattttttatttatttttttttttaatttttattacatatataatatattaaaaataaaaaaaatccctaaaatctaaataatttatttgtattatatagataatatattaaaaataatttatttatgtaatattatatttcatctaaatatatatgctaatatgataatatatatttttatgttagattgatataatatgtatttttttttttgttaaatgtgtaaatatcaatatatatgtttatatatatctcatacacttatccttaatttatatattatatatacatattttaatattagttgttgtaaatttagttaagacttttaatggggttactaaaaaaataatttaatacaaaaaggatgacttaatgagtgaatttttatttaagtgtattttatttgtttttttttttttgtagaaaatttatttgtttgaactttacacaaatttcattatattcttgctatgattaatttatactcaatactcatttttaaattcaatcataccactttttgttaaagctagtcagaacactttataatgatatatattttttttaactaaaatattattttacttcaaatgcatatgtttcttacaaaacaaacatttatgatatgtttagtttagtgtaatgagaattgtaatagaattattattaccattacatcatttgtttttatttttaaacttttgtaatggttttgcattgtaatagttattacactatatattataatccctattacattataaaaccaatctaaggatgattacattgttagaaaatattttttttttgtccatttttatcatttttttttaattttaaatattaaaaataataaaactaaatacaatttatttatttaattacaatattcattaaatagttaaactaaacatcataatactatttatattacaatttttattccattatattattagtctcattctattacattacatcaaaacaaactgccctgctttatttccttaactactttcacttttcaacgttgtaattttgacaaattttccgggaaatctaataagcgaacttttgtgaaacaaaatttgtaattttgtgtctgaaataataaatggaggaaaactgtgttaactaataacacaattacccgtttttagtccatactgggtcccacacaacacaacacaacactcctttcttcttcaatgcacgcgacgcaactcttgtgagtgtgggactctctttctctctctctctcttcaaaagtgaaaataaatacaatttttccattctaaatgtaaatgaattaaaattaaaactacactctgcccccaccattacgtcctttctctctctctgcctttctcaccactcactctcacacttacattttctctctctacactagctggctcgacttttgtttctctctctctttctcccttttcttcttcttcttctccttctatgatttctccctctctctctatatgtgtataggtgtataataaattaagtacatattctctttttctctctctaaaaagaaaaagaaagctaaaagagaaaggttgggattgagaaatgccgtttccctttgatggtgggtatcgctcgcttccaaggcaagttagaaaagcttagtatctctatgtttctttttcattgactcttgttttggccatgatgatgatgatgatgatgatgaccttttaatttgtttttactttctcaaatgctcacagatctggttctctccaattttgaagaagatcctcgtattgtgcgactcgagatatataatgcttagtgtgattttgttggaggtaatgttctaatcttatcctgaagagggctctgttttgttctcgggaaaatgcgggaaaataggaaagtaaagaaagtaaagaaagtaaatgggataattgagctcacattagagtgtagtgctgtgcttagctctttttggtttgttcaatatttcttttctactcacgttaccattttcgcaataatttaagaaaaggttgaagtagactaactaactgcaatttttaattttttctccttctatatatatctatgtgtttgtgtgtgtaaatatatacattattattattatattgttttaggcattttttatgttgtttggttgctgagaaaagaagaaaagtaaagtaaaccaaaatttctacagtcattgtcttgattatttcagttactgaacaatacaggctagctaattaatgggccattcttttctttttactttttcatggccttgaggatgaggtccttccaatggggtttataagctaagctataatccccatctctaacattatttagtttctatatttttcctaattgctttatggtgactcaattgagtcgcttaaacgttgtttgagctggttattttggcatacttccttacaacttgttaaaggattttacttgggcaatggaaattgtgctattgctcaatcttcactgcatttttcattcacgaaacaaagaagtgaaatgagtgatattgaagtagaatttttctctcattgttttgaaggattgactttgagaggtaatggcatcaaaacaaggatcaaaacccaaaaaattgggttcaaatagcaataaagctgctaattctccagtatcttctactacatcttcttcaaaacaattcttagaaacatctattgatggtcatagctctcctgcatcttcttcagcccgaagtaagccacagtacttccactcagataatgtgccgttggaagtagagagatcaaaagaaaatgttacagtaacagtccgttttcgtccactcaggtgaatttttctctttcagttaaaagtttattgctgagatttttgagtacttattcttactgttgatacttgatgtatattttggtagtccgagggaaattcgccatggagaggaaattgcatggtatgccgatggagagtctattgtgcggagtgaacacaacccatcaatagcctatgcatatggtaagttatgttgtttcctgttgtgtcaataattatgaatttatggaagatttcagtagttagagcaaaaatcaaaattctacttaaattgcagtagtctattttgaaatgaaaagaatgatattcaacgtaatttttattgaaaagtcatacacatatatatacaaaaggggtccgtacacaactaggaatctatatttggaaacaatacaattgggaaactagaaatagggaactgttgaaaaactagaattagggtaactagaaagctaagtacaactaatatacaactaacaatatgggcatgcttcctttcaaaaaaaacaaaaggccatgcattttggatttacttgagtaattgcaatagttttattcctttttttttttccctaaataatattttagctatgtgaaaaatgaagcaaagatcattcttagagcatgcacactaaaattaaaaactgttggctactgaattgtacattttccgtggcatcatggagaatgtagtatatttctcattttaagttacgaattacttgataagaaacatcgtaagttaaaacttttatttaagtaagatctgggaaacgtcattctaggtatttgtctagtatattaattgaggaaaatcatattgctatttattatcttttgttaaaatattgtagataaggtgtttggcccaactactacaacaagacaagtctatgatgttgcttctcagcatgttgtcagtggtgctatggaaggcatcaatggtatgtaccttaaatcccatggctccatctacgtaaactaaaattcctggattatttttggcttgctcacttgtcttaagtatcaaaacttaatgatttttgggttaacattgccctttcccattatattgcatgaccaattgaagtatttatatgatttacaacagcaggactaaatccacagtctgcccatggcattgaattatagataggctgggcaatggctgactggctgatttaaattaataacaatttggcattatgactgaattgtggaagtggcattatgttgtttatttactgagactatgatttcttttctggcaggcactatttttgcatatggagtgacaagtagtgggaaaactcacactatgcatgtgagataacatttcttcatccaccctagtgtccactagtgtataactttattttctctgttgtttttggtttttcttaatgattttgtttctgttaactggtagaactggttagcatacatcaattgtagattttaattttttcagaaaataatttcgtatgaggcaataatttaagatttgtagaattccttaatctgactttaaaggacactatcatcttctaatatcttacttttgcagcctgcttgaaagtttgcatgatgcaatagtattaatatactgtatataaatgtcattgcaatactatataaatgtagaaagtcaggcgatgaggttagttataaattatattgatgtgcttataccagttctgcccctgatgtagggtgatcaaaggtctcctggtattataccattggctgtcaaggatgctttcagcataatccaagaggtatgctgctggaactctatataaaatacacttagctctttatgtctcatattttctcaaattggaaaaactgtggagtctgacattttcttttggcccagactccaaacagagaatatcttctccgtgtctcatacttggaaatctataatgaggtaatttttcatttttatattttgggttgggtcattcctactctgctacagattttaaggttgtgatttttcaaaacaagtaatgaactgtagtattctgaatttgttgaatctcgaactcaatcccacatgccaggaatggctccaagaacaatccgagaacactcacaactcacagaacaaaagcactcatgcataaggcaaattaatctgaatgttattaagctttattgatctgaaaagtgtctattgtattacaatgtgatgaactacttacaatgggtagaaacagaggtatttatagaagtaaatgcctctgttgacaatgaacttggacatcaagatacgtcatttaagaaacagacttaactaactactgacagttagttgactactaactaaactaactaacatattgacttaaatactagggacacgtgtacaagaccaaggcacaattaattgaaataatatttttagaacacctaaggatgaacaaggaagcaagtctttttttttttttttttctttctttgctttgctttttcgttgctatttggaaagaagaagaaaaagagcagttgtagtagaagagaaaggggggaagaagatagaattagggtcttaaattttatttgggctttactttattattttgacttgggcttttattaatttttatttggttttttaagtgttttgagttacaaacagaaaacaaaagaaaaatagtgatttggcatttttttagggctcaaataggccaatttttaaatacttttttgaggcgtacgcctcttctgcctcacacttcaaagaaaaacgaagcacctcaccatttgaggcgcacgcctcttccctccacaacaaggtacacgccctagtgcagtttttgaatgcctcaagttgaggcgcgcctcaaatactcctttataaacattgctaaggcatacatatctaacaattgtccaccttgacttgagttctgtacgttacaagcttttagccaatcagtagctatattcaaaattttgaggcagtgacaaaattttgcagcaggtaaagccttggtgagtgcatctgctacattgtcctctatagaaacctttgagagttgaaccttgccactagagattatgtctctaatgaaatgtaacctaacatttatgtgtttggttctttcatggaacatttggagatgaatgacactttgactgtcacaaaggacaatgatacacttctgatcaattcctagttcaccagtgatacctttgagccacacaacttctttcactgcatctgtaaaggctatgtactctgcctcagttgttgagagtagggctgaacatcgggcgggtttaccgggtttcgggttggcgggtttcgggttcacgggtttcggattcaaaaaattgaaaccgaacccggacccgaatagggcacgggttggcgggttggcg

SEQ ID NO: 295471 - DNA, 4780 bp, Cannabis indica
gcaaaaacacgatttttcacatactctactactttaactcactaccattctcagaggtgagttgaaatcagatcagaccatttcaaagcttcgatggtaacaggagtacatactgtttaacacctcattatgccattatatgttgtaagacttgaatttaagcatgagaaacagagatatctacaaataaaagtttcacttgataccagaatagaatgagactatcacatataattagaataacgttctgttataagggaaaaagcatggaatgccacccatacaaaagatttgggcactttacaattctttttctgattatgaaagtcaaataaatagcaacatatatcaacaactaaaaattgtagttttttgaagtgtttacagtaataataacattcctcaaagttcaaatggtaaaaggtataaggactgcattttagttcaaaaaaaaaataatacagttgaactattttgcatcacaaagaccagaagtttcatcacagaaaccatcacgatcaagcattttcttaggtggagcacttaatagaggagaagagggactaccataagcatttcgtctactgttcccgcagcctaagctaactctggtgcttacaccagtagtcgggtttgtgccacttgcatacttgcagagagccttgttagacaaacagaaggattagaaggaaagaaaagtcattgcagcatctaccaaaaaactactaacagtgagaaaaatgatcatatcaagagtattaaattactaattaggaaaatccaataatttggcctagctttcacagcctgatatttgagtcattgaagttgctatttatttggttatgtagtttatgatccacatcttgttactagctatgtaaaatttgttgtgtttttctacaacacaaggtcaagaacagaacacaagtacaaaacaataaacttaaacaaatagaaattataacctttaaaagaaattgacaccaagtattataatggttttgataatagcctacatccaaatttgaccaatacactttgcttacagttgaaggtcaggaatggcttcttggtaccgaaaattctcccaaactcacaatacagtaccctttaccaatggcttgaacctcttttagaaccaaactcaaaaattatgaaacactctcaatgatcttctttctacaaaagtataactgtgataatcctaaaactaacacaaaggactaagtggtagccggcttactaaaagaagccaatcgaagtttaactgaagtaaccaatacttccaaaagaggaaggattcttgaaatgtaatctgactaactggttcagtgttagagaatcaacctccacagtatcaaaactaacagcacctcaagcagatttttttttaaagatatggttttctggctagaaaaaggtcattcatgcttaatgaaaaagacaatatgttctctttgcaattagcttcagaagaagcttttgtatagtattccatattattaggattaatctgtgcaaggagacctataacactacatgaagagcaattagaatacaagaaaaccagaataggctacttagcagttaccagtttctgaggaagatccaaaacagcatcactgaagtcagcaccttcaataagtgcacctccaagatcactgcgagtgagaactgatcttgccagaaccgcatttttcagattagcttcattaagaacctggattgcatccaacactcgaaggtttcaaacaaacgtcacccttgtttattaatttcagtacataagagtacatatattgtaataaagttgataaggggctttaaggctttaccatacgatccatcagagtatcacttaaatctgcacctgttagatcagtgtcaaaatgaatttttgaatgttagaaacattgtttgttcaagaataaaagcattatattttctaattatttagctgtatgtcatgtattaacagttagtgataatgatatgaccaaaaaggtagcaaaaactcatagtgtacttagtttggtaatggagtgaaattggtcaatacttgagttttacctgaaaagtttgctttgtaagcaacagctttctcaaggtaagcaccattgaatgtggaaccactaaaatcagattccctcatatcagcagatgtgaaattggctcttctgtatcagtagttatgtaatcttagatcactttcataactaactcaagcatcaagctctaaacttacaagaacacaatagtactatgaaaaattcgcttaaatacataaaaaggccaaaattttcaattatcaatcgctctcttctgagttgggtttcatgtttcaaaggaagcagaacaataaaaaccaaaactttagaaacaaaagacaaaatgctgacctgaaattttcatttacatgtacagtcttcctgtgaaaagtaaaaaaaaaaagaaaaaccacatgttcttattagaagagccaaaagccaaaagccaatgttatcaagtgacccaaggaatagtgaataagccaaataaagtacttaagatcagcagagccgaattgggcagctgagcctattccaaattcaccgcgtgtggctgcttcaaatttgttgagatcagcagttgcaggcatgtcattgctgaagctaaaaaccgcagcagcagccaatgttgcagacaccaactttttccatgtgttggagtcttctttaacattggtcttggattggatttggttcctgggacaatcttactttttcatggaaaattcaataaggtggtggagaataaggaataatatgataccacaacacaagtcatagaaaaagaggcagatgcattaagttaccttgaaaagaatctttcttggggttctgggcatgagatactatggtgaagggctttaaagaattgagattggttgaatatgaagaagaagagagagtgaaggacttagtaaacagtggtgaaattgaagcgagtgccattagagaagagagagagagatagtgagatttgaggcagaggacgtggagaaaggaaggtttgggacttagaatggatcagattacttctgtctacccataacaactgttttttgttcgcacgtgcgtgcgcctcggtcccagctaggatatgcttaacttttttttagctcattaattacttaaatttattataaaattgaataatttacgtttaactatctaaataaatacttaagtttaatttttggtggtaataatatctaagttataattttagagcttctgtaaatacctgaatattaagtgttaagtaaaatgtcacgtgacaattcttaattagtctaggtcattaaattgtatttttataaaaaaagttaacttaaatgtacctataagaaaatgacacgtagataatgacttgatatttaacattcgggtatctacatagttttaaaaatataatttaagtattattaccgctaaaaattaaacttaggtatttatttacaactgagagttaaacttaggtatttatactgcaaattactctataaaatattataatttaaagaaaataatagagataaaaaatttcttaggatgttattcgaatagataattttatatttatacacatatgagagtcaaagattaggaaactaagaaaagaaaatattaattacaattaatggtgataaataaaagatttggacatccatatatttattaatatttataacattctcccttggatgtctaaaataacagtctcattaaaaacttcgccgataaaatacactggcacaatactcggttaaggaaaaaaagagtcttgtttactgaaatttttagaaactaataaatagagcttcaaaattaaataaaacaataaatagtagacaagtaatttttacgtagttcaggcattaataatccctagtctacaagttagttgtgttggcaccttaggtaactattttgataatacagtgtatttacagtataaaccctaactctgcacttcttctgtttctcttgaagaagaagaaagcttgtaagaattttggtagaggttcagctcgtagaaattttgttcaccatttgtacctaaaaaaatggggtatttataggcttaagtgtgggtaagggaattccctttacccacctagggttttgtaccacaatccattgcaagggaaggaaaatacaacttcaaattatttgatcgtgcagtgtgcagggatggtgggtagtaccgtctggatcagggacatgtgtcgcccaaaggtttctcctttataaattaccctatagaagagctgtcaggaaaaaatgtgtgtccaggggtacgtacgagcactaccatggcctagcacaagggacacgatctgattttgtgtcagaaaaaggtgtaaccatctgcaggttgattttccatgtaaatctgaggtggccatccgcattcgcgtaggagtcgtcatctgcgatcagttcagagagtccttatccggatgtcaagtattcaaaccgttgttccaggacttcttagagtccagggacgagcatgatccttccgcatcccaaagatgttatacggccagcgataagctttcattaagcccttcccagattgacgggacttctcttcggatagaaggaactctctcagctactagttgtcagagaatgaaaactagatttggtaggttgaaaagtcaagttgtcaagtggatgagatgacaatacaagaaaattaccctatctcggcggttaagaacccacga

SEQ ID NO: 295472 - DNA, 12751 bp, Cannabis indica
tactatttattcttttggattttttctttttcccttttttaattatactgttcttgattaatgttggttacttaattgattggtagccatatgtttgcaactcaagataggaaatcttgccctgtatcctgttattaactaattgaaattaacatatgattgttactattttgttttaatatatttgttgttgcaattatgttttgttttcatgttcctttcatatgaagctagttttgttcttatcatacttgctaccacaatgttggttcccatctgagcttaatatatatgtacaaaccattttctcttgaattatgcctcatattcttatgtagaaattggtagtgcaaatatgagtattggttatattatgcattggttgtagaaatgtttcactagtgtgaatttgaagatggtaaaatcccactttgttcatgactctattgctaaggttatgattctgcttaatgatgtagacttttgtttactcctgtttggaacatagaatgggaagctggaagaaaatacagtcttcttataacaatgggagcacaattcctgttcccaccaaagctcttagctctacaactgcaagaaatttggccaagagtcaacttggtggtgtcatatttggaaccaagaatagcacaataagagaatgttttcataaacaactatttggttagtgatcttacttaattgaatgtgtacttcttattgttggcagctttacatttggtttttacaccatctttcccttcaatgagcttccgaaatagtcttaatgatagttatccgcacttaatagtaaattgttgtgttatttctttgtggaaggatatcgctggtgcattttgttcattatttgatgtcaacaactagtgagagatgtatactttttcctttcaggtttgccacctcatcacttttcctacgtaaagaacattgatcctggattgccactttttctgttcaactacagtgacaggaaactccatgggatctttgaggctgcctcccctggtcaaatgaatatcgacccatatgggtggaccagtgatggctcggagaggacaatgtatccagcacaggtattagtttatatcaaatctcaccggtctatgtttctgagataaatttatgtgagacaccccattttggatggcagaaattattatcttttagtttcagtcacaggtattgattatattttatttttttaatttaggttcagattcgtgttcgattacaatgccagccactggctgaaagtcagtttaaacagattattggagacaactactacactcatcaacatttctggtttgagcttgaccatgctcaagcaaatcagttgactaatttgatggcttctttagcggttcctccaggtactccaatacttcagagtacaatgaagtggagtagtaattttccaaccagttattctcgtgacactagaaaggaaagtagagggtttccaccacttgctctagtggataagcaagcggttgtttcgggtacatcagtacgacagaatacaatgaagaggagttataatgttccagcagcaggctcttctcgtgacactagagaggaagaatttcccccacttcctgtagcggctcagccctcagatcaatcaagtcagagatcaggttctactgatgttttgtcatcctttgatggagaaaaccagtcattggaagctcaatttaatgtgagggtggttgatggagacgaggaagatctcctatgcaaggaactgaagcaattggcttgtaaacaggaaatgaatggacatcaagactcgtctctgacatctgatacacaggatactgattcaacaaatggcacacacttggagatgggtgatgcaaaacatgcttttgataataataatatttccttgaaggagaagggatatcctggggaaccattcggttcagaagatattagtgagcaaaattctggttcatcatcaaagtatcaagcccttataactcaggtgaaatctatctcagtatttcgtactttctgtttggaaatgtcacttgtgtaattcctttattacaagtattctcatattgtcatgtgtatttgcatagttaattcacgaggtggaagagctgaaggcttttaaagcagaacaaactcagaaaacgggctttcttcaacataagatggtatttgatcattgatacaattcctataagtgtgtttgttattatctgattgtgattgtttatttattgtgcctttcttgagttgtccaaataaataaatttattgcaaacttcatctgtgcatttagtcattcatgtattgcaagttaaggttaaggaataattcgtttggattggtttgaatcatgtgacgagcagaactatcctataacattctagttttactaaggtgcaaacgaggctggaatttatagtcggaaaatggtcaaatgtcataatgtcgtttatttgctgataagtaacatttttaagtagtggagtttctttgaatttgttctgtaagcactcttattctggcttatgtttcctgaataattgggttctttgttatataacctccatttataaaatttgaaaaattgagtttaaagtgggtcctttgcctattaaaaatttgttgtggaaatggaacctataaatttagacttaccatatgatattatggtcattaactcattacttataactagtagtaattagaaacttgtatggctgaacatttatgatctaatccggattgtagctctattacatggggaacttttcattgacattctcatagattaaattgcttatgatcaatggcgctttagtattgtcaatctgttgccttctttgagtggtgggttgtccaatttatcgattctttttgccctgcatttcaggtgcaagcggaaaaagacattcaactgttaaaaagacattgcagttcagactctgaatctaatctctccagggtgcttgatgacgataaggttactgaatcatttgataatctgaattcggagccttatgagtcaatatttttattggggggttatgatggtgaatcatggttgtcaacctttgattcatactgtccttctctgaattatctaaagcctctcagaccaatgaattgtgttcgttcgtacgcttcagttgcaaaactaaatggtgaattttatgcaattggtggcggaaatggtcaaatttggtatgacacaggtatgtgccaatacaataagttggtttctcaatacacttatcctgacagttcatttaattcttccgtcttttcttttcttggtgaagttgaatcttacagcccaagtaaagacaaatggacagtgtgtccttctttgaaccaggagaagggaagcttagctggagctacattgaaggaaaaaatatttgcaatgggtggtgggaatggtgttgagtgctattcaagtgtcgagatgcttgatttagatatcggaagatggatacttgcacggtcaatgctgcaaaaggtaaactttactagagtcattgttatttaagcctcatgctttctcaaatagacttagcaactaagattcatatgtgcatgacactcgggtaaccgaattggagtactatttcgataaatagtgctacagtgtatttacaacactaacctttctttactatttataaaccttcaacactcttgaacactcctaacattttgaaatgcaattatcttccttttgtaattttactttgttaatattatttgcttagcaattgatcccattgttttatttcctttattgcttcagagatttgctcttgctgcagctgaactcaatggcgtcatttatgctgttggcggatacgatgggacagattacttaaagtgagatgttacacacctgtttacactaacaattataaacctgtaatatttatgtattacattcatggaccaaatgtatcattcacatctgtagtccaatctaaacatgtcttatgtatatagaggattgatttgtgtgcaattatgcataatcaactatatcatattgggcattggatttttggtattttcagttgtgtaatcctatcatactaaatatatcatatatgctgtacttgacaaaaagaatttcactatttcaggtctgctgaaatgtttgatcctagagaacactcctggagaagtatttctagtatgaagtctaagaggggctgtcactcattggtagttttaaaagaccaattgtaagatcataattctgttcattttcattttcccatatcgatttttcatctcgatttggaaccactatgatgaagacttagtttcaccttctcctgtgacaccctcgggtttcaacttttgcaggtatgctctaggaggctatgatggagattctatggtttcaagtgtagaaattttcgatccaagactcggatcatggatgagtggagaaccaatgaactacccgaggggatattcagctgctgcggttgttaacgagactatctgtgtgatgggaggtgtgaaagatggttacaatgtagtaactgaagtaagtaacattatgtcaatgcttttattttatttctctgtatttctaacatttttttactaaagagaactctagttattctctaactttttacagattgagagtttcaaagaaggacaaaagggttggcatgaatccaatggagatgtcattggtaaaaggtgcttccattcagccattgtttcatcgtcgtcttttacatgatgtttgttagtcgataccgatgagtgtacagaaagtggttccacacagtcattgaaaagaagtattgtccaaagtaagtttgttttaagtaatcagattggaaaaaaaaaaaaaagaagttagaattttcattttgaaaggctattatggacctgttaatttttttgaaggggggaatttgtaaagggacaatttcatagttgaatacaaagcattagtctcatatattcacaagttcttttgcaattaaaaaaggaaaaagcctttgagtttgagaaaaggagagcaaacggtaataactgaatttctataatctacttaacagattaaacccgggtgctctattgttgttgttggtcttagttaattaatatatcattaattaattaattaaattattgactttttaggtgtagaagaaaatcataattaatttttatttagagataaatcaaaccaattgggaaatgttaaaagataatggtattgagtattgaatcaaaaaatacgtacatatttatttatttatttattttaaataaggttgataaatttaataaaaagttcttctaaaacattacaaatagtccctagagtgctggatagataaattgtccacatactcacacttagccacattatcagctaaaaaaattcaaaaacatactataatattaaagaaattacaacccaaaaactaatcagaaagtctttacacattatcttattatacagaggtgttgactttaaaaatataatctttaggaagctaacatttgatttggttaaaaatgtccatctcaagtcaaaaggaaaaagagcgtgacataaagttgaataacaaaataaattcaaagtaagatttgcaattcatcaccaaattatcatatgagaaacaaaaaggaaaacatgtcatgtgaaatgtttgaagatgaaaacttaagtaatttcattttatactttaggtgtacatataactccaaatcaaatcaaagcttaggtaataagagttgcagagttctacttcatcccgggccggtggtagagtcattcatcgttctggcccgggtggcagtcattcgccattctaggctggtggtagagtcgttcatcgaccgatcttatcatgcaagtgttgggacaatgccattaacttataaccatgtatttttgtgctctgaatgaactctaaaaacaaacttactaaaaatttcagaccttacatgaacaacatcaatttatttcatatattttaagacttaaatgtggagagcatggatatttagcacaagccaactggaaggaaaataattttacctggaactcaaaaccgacgaaacagcggtatgacatgattttcagaaaccagttggattttggttcctagaactccatcatctcaaaaatcggccatactcaatctgctattgtaatagaagaggtcaaaaaaaaaaaaacattaaaagaaagccaaataattttgatagaaccaaaccataaattatttcatgctttttgttccctggaaaatcaaaatctagacacatgtaaagactacagctatgagatgaattatcagtaaaacagactctgcatatatcaaagaaggcataaaatataacttctagtacttcagccaaagcttcctgtaaatccaaatcagtagagaattgccaaaaagcaatacctttaaaggatggttggtagaaatgatttgtttctgttttccaattcgccaatcatcaatacgggttttcatcgtagagcttgactgaacccagcaatctagacttttccactgattcgaaagaacatgaagcagccgtctggagaaagtgagtcaatagagccaagagttgccgccgtttttcccatttacataagatgtaaaacagatcactcatcgtttagacagaaaaacctctatttccttgcaaagataggccagcttgtgcttaggacccacacgacgatgtttgacgaagtgcagatcctcgaatggacattctataccaatacataacctaatactaaaggacattgcttttggggtcttgtagaagggtgcaagaaatgaaaatcttctataaccattacattcttcaaaattgttcaaatccaaaaagatgaattgagttgatccatcatccattgtcatcttcagccacaacctactctcaaccgaaatgttgtgaatggtaatttggcatgctatgccaacaggtagtcctggaacataaataataggattttcagggccattattaggaatgattagttcggtgtttaagtacttgagtctcccaacaaacataatctctttgaggcagaacatttccaataaccttcgaaatagagagcgatcataggattctccattgccagatgtgtgaatttctgctgatagcttgcctacttcaattacaaaattagaaggttgaatacagccttctttaacaagattttcgacctgcgaaagagtggtagagagtttttctagtgtatcgtgcttgcagaaaatttcaactttatatagttttagtatgcaagtcaaaagaaccaattccaagacatgtaactcctcctctttagacaaacatataaacctacccctcaattctatgagcctcctctctagttttccaaacaaaagattcaatgttccaattctacaggtgagaaattttggaggcaggaagtggccccacaccttggcaagcacttctatggaccggagatatagcaatgtgaagcttaaagccccgacagattcaccagaattcgagtcaaacaatgctaactcttctttgcaactcctgcatggacccggatgttatatatacaattttaaaaacagaattattgtaattaaaaacattagatagcaaggtgtaataaattatcagacaatgagatgtatgatatcttaaattttgtcttttgcagatagtatagaagaaattgctttggccatgcaattccttgtattgacacaaacatctagattctattaaaaagctagtctcccatctccatgcattaaactcaaaccatcgattaaatgacaacataatattttcccttcaatgcaatatacgttctctccccaaaatctttgttccctctcttattttaccatgaagaaagatgacaaaacgattaatggcccttaaaaatgaagaaacacgatagaacagaatagagagagtaaaattcaacctcaaaattctcagcacttgatgcagacatcccgattgtactaatggccagatatctttgaccctcgcagtgatagcgtttatagacctaattatttcatcatgggcttccagcttggaatttaaaactgatgtgagtttttgtggctcatccatgtctagaaactgaatttcagatgttccatctatctcttgctgtgatggttttgcgagggaaccaattgtgttttcattagagtaaacttgaacgttacctttgaccataggaaaacgttgtccccattctttgagctcaattgcagagaggcttgtggaattactgcactgagacaagtacgctaaaagaccagtttggtccataacatcactcacggaattggtaatccttcctagcattgtaagggcataagaaaacactacatgcggaattttggaaaagttttcacccgagagtggaactgagattgccaaaactagcaaaccagctactctcacattatcaaaatccaacttgccatcagacattggttcaatctggcaaaagaaaatgaacagtaaaaattatattatctgacatggaaaaggaagttaagaacattaatccaatcattaataataaacacaacacatttatattatagtagggcctcccttttgaaaaacacaattttaactcttttgaagtgtgatggttaattaataattgaatacctcaatgtattttctcagaaaaagagaggtgcatcaactggattataggattcaaccactataatgtgaattagtattgaaaggtaaagtgtacaagtaccataacagtaacaaacaagagtctgcaacatgttctacagaaaaacaaaaaattacaagattggcatttacaaaaaagtttcttgaagcataacactcaactttaatttcgtgccaggaccagtgaccctggacaagattttgtaatagatagatcacccgagccataggttaatataagaactagtaatgctatttggtaaacaatgctaacctgttgtaagatatcctcaataatggaaacaacaaatttgccattatttcgaccaaagtgaaacaaagctgagaaagtatcaacttcatcctggaagaagcagaatacactaaataaatgaaaagaacaatataaagttttttaacatgaaatttcagatcatcaaagccacacttgatttgactgaattcgtataaacttctatgaaaacaataataaaggattatggtaaacaactgaagcaataacagaatgaactaactaaaatggggcgtaccatggtattaccactttaactttgaagaaaagacataaaatatataagtctgtactgagaggatatagcagcaaggacaaaattatacctctagatatcttgccaaattgtctagcagggcatctactgttagagtaaagagcttcaaaaccgaaagtttcactaattttagtattctcttggtagcacatctgatgggtaaagttttgtcaaccagaggaccaagaaactgaataatcaaataaggataaattagtcaatttacaatgtcatctttcacaataagaacaataacaacaaaaacaagaagaatgaacaaaactatatgtgaagagaaaacccaaaagaaaaaggaacaacgacaagttcatacgttaaaagctagcaaaagccatccagagagtctgacaatcacaatcaaatttcatggataaacagttaataataagaatcacccctttgtgcaagagataaattacatatacatacagctagtaaattaatcatactttggaattccagaaaatattactggaaatcaatccaagttcttaagaatccagagataccgtgtgcacatgcttctcttgcaatttcaggcgaccacagctagccatacagtgcatagtttccaaagcttgtaatcgaacaatgactgaaccatcattcagtacatccatcagtaagtttaaggcttcccgagcgaagtcagctgacaggacgatgagtgtagacaaggaatgacaggcagacttccgcaccttcatattcgttccagttaaatatcaagaggacatatgtaaagaaacaacaaaagattaagatttttgcattttatattcatagatcgccaactatggcaaacaaagcaaaaaggaacagctcctccaaaggtcagataagactatggcaagcatgtattaagtgtaaattaaattccaaatagatatgagaattgcaaaaaggagaaaaaagcattggaataacatggtagaaatagaaggccttgaacaagacaagaaaacattacctcaaagaattcatcctcaagcccatgcattaaagctccggcagcacttgatgccaatacttcaaattgttcaccacagcactgaccaagcgatctcttttctttaacaatcccaagaagtttcttcgacagggtttgcaaaagaatgtcctctgataccacttctattttccttaaggcattgaaagcttcaaccctgacctccacactcatgtctctagccatagaacacacctacaagcataaacatagcacaaacatcgtcttacaacttacaagtaaagttaagttttgctaacattcagagactttaagaaaagaatgtccactcattcaattgtagcagtttaaagagggtggtaaattaaacagataagtaggactacttctcaactgataattttatataagtataataagagttaagactcttgagttccctaacagactacataccagagatgcaggggggaagaaaacatatgtaatacaagaaagaaattatgcaaatgaatagttacccgcccatgttatgggctcttgggctataccaacacatcgaattatttacagctgaaccacttttagtatatgttctgcataaaaaggcaagaaggaacatatgaaatctttaaaataaacagaaatgtgcagagtttttttgtcttgcaaagatggtaaattcaggcagacaacccatataaaaatttaagtaaaaattgggaagtccatcaagcttttgctcatagcttttataagcaaggaatcctagcttccataaaaaggacttaaaatttaaaaaacaggagccgataacgaaatttcaaatatataagcagaaaagtattattaagattaaaaaaaaaatatatttttacatttcaaagcgatttttttttggcattattacgaaaattcaaataattactcacatagcaactaatggaataatttaaattgtaatcaaaattcacataacataacaagccacgtagaactacctaatcaactcaaactataaatttaaagaaaaaaaaaaatagtatatgagctaattcccctaaaagattattgaaaaaaccaattcaatcacaagcttaaatgtgcaaaatcatgtagaactgcctctggacaaagataaattcataagttctccaatatcatcatgcagtaagacacaataaatttttagatatatgatttttagaaaataccttgacaaataattcatcagaacactgtaatttcgtctcagggtttgatgccgcaagcactagaccccaagcacaaaccttcattcaaacatgaatccattagtaactgactgattcagtacaactcaaaagattcaaaccaattcgcaacttaaatacgaaagattacagatacattggcactaatcggagcttaccgcacgaactgcagccgaccttacgctatcttccatgtcgcgtagaagatcaacggcacggttatagcaaccgcggaccatgtcttcgtcttcgatgacattggactcgctcaaacgaaccagtccgtcaagagcagctcttctcacgcaagggtaagggtccttcgtaaacccgagaaatagagttaaagaaatatgcggccgaacacgaaacctctcggcgttcctcagaagccatagtcgtacggacagggatggacggaagcacagcgaagggaaaaaaccgtcatcgtcaagctcgttcacggctggaaccgacgcagggtcacgttccgcgatggaaacgacgacgtccagtgcctgtgcagcgatgtgagctgacgcggaggagaggagtgagcaagagcggaccgagtcgaatacgaggcgggagaattgaggacgatgagaagacaaatcggagaggagtttgagtgtttgatgaagtatgacggagtcgcggtagagttcgagagagcgagctagggtttgaaagatggaggtgattgtggaatggggagttgaggggcttaggatgagggctctgatacgagatagtgattgggaagagaggggttgttgaatgtgattggttaggaggaggccggagctctgatcgtgatcttccattgatgaggttaaaagcttggcctgagtttgcagaaggaagaagccgacgcgggaaagtaaggaaactgtgaatgaagtcgttgaatcgagactgggccatgggccttaggccttgggccttgggttgggctttggccttttaacatcttggtagtcagtgttagtggtcactgatcaatatttttgcttttttagtagaaattatatattttagggagaggattgtaatttagaaaaggggtaagttgaaaaatattatttttattaatcaattaatcaaatttacctttaatttatatttaattgaaatatacttctttttatatgtattgtacccaaaatatcctgaca

SEQ ID NO: 295473 - DNA, 1682 bp, Cannabis indica
atataagaacatgggctactccactcattgccaattagttttgaaatgaaaccccatgattctcaacatgtatcagaaccatatccataatatgaactcgatgtttttttcttttaaaaaaagaaatcccattgatgatttatgtttacttacccttctgtttgttcttttgtttagtactatttttttctttatacatttcactaaaaagaaagaaagaaaggatattagtttttttttttttccttatttcaacgactgatttattttgtttatgtgttttttactatcagctgcaactgttgggatgtcttgctggtgtggagatgatacttaaggatgttggatacccagttaagctagggagtggagttgcagctgctagtgcatacttgcagaataacatccctctcatcccatcaaggatttgatttgagtcatctgcaaaatcatcttattttagtttcttctaccatcatttccttcagaaaaaaaaaatgtaaataagacataatttatttctctctctctctcttctatcttcactctttggaggctttttaccaaacttatctattatttatacatacactaatgagtttcgtgaattactatgtattttttaaaatttcataatcctgtattatttttcttcgccaagtataatctttattgaaaaattcctgggacaatgagagttgttcctctaagaatacttgatcattgttatggtcaacacaataccatttagagatggtgtttgcttggtcattctgacctcatggaacaaagtctagtgtacaactctaaaactagttcaaaatcatccacaactgaaaaaaaaaaggttagtttccagtctggagatatgtctttgtgattgaaaaacatcaccataaaggaggcagcaaatgtgataattgagattataaaaccttaactaaagaaattgtgctagtaaaatgccttgttcgagacaaggtctatctcccaaagcaatctcttactatttcattcaacaacaaaaccaattgattacaattgttcaattttattagtaattttaaggaaaatacaaataacagaaagtagcaatttacaccaacaatcagccatgctccatcctaacaaactcttagagccatttgggtcacatgcgcatacaagatccacgcacacacacgctctttccatcttcattttggtgtttcttgtcttcctcgttaacatcttcattctcaggtgagaaggttaggaattctttttcggcagcaacatctatccagcccttaatcttcccattacccacactcgaatccaaggctattgaggctgatatttaagttgggctaacactacacccttcctcgaaaaggaccttatcatcaaggtttgtaaggtcatacagttgacaaaatttagaaaaatcttcccaagttgcgtcttccagagcattcaaagacaattgcaccaacacttatggttggttttgagtgaagcgaatggctatagactacaaaaaatcatacttttagtgtcacaataaaattgtgactataagtaaaaaagttgtgactaattataaattattattcctatgttgtgactaaaaaatttgtggctaaagttattagtcacaaaaatcacaatttgttgtgactaaatgtgtttttagtcacaat

SEQ ID NO: 295474 - DNA, 1704 bp, Cannabis indica
cgttttagaagttcaatattaggttgttaaatcaacatacttgtgagtagatctaagatcctggtaaaatatatttccaacaaaatattattcgtgtttttaagcacgtcacacgtggcatttaaagaaaggaattagcctcataatttctctaattaaaatcctccattacaaccctgtctcagagaaacctcgtggatccaagagcaagcaaagactaaaaaatacatggaagtccacttcgttctgtcctagcttcccggacgcggaaggtgcttagtctctctcggacccagagggtccaaatatggaagccttcccagctgatatctggatgcatactcaaatggtgtaatacagatgtcgaccgcccaagagtgtcgtggacgtttacctttgatacaagtcaggtcaccaagtgactgttatactttttctgacgcaaaatcaaatattgtcccatgcgtccaagcatagtagtgtgtacacctccaccactttttaaacatacggatattatagacacctctacttttaatgctaaattttttaatgacacgtgtccatatagtacaaatggtccccgttgtccagctgcagcacgcacaggcacaatgatttctaacagacccaacattgagctgtcagttcacatgtaataatttaccctattaatgaacttttagcagaaaccctaggcggttcatgaacatgtccatacctgccacttagcctataaacactgtgaacacataaaaaatgctctaaaaggctaatagactgactcgtagactaaagttaattaatacctaaaccacataaaaaatttccatctctttatttttacattttattatttttttagttctcaaatatttagttttgaaaaatctcaataaacatttaccaataattatattataataaatagtaaaactaaaaattatgaccttacactaaataatatttatcacataattaatttttgaatcttagctaaaataaaaaataatgaacattcatatgtcactattctaccattgactacaaaattccactatctttataccctgcgcttggagaattaacttatataaccaagtctaatatgatatatactcaactacagccaaaattttcttaaatctgaaaaataaatccacataagatttaattagtctcaaccaacttggaaccgctataaccataagattcataaatcatagcactgttataataggaaaaccttaaaatgtactattggtacctaatacttttttctgtatattaatatcgctattcataaaattaagtatttagtctcatataatttaatataataaattttaaaatatatcactaattaattacaaaatattacatttcactactacaatgtaggcctttaggtctagggccagaacgatatcctgacacaggcgctcaggacaccagagcatcctggacgtgtcaggactgctgggtatgctattacttgaaatgttatttatttacttacacaaataaaatcgtagctaatttgcattttatgatttgcagattcctaaccagggcatctaaactgttcggcaggaagaaaaaggaattgtctgatgttaagcgaaggagattgagaaattaaaagtcgaagtccaatcccttaagcagaagagaaacgctgccgaacaagaggaagaaggagag

SEQ ID NO: 295475 - DNA, 1334 bp, Cannabis indica
ttttttttttttgctaattaatataattgagtttgaacatctacaatcagatctgtaaaaagaagatctgtctgatgttgtgtttttgagagagttgggaagaatcaaagaatttgtttccaccatatcaactttcacattcaattgccttgcctatttgagtctataaaataggcctttagcttccatttcttggagatgacagcatctataaattggatgagacatatcagtccgaacttgtcccttggagtttctaatgatagctccaaacccaattttattttgtgatgagtcaaagctaggcagcatcgatatttaatttgagacagtgtatgggtggtggttgcgacagaatacgatcaactggaggtattgcaggtgaaaaaccagcagcaacatcattttgattatatgactgataattgtgcaaataaatcttggaattcaaaaaaactacagaaggttgttgtgctcttttaccatggataacattgtttcgatcaggccaaatagatgacatagtacaaaaaaatgtttctagctccgatttggtccatgattctaataattgaaacagaaaatcatttggtttcatcaattcagtagccttataatccaacttgaacgctgagtaactccaaactattttcgcatgtcgacagaagaacatagcatgccccactaattcccaaggattcaaacataaactacaagcaactgaactaagaaattttcatttaaacaactctacaacaactaggacagagttctgaattggtctgcaagaaaagattttaacttttggaggtaactttaaaccctagcaagatttccaccgtgaacgctgtgtagtagatgttgaatgttgtgtatcatcgctatagaacaagtgaaatggtacatgacttcacatcataatcccctcacgaataatgccaaatccaagagtcactaaaaccatgaagtaagagtggaatagacagaatacgctcaatgtctactgttgaaaaattagattgaagcttatgaatgtcccattctcgatccaaagttatatactccgatacacgattagttagtcaaccaatataacataactaaacaagattgaattaccaggcaccgaagggttgttgggaatattttacaagaatctaaatttactaacaagtatgttgattaacattctaaatatgtatatctctaaaacaatgaaattaaacacataagagtttaaaaaactcttacattaattgcagcggaatataatgactccttccgtttagatctatagccctttattcctttatgtagcagagcattatcaagat

SEQ ID NO: 295476 - DNA, 8097 bp, Cannabis indica
tgtatagttttattttttatttttgaaatggggttgatttatttgttaatgcattttataataatgcaatggtttgtatttagctggagtttaagaagaagagaagaaaaaaaaatatgggaccgggtgaattttgaaatgattggctttcttatggcaattttgagattttctctcttttttatgactctcttttgtgatcaaacaactggggttataatggaaagtgtaaaggttaactttttttgtttttttatctcctgatctgaggggatttctcatttgtttttgtgagaaggttcgttatgatctttttttagagcaccccatatcagattatagaactgataaagctaaactaagtgtagtgctatgaatctaaaagaggtttcatactgaaagacattattgtttccagtttgcatactaactataaagttttagtttttacagttattcaaaagcttaggtgtttagacagtatctggtctgtctgaatagtggaaaaattcagtttgttatacaaaagccctttgtggattatttaactagtttattattgtatttaaattgaataaactagttagtcaacttgtagtggagaactacttaatcaacttgtcttattccagtttctttattttctaatggggatttcattgataccttgtcttgaacaggaggaattaaaatccgcagagcgcattcaacctgcttccagatgctgcaaagagtatgatttgttgttaaatttccttgtaacaaaaagttttaatttttctttgaagtagaagatgattaaaattttcctactctagtaagattatttgaattgaatgtgcctattttacagggtggctgattttattgtggctaatccagatcctttaatgcctacgtaagaatactgatggcccatatttgctcaactcacatattagtttatgatcttgacgttttccctttcaaccaggaaccgaagaaaacgccgctcatgtcgttgctggaaatggctctggtatggctgacaatgacattattttcttcttatagttttgacaaattattacagtcttaagactgtgaaatttagtattgtagaagcagaatgcaacatagaaagttccattttttaacccaaagtattgctgtttatgcagtggcttcccctgttttaacctctcatggatttgctgttgctgttattctaaatgctgctccataaaccttgaaatgccacaatgctgcaagtgtaaatgcagtccttgtgattgttgttgttgtaaatgcccgtcgtgtttcagttgctcgttaccaaaatggcgttgccctcgttgttcatgttcgtgtcctcgaccaaattgctgtaaaaagaagtcatgcaacagaagttgttgctgcctattccctacttcttgttgttcatgccctgattgcccctcttgcagatgcaaatgcaaatgcaaatgctcttgtcctccatgtctataggtatattttgttattgtacaaaattatgctgtaatccttttttttttattgcttctagaatcctcctatattctgcaaatgcatgcttatttagctagaatatgatataccaagtcttcaaacttttttttttagttttcagaaaggaagtataagcaagttggcaggctgaattattggttctctgtttgaggatttgatatattttacaatctttcacatttgtttaacactaataaaaaaaatggacttatttcacaacaatgtaaataaatctcatcttgagttttatctctataaagtgatatgatcattaataagtcttaattggcatgacaagacttaagacagccaaattaggatatgcttatctaagaaatgtggcttaaaatttaatgagtttccctttgttgtctgttttggccaacttagtggccaatgacttgatatagttagcatttttcatgtttagccacagttactctgacatggatgggaattcgaatcaggttttccttcaataattctgccaatctgacctccataattcaaattcgtggccctactacggagtcattattgaatcaagtcatcaaattggcaggcttttgaagactctattgaaatctagagcaacaggacagatctcaggcccactattcgaggctgattcccttgttttgagtgtttttgtagaaaaccatacatacagagcccaagtgtgtatttttatgtaatgcccaacttctatatatggaaggaaagtaaaaatggataggcaatgttcgttcaaagtaaactaaaacaaatagcacttgtcattgtaaagagttaagcctcttatttggcaaaccatttacggtaaaaaaaaaaaaacaagttcaaaacatatatagaaaacatcatatggcaagtatgtatatctgtcataaacagaataaaacactcctgtgtcattcattctattagattagtttttaaaaaagcagaacatacaggggagtttacttatcaactcctttcaccccactctctgaattctgaaaatggttaccaactgcaaatctcaaatactaaaaattttatctgacttgatcagagccttatggcctctatttccctcatggcaaatgggcacattctgagaagagaataacagttaaagaaactcataaaccattttaactttctcacaactgcgtccatgcaaatgcaacagggctcctgacttggtgcttagcgttgctccacatgattgaaccaaaagcagaccttgcagaagaggctgcacctcttgctgccacaaaggttacagtgtaacgaagcttctgcccaactgttttaaacacaagcttggttggcttaacagacacattcaccattggaggtgcatcaacagttaagttatatacagacccagcagctccaacattggtcaattgacgagtgtagcgaacgacacgtttgtttccaaaaatgacagagaacgaagggtagttaagagctcccgggtcagaccactttttagaacaagtgacattgcggtgcttggcaatggattggacatgatcaagggtgtagtccaaggagcacaagaactggatgtactgttgggttgagatgtcataaactagaccaggtgagatggctttctgtgggtcgacatggcccgccccatgagcccatgggttggaagcggcacctccttctgcatcccgaataggggatttggtgttatctattacatatgcagttgtcatcaaggcagacttgattgcactgggactccaatctggatgagctgctttaagaagagcagctagaccactgatatgtgggcaagacatggatgtgcctgcattgggattcaatgataattagaaattaaaattcatgatctttttctaatattgagttaataagaacatgtgagtaaattttagttcatatcttctttttcttttttcatgtttattaaaaaaaaaaacttcttcacccattgtctaattacagtcaaataatgaattcttgtgcaaaaatctttcgtccggatttcataatgatccgagggaaggactaataacactatatttggtaggaagttgagcctgtgtaaggtaaaaatcttattaaacaaattttactattatcttaaaagtataatttattgattttataataataaatatgttcaactcttatgtcctcatacacacaagctactaaagagggtcagtcactgttttacatatgttactaatgctcattatcatcacttttcaactagagttgagacaaaagagtgcgtttggtagggaaatgtggattttttttgggaaaaattgatttgaatctgactggatctttggtagtaaagatttttggttgaggttagacaatgaatggttgaacaactgttatgtacccttattctaaaaaaaaaaaactattctgtccctaagtttgaaactatccatctttaccaatgctaaagtcttgtcgtttcttaggtaatacactcctagtttcctacctagcttcataggtgagccttgagaggcttcgtttgttagtcattgtttccaattttggacataatatacatttgaaacaatcgcaacgttaaaaacgaaatataaccgttgccttacctgacataatgttgaacttcgttttccttgcgtccttctccagcccagtgggcccaatagcttctgaccaagcagccaagatgttaacaccaggcccaatcacatcaggcttcaagatctggggcgtcactagattgggccctctcgaactaaacgccgccacaacgggagacggtcgtacattcaacacggtcccaccaaagctcagcacagccgtcggattaggaactgatttcacgtactccctgatcaaatcaccgctcttccttcccaccgccacagccggtaacaagtggctgtctgccaccaattcctcgccgctagcggctgtgttggccagtatcatcccgattccaccggcatcgcggaccaccgcacctttctccacacgtgcatttactcctctgtcgcacaataccactttcccacgtaccaatgctggttcgagcgaaccgggcaggcacaagttgcctgaactgttggaccctttattgtacacgattgccaccggtttatttcccattccggacccactgtagagtgagacaccgccaaaccgtttcttgtttcccagcaaagcaaaagccgggaaatcacgatccagagttccagccccgacagtcatgatccacggcgccacattggccaatgaagccttactgggcccactgttaccagccgagcatgagacgaaaatgcccttctccattgcggcgaacgctccgatagcgatagtgtcgcggtagtaaggggcggacccacctcccaaagacatagatagcacatcaaccccgtcggcaatggcccgatccatacccgcgagaatatccgacccgaaacaaccggagctccaacagactttgtaagctgctactctagcgtgtgttgccatcccacgcgccgtcccgctggcgtatccgagcaagctagcattcactacgtgtgctccggcggcagtgctcgccgtatgggttccgtggccgtctctgtcccgaggtgacacgatctctttcccctgctttacgaagcttccgccggatgccatctggaaacccttggcgaagcttcgagctccaatgagcttcttgttgcagagagatgaactgaaatctggaccggtttcgcactcgcctcgccaacgtgatgggatctcaggcataccagtatcgtcgaagcttttggattcgggccacaccccagtatccaaaactccaacaatgacatcatgagaggcctggttaatatcctgagtactgagtccaccatcgacctctaaaccgagaaactcaggggtccgagttgtgtgaagggtataaactgtatcttcgtagacacccaaaacgtcgtcagattggcggagtgactcagcttgttcaggatccaaagaggctgcgaatccagggtaagcgttggtgtaggagtaaagcagcgaatccgtgtccgaagaaagagaagataagctagcagagtaccattcctgacgagtgggataagcaagtggcgtctcaggatttttcatgtgaacaatgtaggtttttttggccatggccaagtggccactttgtatgagtaacagagccacggtgcaaaacaagaacgtggccttcaaggccatggctataggtgggttaaaagctttagtttcagagaataaatttaaaaatgaagggaattgagaaattaaatggtgcgatatgaaaaggttgaagaaggcgaaaaccgaaccagtcgctaatggctgcgactgtcagatggatataagaagaagaagaagactagtgtcgggtttatatcaagttgagatttaaaataaggagtttcttttagtaaaattacgtaaatgccattccttacatataaacaggaaaaagtgggagttaaattaacattacattaaacaaacgcgtttaggaataaattcatgtggggtttgaatatctggaaatgttggttcaattttcatgaaaacaaatcaaattgaaaaattaaaagtaatcaatagctgtatatattagattagattagaagtgaacagttaatgaattagaaaggttactttgtgtctaattgcttttatcacaaagaacaaaaggtgctttgataagaaaaaaaacacttggagacactattacagctggatacacttcactcaatgggtccaccccattcttttttgcttattgaatcatcttccattccttaatgcccattccattcctaataaaatacactcattacttttgttttaataattacttttctcaagtgtactcactccctggaaaaatatattcaattatgttgcttctttcttattcataattttcttttctttagaaatatcacaatgtacttttcttttaccaaaattcatatcacgttacactttaaaatttagaattgacaaaaaatgtttgccatatttgtgaccttatttatgtttcaaagcatgtaattaaaattaaacattgagaaatatgtcactttgttcaatgcaaattacgtatggatggagggtgttgaaaatgagggcagtattggaataaaataaaataaaaaagcagagcacaaaaatcaaggaagaagtggggttaatatttttgtcttatacgaagaatgaaatagactggtggtcgtggcatagactaaactgttaccaatcgtcattgtgcttagcaacccacaccatttctcaagggcacaaatttgtaacggctacttttaattttttggttttatcatctcaattatttttgtaaagaaaatggttcacactcaaactcactcaccctcctttaactgactatttttattttattttatttttgactgatcctccactttcttcatttcttttctcttaaaccgtaaaaaatgactatacacgtttaaatcacgtagtcttctcagtttcaaaatggtatatacacttgtcaattaactgtgctcatatatactccattttcgtggtaatcttaccgttagcattacacattaaaaatacattttaatctcactttcatgactttcttcttgctccactacaatgcaggtatgattattcaagataaacctactttaaaaatatattaatatatgtccagattttcttaaacaaatcattcttgttgcagataaaaggattgttttttcttttaaaacaatacaaatggtaaaaaatatgtaagggagtactttttaaatttatgaaaagagacggttggtgttaaaaaaaaatttatccctctaatccaaataagccgttcaaactaaataaataaaccaataaaaaacacaatttaaataacccaacaaaaaaaccaacctcccaaggaataagtgaattaaatattattatgacccatccaaacaacttaaataaacagattatgtattttatactaaaattgtctataatatattatttaactatgtttaatagttaaattattttacatttaaaatttatagtatatagtgtttcattagaaatttatactttataattgataatttgaattgtatttgaatattaaagtgacatttaaaatctacactgcattaacatttatatatatttttttctattttttaaaaaatattatttaatactttacactacaagaaatatgagcatcaatgaggacaaattacgttcgtaaaaaattcctttttcgtcagtattaaccatcaatttatgttcatcttatatttaagttttgaacatttaatttagattatatataacacttttaatcttgaaatatatatataattatatatccatttattttatcaaatccatcattatttaaacataaaaaactaacaagaacaacaataatactactactactaataatactaataataataaggaaataataaagtattagaatatttctaattaaggaaataaaataatattattgattctgataaatgaatattttat

SEQ ID NO: 295477 - DNA, 1681 bp, Cannabis indica
cagaaaaactagatcatcagttccaactatgaccctagaagtaaaaagctttcttactttgtcttcctaaatttctaagcttataagggaagctaaaattaattactagtagataaatacaaaatcatgtgtaaaacttaaggccatcagttctatactcaattcaaggaaaagtaactctacttcatacaagtgaactacaataactattccatactccaatgatagtaaatagtaatgtactcaggcatgtggtttgcccttgcaagagacctacctctattagagaacattatcttacatagattaaatgtgaaagtattgagctatatataacaacatgggctaaaccactcatcagagtaccccataattctcaacatggtatcagagtatccctagcggactatcgtaaaagcatcacatttggatccccacaatctctacaaataagaataggaagtatgtttcaaaattataagcacatcaaacaatgaagatgcactgttcaaacaattaagatgagctcagtaatttaactaaaagggaatagactgcataatctgcaccttgttaaagccacatgccttttatggctcagaactcattttgcattgagatgctaaagcagaacaagtagcaaaacacatgaaatttcaactgaaaaagaatacctgcgatactgaacaggcatattgccagctttccaaatggcgattttctcgaaggactcaatgggaagaacaaagtgcttgttaggagggttacaatggccgcctccatcagtagtaaagccataatttggagcacaaaagttggtagcggtgaggataatcgaagtccccggaatgcaccagcggagatcctcaacacacctgagctcaaagcaagcaccacagatctgaccccgctcaaacagagcctcgctcaatccaacggtggccattccgtaaccgctcttgacaaggtctccgtatccacaggcgcctcccacgacatctcgggggtctgcggcggcgtagtaggttgcacgagcgggtcgccattcggagaaggaagcggaaggagaagtagaagaaaaggatgagaaatgggcagtggatgtggggaggagagagtgaatgaacggaagtagtagtagtaaaaggagtaccattggcttcttcttcttcgtcttcttcgtcttcttcttcttctgtactgagttaagtgagtaaatgtaaatgtgtttccaaatccgcagatcgagttcagacagagacagacagagactgaagagtaaagcatcccatgtaatgtatgtatgtccatcctcttttgctttttgctttttttaattttgagtttttttgtcactaaaaaataaaaaaaaaattaatttaggaaaattactttatatattatttttatttttttttaaatttacggtttgagtttctaaagtagttacagtgctagttgcaataagggtttctatacgattttttgttacaatttaagttacaccgctaattggaataggagtttctatgtagaattctgtaaaaatgcaaaagaaaaacgatttgaagtataaaaataaaaagatcctttaatttattataataaaatcaagtgtcaatttgaactagttagattgttgtatttaaagattttgtctaattttattcaattttactat

SEQ ID NO: 295478 - DNA, 4420 bp, Cannabis indica
cattcttctaagtccccataaggtcagaacatctttctctaatttgtctctctagaattttgagccccacaattagccaaatctttgtaatttttgtgagaaaaaaaaaattcaaagtagatgtagctccattaccgtcgcgtcacagagagtgaactactataaattgttgtctctcttttacttatatttaactctcattacactcttgccaatctagcaagaagttgtggtcagatctgtgttaagatttctgcataattattatggtactttcattgagagccacaactcgagacacttattaagaaggttgcaacaagaccaaccagtgttgaaagaagcaccacaactggccaacccactgggggcacgccagtcactagaactggtgataggatgacacctgcatctcagatgctaggtggaggcctcagaacaagctacaaagctcatcccccagggccaccaaattgtggtactaaaactttgactgaatcgcacctggagagccacgtatggagctagaagacaccaaagaggtcgatcctcaggttgaacaacttagccaaatagtggctagccagcaacaactactggaagattctcttgacaagtaacataaacgatttcaaacctggttcatggaacattggagaaacgttaagaattaacgtactaaacaagaatagcgaagtgcaaatcttgctcaatgaatctgagaagcctatgaatctagaaacagaacaactcctccaagagttgcttttgctagagctggaaacaatcctcatgtgccaactggccttgtgggaacaagcgcacaaggggaaacccttcatgcacatggtacttgtaatatctcaaaaaaatataatgatatttaatcggacgtattttattaaatatgtgattatgtgggcatttagtaggattataatctcacttaacctagttacgagttaattagtgaaatatgagtaaatgaataaataaagcgtaatttattaattacggagattttatcgaattatgggggtgttgtagatactattttcaaaataaaatattttcgggttcggcggccatggaaactcaacagggtggtcaaaaatgtcacggtaatcaagttgtgatatgtggatttataccaaattagtttagaactttaagttaacggtttgatgagactgagtagaaaaatactaaattaccctaaggttttattctaagtttaagtttttaaggaggggcaaaatggtcatttttgtgtaatgttagaatttttcccttaagtgtttctttaggctgaactttaacttaaattaattatgttttttttattttattttattttattaagtttatcaagatagggataaataagaataatgaaccaaaaatccaagaaagcctcttcttctttttcccttctctcaacaaccctagagaataagcataaccagaaatttttcactccatttcaagcagaatttggttgaagtagtgaggtttagaagttgtgcaagcttggaggtaagatttatttcccttctctttgaatttcttatgatataggttgagttttgggttagggttcaatgattttggggctgagatgttaaggtgagttttgaatgtgtttttaggcttgatttaaaatttgttaaagcttgaattggttagaaatagtggctgtttgatttgaattggtttaggtgaagattattgtttgatttcatttaagtgtgtaattttgattaaatggatgaattattgtaaattggtgcatgggatacattgtatttatggttttgaacagttctgggaagtttgaaaaggtttggaggagatttggttggtttttggcgtgaaaaaccaaagttcccgattctgccagcagagaaaccggttaaccggttttacaggtgctatgaaaccggtcaaccagttttgccagtaggggaaaactctggtttttagcctcgaaacttgttttgtttagggtgtttttcagagcctagattaggatattttagtgatgtttaattattttgaaccactggggagttagatatgtccggttacaaagttagggttattctagagttttgaataagttatttatcgagctttgttgtcgtgacataggacccgagatcattgagcgttgttccactcattgagcgttgttcaataagttatagtcatgacttttcaccattgtctaataagacaatcttttcaccattgcctaataagacaaccttttcatcatttcctaataagaatatattttcatcatataacggtaatcaccgtatgttagtctcgataacaatcaatttacaaacaataataatcgtattttcacatgacatgttatgtagtaaaatagtacttttcttacctttaattccagattcatgcatgctggtcaacccaatggagaaacgccggccaattttggccctaagttacaacaacagtaaattgatcaacaacttgacttaacccattctaggtctttaaattcctaaccagaagtttccctatcgataaatagcgtggaaatatcctaaacatcaagaaaaattggggtcccgaacatcactcaaaacggtagaccatttttatgttttcttgcccaaaaaaaatggtcgaccagttttggaaaatcgatctaccggtgttctacagaaaacgaaccttgagcctagcttgctctcaacacccatcaaacctgtccaaatagtcccaaactttatagaacagttacatactaccaatagagcatagcccaatcacagaaagtaaaaacaaattaccaaacaagattcgccattaatgctccaagcatgagttccaagaactcaagctcgattatgctcctctaaaagctactaaatatgattgtaaaccctcaaacaacttctaaccaatcctagaaacacttccgaatccttttcaacactcagagcagtcaacaaacataatttccaaactaaacttatccataccataactaaaaagaagaggaggacatagaaccttacctttaacttcataattagcttgaatcacctcctaactacaactaggatgagaatagatgagtttggacagaaaagaaacaattagaaacttagtcttgctttgggtttttttcttagccaaaggtagaggaagaaggatgagagtgattgtttttgttttagtttctttgactttctctatggttgttttttaaaattttataacttatcccactatctacagccttctaattactaaccaaagaaacaaaagaataatactttaggaaattactataattaggcaaaatgaccattttacccctcaccttactacttaaacaaatccaaccctagggatattttggtcataactaaataccctgaaatactccagtattccaaaatcaacctaacttgctgatttcactaattctgcaattaaatactgttgtgatatttttagccccaaattgggccttcatggttgttagacctaaaaaatattttcatttaaaaaatactatgtatgttatccacatattctaacaaaatctctgtaattaattacacttatttaatcatttatgacaaaattccctaattctcacagaattaaattagtaagatcataatcttacccaatatactcttattaatccatattttataaaatatgccctaattaatcataattagatttttgggatattacatcgacgatccctgaaagagcatctcggccatgttatgtaatcaacacttagtgaaatttttctatgtgttgggaaggaaactattgggtgaagaatcaaaacgacaaggcatgcatgttgttgagtacatgtcagggtatgaccacgccacctacaagatgtggaacaagaggacagttgtgaggaatctctcgtatgagtagtggaggcacctcgtctgcaagctctgacatcttcaaaaatggtatgttgcaaccactacccttgcacgatgggaccgcttgatacccaacagtcactacttggcacaagaccacctcctgcacactgtcatctacaaaagtgcaacgtcctatctgtctccctaggaccacaagtgtaccaacttgtaaatgagagccaatagagctcacccataaataccctattttcaaaattgaaaaatgattggaaaatctttgtaatcaaggcatttggagaagcgagaaaaacttttacttcttcttcttcattaagtttctgcaactcgcttgaagttcttaaatatttgctttcatttcgtcataaacctatgattttccggccacaacttcgttgacgaaaattcatcaataaatattattatagtaatattaaaaaggataaatactattttaaatcttgtgtttt

SEQ ID NO: 295479 - DNA, 6781 bp, Cannabis indica
ggctatcatcagtttgagaatcgtgagaggaggacagtttcaaaaactacttttcgcactaggtttggcatcatgaacttttagtatgtcctttggactaactaacactccagcagcttttatggacttgatgaatagggtattcaaggatttacttgatacatgtgttagattatttatcgacgaaatccttgtgtactctcaatcagaagtggagcatgagcaaaatctatgaatggttctataatgactacaagaatataaactaaatgccaagttcataaagtgcgagttttggctatgttaggtgtcttttctcgaacacattgttagtaaaggcggaatcaaggtcgatccgtcaggtattggccaagactaaaggtagttacagaagtcagaagtttttttggtttggctggttattatcgtcaattagttgagggattttctaagatctcaactcccttaacaaaaatctctaaaaagaatcagaggtttttgtggacagacaagtgctaagcaagcttctaagagatgaaaaaaagattgatcacagctccagtattagccccaccatctgatacagacaacttcgtggtttactgcgatgcatagggtttggggtgtgttttgatgcaggttgatcgggtcatcacttatgcctccgtcatttaagagaatatgaatagcgaaaccttactcatgatttaaaactctccgcagtagtctttgctttaaagatttggtggcatcacctctatcgagagaagtgtgagatttataccgacgacaagagcctcaaatatttctttactcagaaagatttcaatatgaggcagaaacgttggttggagttagttgaagattataactgagaaatcatttatatcctagaaaggccaatgtggggggagatgccctgagtagaaagggtcctgggcagataactagtatgatcaagatttcacctcaactagcagataacatggtcagattaggtattgagtttgatgtaggataacttcaaaatttgacattacaatctgttatattagacagaattaaagttgctcagttaattgatcgtgaactggtaaagatccgggaagagttttttctggtcaagctaaagattttacggtgtcaaataatgggatattgctgtataaaactagacttttgttctgggtagtgcggaacttagaaatgagattcttgaggaagctcatacaactccatattcactgcatcatagcactaccaagatgtatcaagatttaagacccttctactggtggtgcatgatgaagaaagatgtagtagaatctttatcccagtgtttaacttgtcaacaaattaaggttgaacattagagacctgtacggttattgtagccactgacactgtctgagtggaagtggaaagacgtcaccatagattttgtggttgggttacctaaaaccacgagaatgtacaattctattaaggttgtggtagattgatttacgaagtttgcacattctctattgctgaaaacaccatttacagtggatcaatacctagaattgtacgtgaaagaaatagtaagcttacatggagatctgaagtcaattatatcggatagacatccgaagttcccctcaaaatttatgcagagcctctaatgggccatgggtaccaaactgaagtttagtgcagcttcccatccttagacggattgacagtctaaaaggacaattcagaaaatggaagatatgttacgtgcctgtgtgttagattttgaaggctcttggagtaagtatctaccgctgattgaattttcatacaacaatagttatcagagtacaatagagatggctatgtaagagatgttgtatggtaggaagtgtagatctccaatttgttgcgatgaaactggagaaaggaaatacttaggttataaatcagtgcaacggaccaatgaggctatagaaaagatcatggccaaaatgcttgcctctcagagtaggtaaaagagttatgcagacccaaagcgcaaaaacatagaatttcatgtaggagatcatgtattcctatgagtgtctccaatgaaggggattaaaaatttcaggaagaaaggcaagttatgcccttggtttacaaggccttttgaaattctcgagaacattggattggtagcatattgtctacccttacctccaacactttcaacagttcacaacgtgtttcatgtcgctatgttacagaaatatgtttcagatcccactcaggtgctgagttatgagaaactagaacttgagtcgaacttatgatacaaagaacaaccagtttagattttagacagaaaaggtaaagtccttcagaaaaagaccatagctctggtaaggttctctggagaaacagtaaggtggaggaagtcacctgggagttagagtctgacatgagggctcaatatctagagttattcaagttagattttgaggacgaaatccttttgatgggggataattgtaaagatcgcttaatttttatattgaattcacagacaattagagcttaattatgagtttagattattaattatgatttatgaagttatggagatttatttgaattcaggttgtattagttatactatatatgaaatttcaagtttttcatgttttgtgctcatcaacaacggaacgtgacgtttggccaatagaatgacattttattatttttgtaatagtggggctacttagttagaaattaggaatgtcgggaatattcgatattttagaataaccaaaatagccctaggtgccaagtatgttttttaggtatgtgtaagggaaaaatcctcttttttccatttagttagtttatcctttagtgattttgatttatgttaattattcaaaacttgagttaatgttattatataggttttgccttatcacttagttagaaaattaaaaatcagaaaaactcaccttctctctcgatcctaaagagaactagtagcaaattagggttctttagttcttctcaaaggtttatagtaggattttagtgtttccatccaaggtaagcttcatagctttctcctctttatggtttctttagtttaaagataattttgcgcatgatttatgagagtttgggtactgtggtgttagaaggtgtttggttttgtattctaatgttaaattaaagttatttacgttgaattgagctaggtttgtggactatttttgtgtttgagaaagctttgagtttaaaaacttaagctttgctctttaacggtggattttgattctcgatctattgctttgttttattgcttggaatatgtttgttgtgacctaaataggtgttctggaggtttttgtgaagtatgggattgaattgaggtgtttaggaggtttttggtatttcctgaactgaactagtcgaccggttctgtggaaccagtaggaactggaatttcagttggtccacaagaaaccccacaaaaccggtcttccagttggggaactggtttgccaattgggacagttttgggaaccctattttttctcatttttgcgatatttagggtattgccatgttatctatcaatagggaaacttttagtttcaatgttaagtccccaaaaagtgatttagtgtgtctatgatcggttttacaaataatgttagggtcctgtaaatctctgagcaatagttccattcaggttggccagcacacctgaattcagaatcgaggtaagattagtataatgatatacatatgtgcttacatgtttagcatacatgtttattaagcctattagaatacatcgatagcggtatcagtatacgtagagttatattggatactaatagatgtatgttagcttggatactgatcgatactatcagattggtatgactagcgtacaaagtatagactgacattatggtcgacagtattatcgtacgaatgttctagactcagtacgatgtggacacggggatagggttttggttgggtgtatgggtgcctgattataattcaggttatattcatgttttgtattatgcttttcttactgagtctgtcgactcacaaatattgtttgcttatgtaggtaaggggaaggctaaggttgagcagaagtgagtgcgagcggatgaagattctacatgtcaaggcagttaggcctggagtgtacgatctttgggacagctggtcatattttgtaaatgttttgtatataggatccttgttatatttatattttatttttttggtatttataagtttttaaaaaaaattgttacttacgattttcaataaactcattgattagcaatgagcttcacaattaacttaaaatcacgataacacacctaaactagtaacgtattacatgccctctggccaaactcatgaccatgaccagcccttgggccattttccatgtggggaattaatttaaatagggctttagaaataggttgtgcctaggcgaagtatgttgtggtggcaatagactactacaccaaatgggtagaggtagagtccttagtcaggatcatcgctaagcaagtggtatccttcgtcaataagttcctgctatgtagatttgggttgccttacaaaaccatcattgacaacggaacccaatttgaaggagatttgtatgttcttatttcattgagagagccattgaaaggggattctcagaactagtacaccccaggctaacaggcatttaggctacaaagaaagtaatcaaaaagaacctcaagacaaagctgaaaaagcttaagggcagatgggcagatgaactaccaaatgtactctaggcgtataggattacgctctgctcgaccacaggtgaaacttctttctccctaggatatggatgtgaagctatactccttatcgatatgaaactcaactcattttgtgtgaagaatttcaatgaattagtaaatgaaaaattaaaagctgaaaatttggatcgcttggcggagagaacagatgcggcccaaatgaaattggcagtgaataaacaaagggtgacaagatactataatttaagagttcgcatgcacgccttcaaaatcgaagacttggtgcagacaaaaatcctcccaaacactagtgatctgggggtagaagtgttgggagcacattggaagggcccctatcagattgcccaaatcatcccgcaagggatttacaagtgggcccgagtagatgatatggtaataccgatggcatgcaatgcagtgcaccaaaagaagaaatactattgaaaaggtgagttgggaatatcctttagttatttgagattttgaaatcaaagaggtggtccgtgaggcagcttactagtttatgttcccgactgattttctatttttgcactcatatgtaatgaaagactaccctcgtggccttcaaattattccttggaatatacgaatattgcattaaaatcaataaatcataccttatcacaggtagtcaaagtaatacttctcctccatcaaaaagtaataataaaggattgaaatttaagaaagaaattatgcacaaaactcaggtgcacaacacgattaacgacgctacacactagggcaaggggaaaaaagtaaaaaaaaaaaaaagttgacaaagactagatacccttgtttgacaaaagaaacacactttttcttgcaaaagtttcccagccaaaagaggtctataaagatgctcatggcctaatgcttaaataaaaggaacgtctctcaaacgtaagcaaacactcacaagttaagagggaatgcagtcaagtaaaataagcctcctcacatctaagtaaaaggatgaataaataataagagggtgagaacgctcaaagagtaatactcccacaaatgaaaacatgcttaccatagtggtgaaagtcacttggcctaagagtgacaatcagagtcgctcgacctacgtaggttacaaaaatcacatggccaaaaattttacccttatagtcgctcgaccaacattggttacaaaagtaacttggccaaagagttacccatagcaaacatcagttaaaaatgtcactcaactgcatggtagctgaggtcacttggcagcaaaaaaatatataaaaaaagggattagacaaggagaggagaatttgccactagaccaaagtattgttatgaagtgaaattcaagctagggaagccccctacatagaagggacaccccctcaaagaactctaagaggataagactcacactttagcggggcatgctccctaactcactcagccaataagaacacttggaagaattcttgtagactagaggcaagtgttaacctcaaaaattagcacttttaactttcaagattagttgactaataacccaaagattaaatagggtgcattcaatttacctacacactcaatgtgcatttctcaaagtcgccaatagtgtctgcgggcctcaggatataactaggagcaccctgagcaaaccccgtatgagtacatcgaggcatgactgcctatgcatgtgtttgttgcatgcatgggtgtgtttgttaggagctcgtgtgtgggcccatgaggggagctcgcatgtgatccacaacatgcatgatagtatatgtgcgtatgtgtgttatgcatgcatgggtgtgtgtattaggggctcgcgtgcgagccaatacgggggcttgcatgagagtcatggaatgcatgggagtgtgtgtgtgtgtgtgtatgtgtgtgtgtgtgtgtgtgtgcgcgtg

SEQ ID NO: 295480 - DNA, 4007 bp, Cannabis indica
ttattgggctgagctttattaatgaaaatgtgggtggggactccactttgggccaagaaacatctgaccaccttgatgagaatagagcaattggtaagtttttccaagcccaagatacatatatggaggaatttaagttatgcatgaatgttgataagcctaagcataaggtccactttgaggatattgaagcccaaccttcctcagaagttaatgaacacattcatccctttaagaagagacaagtgtgttcttgatttgtctctcatatttctaaaattgaatttaaactgagaagattccctagtgtgatacgtgactttccggttggagtgggacgtgaaactcctcatattattgtggatgaactagaaaaggagtttcatcactttaccagtagcaatggcaagcatggttctaatgaggaggctagcctatttgatgatagcatgagctagactaccaaacctcctttagctaggcaattgttgcgtctctcagcctggaaagcacaagcacaaatgaaagacattgataatccaactagagaagtgatagttcatgatgatacgagctcattcattggaaattttgaacaactgttcctccttgtggaggttggtagattgccacctccacaggaacaatgagaggaatttcttggaactgtagggggttggggtagacttctacagttctcaagctcaagtcccttattcgggcgtgctcacaagactttatctttcttaccgaattaaaagtggacacatctcagatggtacattctcttaataatttacatttttataataatgttgtcttttcagctcggggtgtgcatgtggaattagtttggcctggaaaaaataatttaatatttaaaagcattagagtgatgaaaaaatagattttgggtcttatccatgcggatcctgctcattattcttggctcctcacttgtgtttatgcccccttactttcatgagaaaaaaagattctagaatgatttgatggggttggggcagcggtttggaggcccatggttggtcttagaggatgtcaattttgtgcttagtcctactgagagagtcaactctaaaggaaaagattagtttgcccagttatttttgagttgatcaattctaatggtctcattttctttccaatcaaaggggacaatctgacgtgggataatcatcgtgatggtcaagctcacattacatctactttggataaggggttggctaatgctcagtggattggattattccctaaggcagttattcattccctccacacaacaaactcatatcatagacctttgtgcttttacgcaaggggcctggaaacaaattttaaacaacaatttaagtttgaagtttggtggactagagatgagcagagtaaattagtggtgaatcatgcttggtctactgttaagcgtcattgagcaccagctagaatgttcaaaaagattggtgctacgagggtgagccttcttcaatggagcgaaagataatttggtgctattgacttaactattcgcaacctcgagaagaagctttagtctttacaagatcaacccactggtcaacgcaattggaaagatgagtccaatctcagaaagtctcttaatgaggcgttaactagatgagctgcatactggaaacaacgatctcatatctcttagcttaaagatggtgacaaatgctctaaattcttcttcatttcaaccactgttagaaatcaaagaaatgcaattgaaagtattcttaatagtaatgggggaatggattacctctcgcgaaagcactattaatgaatttatggactacttgggtagtatttttttgacgtcttgtgcaacctcgttggctagcattgaccagttgattcatgaccaaatctctagtagggagcatgatgagttgctaagtatcccaaatgaagtagagattaaacgtactctatttacaatgagtagtcttaaagctcctgaccttaatggtatgcatgttttattcttcaaacattattgggaaacggttgggagggatttttttcattagaactgggaacttacacaaaggcacaaatgcaactaatgtggtccttatccttaaagtatctaaccctctaaaagtctctcaatacatgcatatatccctttttcaatgtcagctataaagtaatttctaaaatcattgcgaatagaattaagtcaatattgccgagacttatttgcccaacccagactgcttttgtactatagaggaatatttaagacaacaatgttatcatctaggaagttattcactcttttaagggcaagaggggaaaataagggctttttgcgatcaaaattgaccttttaaaggcttatgacaaattgagttggcagttcattgaccatgtcttcaagagtttcaaggtccccgataaattttgtaactagatttctcagtatatttctactacaattcttagcatttgcatcaatggagaaaatatgggtaagattgccccatgtagaattagacaaggaaattccctattcccctatatatttatctggcgggctgcgatcctttcaagtttattggaagatgttatgaaaaaatgtgtgattgaaggcattaaacttagcaaggatgacccaaccttttcacatatcttttttattaatgacctaatcctcttggggtgccaatataaaggaagccaaagaaaaaaatgagtacttaattgttagaaatcttaaaaatgatactaccattatttcccatgagaatcaaaaaagcattgtcattgggtattagtggtgctcagtaccttttagaagtggcaccctacaattgattagcgagttcctaaaaattattacattaaattatataaaatctaatacttaattacaccaatagtaatatgatacatagaagggtattaggcaccgatagtaccttttagcattatacttagagaaatagtaagggacaccttatggtgttaagcaccgcaagagataatataccgttattagtgcaaattaatatcagatcccacacaatttaatttaataaaatataaaaaatcgctaactaatcacaacacgctacatcggtatggtattggacaccatatggtgcttaatagtaatgctcttatacttatggccgtgcaatggtaatttcccaataaatacttaaatctttaaaaacacccacttccatgtagcacacttggagcaaaaggtagtcaatgaaacaaagatgttatttaaataagataagaaagaaattatcaagctaatctgatgtagcaaacatcatcaaattttattgtttcaaggcaaaagtagagataaatagctcctacataaccgtttacaatgaatgaatcatcacaagactgcacaagcaacaaatactccaagtagagatagttcaagaaactatttcagtaggtacccactcaaaatagaaagtgcgtaaagttgtataatttatcatatgcacacacctccaccagatttccgtttggtttcttgctatatatacacacacacaaggtttgtgatcaaacaaaaatgaactcttcttcagtgtactaacagttgacgccacattgagatgcagcttttgcagcatctgaggtgaatggatctatacgcacccaaagcaaggagaagatggaagcaagaagaatggaccaaacaatgacaattgtaggagtacggttttgtcgacccaggagacccttcaagaaggggtacaaatgggcaatgacccatattgcaaagaagagcttcccaaacagtggtccccaagactggtagccactgttatggcatgtgaaacaccagccacaatacctaccaacgttaattataagaactgtagttggagggatgagagagctgtccatttaaacacatagagctccgcaaaagtctccatcatcatcagatgccttggaagtaacagtgaagtttgtatcaatccacg

SEQ ID NO: 295481 - DNA, 3582 bp, Cannabis indica
aaaaaaaaattcttttttttattatttttgaatgaatatctttttattattaattctattatacaaaaaaaactaggcacagacgaaacctatataagagctcagtgtttcccctaaaccaaaattcaattcagtaaaaagaagaaaactttttagggttttggcttgcgatactctctgctcttgatctactaacaggttcgtcgaatttcttgatttctgtggtttacacgaatctttgagaattccatagtttcatttgatcgtctgtattctttgattttttattttggattggattggattgagttttctttttctaggtattaggaaaatttgatttgctagggtttttgggtgtgcgcctgtattaattcgtgcaataattttgattatggaagctttgaagcgtaatggtaagagaaaagaattaaagaaagaaagagagaggagaaggaatgatggtgattttaaggagagagaggatgaatcaagctctggtaggtgcagagagagttctagatctagaaagaggagaagtactggtgaggatgaagagcgaaaattaggggaagaggttgagaagcggaggaagagagttcagcagtggcaagaattcaggagaaagaatgaagaagttggaagagagaaaatttgggaggtgaatgataggaagatttggagccttgaagatgaacaatctgatggagaaatcgatcaagttagtgatgatgaagttagggatggaatgaaaattggtttgcagaatggggttgatggggtttctgttgatgaggagattgatccattagatgcttatataaatactatggttttgcctgaagttgaaaaactaaatgatgataaaagtatggagttgaagaataaatctttgggtagaataattcctggggaggattctgattcggattatggggatcttgaggatgatggagaattggtagatgatgaagaagatgatgatgaattcatgaaaagagttaagaagacaaaagctgaaaaactctctattgttgatcattcgaaaattgattataagccatttaggaagaatttctatattgaagtgaaagaaatatcaagaatgacttcgaaagaggtttctgcataccgtgaagaattggaattgacttcacatggtgaggatgtaccgaagccagttaagacttggtaccaaatgggacttacaagtaaaatattggagacaataaagaaacttaaatatgaaaagccaatgccaattcaagttcaggcactgcctacaattatgagtggtcgagattgcattggcattgcaaaaactggctcgggcaaaactctggcgtttgtgctaccaatgttgaggcatattaaggaccagccgcctgtcgtttcaggagaggggcctatcgggcttataatggcacctacaagggagcttgttaaacagattcatggtgatataaaaatgttctccaaggtattaggtattaggtgtgtgcctgtatatggaggctctgatgttggccaacaaattagtgaattaaaaaagggtgctgaaattgttgtttgtacaccaggcagaatgattgacatgctttgcacaagcagtggaaaaattacaaatctccgtagagttacatatttggtcatggatgaagctgacaggatgtttgacatgggttttgaacctcaaatcagtttgattattcggaatattcgtccagatagacaaaatgtacttttctcagctactttccctcgtcaagttgaaaagttagctcgcagtttgttacacaaacctgtggaaatacaggtaggtggaaggagtgctgttaataaggacatcacgcagctggttgaagtgaggcctgaaaatgagaggtttcttagattattagaaatacttggagaatggtatgagaaagggaaaattctagtttttgtccattcccaagaaaagtgtgatgctttgtttagggatttactcaaacatagttatccttgcctatctcttcatggtgctaaggaccaaacggatcgtgagtcgaccatttccgatttcaaaagtaatgtttgcaatttgttgattgcaactagtgttgctgctagaggattagatgtcaaggagcttgaactggtgattaactttgatgtgccaatttactatgaggactacgttcaccgtgttggtcgaacaggtcgagctggccgtaaaggttgtgctataacatttatatctgaggaagattctagatatgctcctcatatagtaaaagcacttgagctttcggatcaagttgttccagatgacttaaaagcactagctgatagtttcttgcaaaaagtgaatcaaggattggaacaaccacaaagtggctatgtgagaaatgatggttacaagtttagtaaagaagaagatgagttgatgatagcagcaaaaaaagcacaggcgaaagcgtgtggtttcgaagttatgtccgactcagaagatgaaggtgtctgcaaggaagaacttgacatagatggctccgcttcttcctccaaaggcagaacagaagcattggtgcccgaaactaaactgcctgtatcggtaaacttgcagcatatcctagagaaaattcaagctgatgcagggcctaaacactacagagcagagctggagataaacgatttccctcaaaacgctcgctggaaagtcacgcatagtaactttgggaactataccgagtggaccggagctgccattactactaggggaagcacttcccgccgggtcaagttgcaggaccaggagaccgcaaactttacttgtttattgaaggacctaccgaacaatctgtgaagagagctaaagccgaaatcaaacgtgttttggaagacataacaagccaggctctcatgtagctctctaattggtaagatctcaatcttaatctttgctaatgcattaattgtggatcttttacttgataaagttggattacttataatttgtttgtttctttctttctttccagctccaggttttgaaactttaagatcaaattgttgggtagtagtggtaatgagttgggtagtgattgattttgacttgtggtcaaaacttgtttaatgatatgtgtttatcccttttatttgctaatgattttcttgtttttgtctcttcaggaatcctattgtgctgggtgactagtatattttggctttttgtgatagttgttctttaatgatgtttttaactaattgttctactttggttgttgatagaatttgtttactgattttgtttcttttttcttgaaatttgcaggagcaacaaacactcatgaagagagaaactttttcttagaagaagggtgaattggttgattaatatttgtgggattcttttgtaagcattatctgttaatctttttattataagtttagtatttttgtaattaaagtacatgtataccttaagaacatttgaaaagtttgtctctcttaagaattgagaaaaagaaaaaaaaaaacagctcaatttggcacatttcaaaagttggtcaaatgcctgaatataagtcaatggatgggtat

SEQ ID NO: 295482 - DNA, 2831 bp, Cannabis indica
ggtgctctactgtgcaggaaagggtaaatctgtctctgatcaaccatgagcgcgggagctgggcgatgtatgtacatgttcgggccacactagaccaagtgggttggggtctaccagtgatgaattttgtaactctgttttgccgcttaggccggctaatggaatcaggcttgtaataatattttgtaaaatatttttgggatcccgatacatgtaacttttggtttttaaagttaaaattattacaagtttattttcattctatatgtatttaaagtttaatttccgcgctaattttattagtaatcccagaaaggggattagggtttcttaagtatcttgggtaacgtgcctaatagttagggcgttacatagtcagtacctttttcagcttgattttgatctacaggatctttgtccgcctcaacctcaataggttttccactaaagcattcacttggttttgtcttggtctttgatttcatagccatttaatcttctctaaagataacatctctgctcaataagaattttctataacctgactccaaacaccaaagatcgtaaccttttacaacatctggataaccaaggaatagacatttcagagcccttggttgaagtttatcttgctttatgtggacatatgttgtgcatccaaacacccgaaggttttcatagctgggtggatgccctgtccatttttcttctggggctttgaatcctatggttgcaaatggacatctattgatgagatagttagctttcttcacagcttcaccccagaaatgtccctcaagaccagcactatgaagcatacatccgactctttcaagaagagttatgttcatcctctcatccaagctattttgttgaggattcttgggcactttcttgtgtctgtctataccttctcttctgcaaaactcaaacaatttattagatcagaattcaagcccattatcagttttgagtttcatgaccctcttatgtattttgttttctactatctttctccaagtgaaaaaggtattgaaaccataatctttagatttgagtaagaaaacccacaccgtccttgaaaaatcatctacaatgcttaggaagtagctagcaccaccaaggtttttgatccttgatgccccccataggttagagtgcagatagttcaatggttctttgctggtgtgaatactttttgtgaattttgccttgcagcattttccatagacacaatttttatagtacccgatttctcattcaattttcactttaataggccttgtttttctagttcttgcagacccctttcacttacatgtccaaacttcaaattccatgtctggtgttgtcaatttcttgagcagttattgcaggagaaaccttccctataacagtttttccaattaaagaatataattcattcttcaattctcctttcatcactactgtagaacctcttgagatcataagagttccaccttccaccttaatggtgcagccaatactatctagcatacctatagacggtaggtttcttctcaaatcaagaacatacctgacattttgaagtgttcttgatatgccaccaaacatggtgatgacaatcgtgccaataccaagtatagttcaggccttgttttttcccaatagaacagtacctcctgcgactttcttgaagtcgctaaagatctccatcttgggacacatgtgaaatgaacaactagagtccataatccactcttcttactagaggataccaacacatctactgaggtgtagtcttgagaagcaatgttagcttctcctttcttcttgccttgatatctggcaagtttagctttgagtgctatgcactcatctctgaagtgtccttctttctgacaataataacacttctttcctgacttgaaattagacttggattgattactgtttttggatttattgttataattatttgagtctccctttctatcacctgcctcatcaatcttcttttgaatttcttttgagttaagtgcagactttacatcattcaatgttagagattcttttccacacaaaaatgtatcaacaaaatacttaaaagatttaggcagagaagagagtagaattataccttgtcctcctcatcaatcttgagaccaatatgattcaattctaaaataatcttgttgaattcatcaagttgccttcttagttccttgctttcatccattttcataatatacagttttttcttaaggtataatttgttagctagagatttctttaaatagataccagctaacttctcccataaaccatcagcatctctcattttcttttatactaaactcttagaaagagcaaactctcaacaaaaaggctctctcaccatctctcattttcttttgaactaaactaaaagcacggatctcttttttaatcacatcaacagttcacattgtaagagtaatctttgaatatgtaagtgtttctattattccaaataggataaacagtggcagcaaatacagttgttttaatctcagcaacagatcctctcttcatttcgtcgatctagccaagccagccatcaaaatttagaggccagcttctgccaatccaaccatgaagttgtccaagaacctttatgaatagagacaactaaaaaaaaaagatgattgtgatcaggggtggacccaaaaatattgttcaccatgggcgaaaaaaaaattagaggggagagtaaacataaaaattaagacataacaaaaattaatttagaaaaataatataatatagaagaaaatacaagagtaatttgcggcataaatacttaagtt

SEQ ID NO: 295483 - DNA, 4475 bp, Cannabis indica
ctgccataagcaccgccacaccaccaccaacgacttgaccatctggactagcaagggaaacgcttacaccaccagttcgatggcggggaccaccatcctcagaaactaagtaagaacctgacaagcaaagtatttgaaaacgaccctgcaatgttgtggaaacaacatgctatggttaagttggtctagaaactaaacagagtcaatgacaatggcgtctcaaggtttatttaccatcacaatgtaatgtaagctttagatattttatcaaagggagaggtatgaacttgaaaagggaatgagaaaaactaataatttatgaatttaaatgtgaattttgtaagcatattggactaaataaaaaaataaacaactgctagtaagaaagttgaaacataacagttatcaccaccccacaacattgaaaatgtgacccatctttgtataccttcattcaaaggaatcaaattttggcatatatcatgaaagaacaacttttattgattaacctagtgcataagaaaggttctcatactccataacaatcttctttgattaactgaatgctacttagctctggcataaagttatccaatcgcctttcttttatactaccaattaaaatcagccatgctaattcatcagcacattacttaccaagaattttgatcataagacagatcaaaatttcattttttgttccttttcattagtaacacaacaacaatttccaaatgaccaactaaaaccaactactaagacattaaaagaagcaaaatccacaacttaacttcacctccacaaaccaacgaaattcaaaacaatctactttaataagcatgatgacagacaaaagactcgaaaccatttaacagtcaactaaaaatgtaattacaagagacaaaggcagaaatattggaacctcatatgtgatactgacaccagtagaagcaggttgacgtagtgaaactgaagacactataccactgcctgacaatatgcacagagctcttggcctctgttgtgcaaacgaaagaagtttagcaacaacatcctgcaggaataagcaagtaaagactttaagtatctcacccagcaaattgatcaacagaacaccataagtttctcaaaatatagttttggccaagcatcatagttaagtccattagactcatcagctgaaatgcggtcgagcacaaaatactaaatgaaaacaagagtattaggcacttttcatctcttgtttttttgttctttcttcaactagattttcccgatacagaaaattattgataatccataagtctcattgtcattgcatcagactggtgaggacaatatgtctctgcataatagtttcattcttatgaaagagacataacatacctctccaactccaatggtgataacatgtggtgcaaaagcaactcctgctgagttgttcatccattcacctatcaagcaaacttatcataagtacaagaatattgacaagtcgttaacaaatattagtgatacagatataagatttaacaaggaaagcaaaccaaaaacactataccaaaaggacttttcatacgtgcttaaacatatgaaggtggaaagcaatataaagagaacccaaaacaatgaaatcgaaaacaaatcattacaacttcgaaacttaattaaaaatggcataagatcaccaaaacccaactttgaaagagaataaaaagctaaacagttaagtataaaaatgcagtgacaatgtagtagtatcaaaaatagtaacaaaaaatgaactatcagaaataatgacaaagttatcatcactggagatagttaccaagactagctagctgttgtttcctcccagtccctcggggccgtcctctactccgcttggggccagagggtgccgagcctggtgaaagattttgagttgcagacatggaagaaagtctcaaagaaacaggcccatcagggccatattttcgaggcctccctctctttttctttacaggctcactggaaggcattccaggattgacaatcattctggtgccatgaggaaaattggcacgagaaggctctactgagaatgagggtcccattgagttgttgttgttgttgttggtcctaacattggattggtttggaatgccagtatttgacaagggtctgaacccagatggggcatgttgtagacctggaggttgtgatccagacccagaaccaccaagccctcccctatgtaagtagtatgaagctgacccagcagacaatgccatggcttctctcccatccatgcatttagtgagaaaatagtcactgaaaaaagcctataatgttttaaatctaattcgctaaaaagttaagtcttgaaaacaccctctcctcaaagttcaaaactttaactctctaccaaaactttgaacagcttccaagcaaagagtccagtcgtatatggatgaaactttcaaactatcagtctgaaagaaaaagctttagaaagcaacgaactttggaaatctgatcctataaatcaactaaaaaaatttaaccctaaaagaactacagtgagaaagtgcagggaaattaaagaacaatgggttttacatgggtttctctcaagtaacgaaaaatctagcaaagcccaaagcaatttcgatcttttaccccaaaaaaaaaaaacaatagcaggtaagaaagaaaaaaaaaactgatgccaaggcttaaaactaaaactaaaactaccctaaaatcaccaaaaatcagagagtacccagaagaaatgtggaaaaatcagaagctcacagagtgacagcaaagcaagcaccaaaacccaggcagctcttcaatcatgcccttaaacacaacaagaaaaacaaaaccctagatttgaaatctagggttttgacagagaaaaaaaatgcaggagggaggtggaaaggaggaaaggcaaaaataaacaaaaaaagaaattaacaataaaataaaataaaaataaaagaagcgagaaaaagacaaggagagtagagggagaggtatgaagaaaaaaaaatgaattgaaaatttgagcttttgaattaaaggtggtatgtgtgtctgtgcaagtgtgtgtatgtgtgaactgtgaggtgtgagctactatcaagacaagacatttctttcttttccttttttttctttctctctctttacttctcttttttctttattgtatataagagttaggaggggtgtggtctttgtatctgactataagaaaggaaagaccaatgtcattggctggacaggctgtggcctaccaaagtaccaactttcatgtccttatcagattgccattgtttagaccagtgagcccttttcctttctcactatttctctctctaaaaaactcacctcttctggtatgagagctttgccatattactattctgatgtaaacagagttcagaaagaagaaaagggttctcctttctttttctttttaagctgaaagggatgaagttttgatgaggtgaggtgagagggaagatggggggtccctgattagtcaaagaaacaaacaagattcaaattttatttgtttattaatttccttttcttcattaaattattagttacaaatattacatatttgtttgtgattataaaatagcttttttgtctgtgttttttgttttctagttgagaataaaaagagaatatttattaaaaataaacccaacaatcatattaataatattaataatttaaacaaatcaatgtgatgttggtttgtgtttggtctgaaaaatccatgtgatggttacatggaaagtttgttgttcagtgttacagaaaatgacatattctagacttagtactgagaatgtgaaccaaaaaaaaaaatacatatgaaactatgtcgttttacatataatacaataaattgttccaatgaaggattagtcattactgaatttaactcaaataaacattttcttctttcttgtaaaaataaaatatatatatatatattttcttcttcttttttatttatttattagtatggtcaaatgtattagtagtacggtcaatggaggtctgtttaaatacagtctctgaagagttagataataaatgaatgaaaatgctttgggtcagaggagtaaatacaaaaacttggcctacctttgcacttttcaaattgtcacattactaccctacaacacaccaaatgtcatatacttacttactcatactattttactaaattataaattcttaactaaaaatatggattgaattatttatcaaaatttgcttttttttccccttatttttaaagttgtgtagtctcatttcagccgcaaattttatcgattgtagttgggtcttgggtgcttcctcttgtttgcggggtgagccagtggcggaactacatacatctatggagtggccatggccccccctaactttttagaaaaagaaaaaaataaacataa

SEQ ID NO: 295484 - DNA, 986 bp, Cannabis indica
tttttaaattattttttataataaaatggggtaaaaattttgtattgatcaaagttcgagacgtaaaaatactaacttttaacaataaaagaaacagaacttaacagaagagatataattatataattgttatattttaaggagaatttttaacaaaccatatattttaggaggtaagatcaaatattttcaaaaattcaggaggcaaaaatacaaattattcaaaaatataatttaaatttagcataaaataatttttttttatttgtttatcctttcaccactaattaatgttgtttattattaatttcactgaaattaattacaccaattcattaattggatgtcttatcaaattaatttgaaatatttttaattcaagaatttcaactaaatgattaagagactttcaaattacacacaacttttacacagaatgatgtataattaatctcaaccgcacaattaaaaatatttgtagtcccttaatgatataaatgtaatacatatacgcatcactgtgtgtaataagtgtgggctatttgagtgtgtatccagtatactactacaaaaagttatattttcgtcgcttttaaactgacatttatacttatgtcgttagttcaggtaaccaacgtatcaacggtagacgcaaaaaagtacttttctatgtcgattataaaccatcagtatcgaaatatagtgtcaatttagaaccgacaagaactgagtaaaaataaaattttacattattgattccggttgataacaaacacaccgaagaaaataattatttataaaaattttatccaaattcaaaataacaacaccaccaccaaactctcgccgcaccaccacaagaccccatcgcaacccttgcctcaccaccaccatataccattgcacaacctaaacaaaaaagccaaaattagaggaaaagagagagatcgaaagagggaaagagagaaagacagagagagagagag

SEQ ID NO: 295485 - DNA, 4724 bp, Cannabis indica
ccaaaaaataagatgcaccttgtaaatataggtattaccaataaatccatttaacccttctttgattgtgtagtcccatatctacatagtctaagaatcatcccacttgaccttcttcaggtagtgtgggattccacagcttacccagtatttttccttacggatcacgggactactgactgtcacaatcaccccattgtttttgatgttaagagtttctcaaaagaagctgaaataatatttgagatactctctttgtttgtgataatgctaccatgttcgtccatcaaagactttatcttgttgtttgaatttcaagcactggcttggcatgaaagaacttggtattaagatcacccgatcgcaaccattctaatctagacctttgctgccagtatttttcttctcttggtaagtgttcatcaagaatagtttaagctgattgtatactctcagtatggtcagtggaaaaatttgaagagttgttaagtcgattgacatgcttttgagctttagaaatatcagctttaagttttccatatttgccaaaatgccaattttgcaactggtttgcacaaaaatctaagtttaaggaaaggccattaataagatccctagtaggttgttgcagccagcattgagatgcaatctcagtacactcagtatcattcaaccacatcttttgaaaatggaagcgagatctatgagcttgtacaggttcaggtggcattgagaaataaactttatcctaaagtgcacggtgatccgaacaataataatctagatgcattagagtagggagtaataagctatcctaccaaatcttgttagtgaagtactagtttagtgtttcttttaatacagcatgatttcttttatttttggcccaagtgaactcatcactagaaggagtgatatcagtcaaagagcatatgtcaatagttgtttgaaaagcattagtttggttactatgtctgaatggtccaccatttttgtgagtatgagaaaatatttcattcaaagcacctaccaacaaccaaggatcaagaggacatacatcagcaagtccattaatgagagcccaagtatgctttttgttaacaaatttagggaatccataaacaccaaagaaatgccatctaggattatcatcaaaagagtcataataatcaaaatggtttgtattcgttgaaagaaaagttacatcaacattgtctttccataacaacataattccaccacttaaacccatcctggcaactttgaaattgaaagactgtatgaaatgagtgatagcgctagtagtacctttagttttcatgaggaacaatagttgggtagtttgctcacgaataagcaaacgcaatcgatagaatgcactcgggtttcccaaaccccaggcattccaacttatgacatttatggatattagtggggttgttgatcaacaacagtcgttggaaaggaaggcagcaactcagcagaatcctttgatcaagaagaaacttactaggttggggagctgtcactgataaattcactatgcttgctatttttgcatcttttaagaacataaaattatcagggtcaacttgtcgcttatacatacaatttctaattcctttgtcatgatcaacttcttccaacatgattgatttaccttttgcttttgtagccaaaataatagcatcagtgctagtagcagaagaactgaaagttaaattcctagaataagtacctaaagtttggatcataggagggtaggtggcaattggcgtagtggtaataggagattcaatggtgactgatttagtggtaatagagttggttccaatgtcagtgatggcttcagagataataatttcaatagaaaaaagaatttgtgaattgtaataagaagggaatggcgatgggggttcagctaatattttcttggagtgtggcccaataatattcttagatgaagacttagcaatcgtgagggatatcggatgaaggttagcaccaagggctaaatgtttttgtgacagtaaggggggacaggtagaacatatagtttttctggcgagtctagttaagaagagttaagcgttagctttagagaaatcattacaataatgatcataacccaattttggcaacttattcccgatcatttctggcccataggggagttcaggatcaatgccattgtcaagctgctcaaggaaccaagcacaactttctaaaggatgtcccaacagaccacatttaaagcaaaaaatggggagatttttgtagcagaattcaagccagtgttcatcaagaatcttaggaacattcacaagttttcctctcacataattctatgcttgttccctgcacaagcaatagttaacaagaaaagatcaaagtgcatttcagatacaataactgcaaatcgacatttgtttgacaaaaaaaatctcccatcttcttaatgaaagttttttggttaaaagcagttgagagacaacggactacaagaaaaaaatttggtttgtagcttgtatcactaagatcagattcaataagggtgcagaccgccctttccttctcagataagactaaattggagttcatgtgttttgttaatgattccataaaaaagagaatttctgtgagtgagtaacgcaaatgcaagaatagagtaaaaatactttgttcctgaatacaaatagctagcaataaggttcgaagtggcatgagaaggtggagatcatggaggcacatagatgaaggtcgacagttatgtaagatcacgagtgaaatcaagatgatggaaaagacaaagtaggctacaagaagatggaaaataactgtaacagaacaaccctacttgggcacacgtttatatagttatagatacataagctctatgaaatttatataaaataggtggaaattgacagtattattgcaagtttttccataaacacatctcagcattagtttgtaactgacacaattaaacgtaccttagttacgaactacatgaaccccaatgtttgtgttagttgcgtatagaacgagacaacctaaaaaaagtcgtttaataaattaaacaaaataaattgtctattttttattaaatctagcattagtaattacatgttcaagctaataattagaagcatcactatataagctataagctcaaatgtgtcaatcaattcaatatcgattttatagaagtacacttaagtagcgtttagttggaggtaataaaatagaacagaataaaaatgaaataaatttcttctattcttttgtttgattacattttaaaatattagactatcattttaatgggatgacttttctattattttggtagaataactattcaactttaaaatagatagaatgaccatttcaatataagatagaaaaaaattattaaatttttttatcaatttattttatatattttaaatttaattcaattcaatttctattatccttcattcaaaccaaacgtcacattaatagatacaacttgggttaaaaactgatgcaaatcccctctatggaattctctctgttaataagaggacggaaattatatcgttattgtttattcaatctttaattagaggccacggtgaggtatctcaactacccttgcagggtactgtagtattaggcccaccactgtcatttgatgatatcctttcaaatttacatggcatttacataaccttgtcctaaaaatatctaacaagcccaaattgctctttctccattatttttttttaaattataatatccctctgttatttatcgtcatcatatttctatttccatctcaactttactatttaataataataataaaaaaaaatcagatcataatagtattagaattgctcatgttcttatttaatttcaagctggttacaattgtgaagggggcctgttgggagagatctattattcttcaatattctccacagtcatttactattatttagctatagcatagtaatagggattagaatgagactaaagagactaccatatcataatcattgtgatggtaagtagaaaatagcataaatatgtctcataatgtaagcacatacaatacaaggagttggatcggtttatatagtaaaaattaattattcattctgattgactgaagaaaaaataatgataaatcaataatgttgactataatcattgatgataaaacttctcttggtttttttggattcgaaaaataatatcaatcagcagtgggacaaaggagatgatagttaggtgaggaagtgatgactttgattgtagataatggtaaaaagaaaataaattaatgataggcgcgccggacgtcacatagaagcacactttgacttttgaccatgactcatacatattattgcaagatattatttatgcctactttacgaatgagaagaaataatatttgtcatgttaatggttaatgcatgatcctcttaatcattttaaatcaagatgtattcagctatattgtaaaatataatataagaataatatatagagattgagagattatttagtatgttgtattgtattgtattgtatggtattgtattgtattggattgtattatattgtattgtattgtgctaacttgagatttttgaaaactaaatattttaggagctaaagaaatattaaaatccagaaataaatgagatggagatttttatgtggtt

SEQ ID NO: 295486 - DNA, 3991 bp, Cannabis indica
cgatgacctaagggccaccacgtattgtgtcaacttcttttattatttagtatgtaatggccatctcataataaccttccaattcactctttgtgactttatcattgaactttagactctttggagtttagttataacttatatgtaaaaataagagcatcttttaagcaatattatatgatgataatgcgtaattagagcaaaggtatatgataaatatggttagaattacgcaccctcaacctctgcatttttctataacttcatttttagaaatttgttacatttctttaagacatagtttgcaccagtagctgatttatggatgagtacctttagaatactcgatctggctagaatctacatgcttactatttcatttttctatgaaattttaatatatttagagttagtgttttgccccctagacttaagtaaggagcatgattttattagtgacaaagttctaggggcaaaatacctatttagtcatatatttatacataacaaattgtataaattgaatacggtcaaagatgcttctactgtataaatatgattttgttgtcacatatttcattagtattatggccatattgatgcatgtcttctctttttgagatcagatctggatcacaagacggaggccatgctaaaattgattgagacagatgccgactcctttgctcaacgtgcagaaatgtattacaaaaagcggcctgagctggttagcatggttgaagagttttatcgaacccatcgcttattagcggagaagtatgatcaagtaaagtcagattctggaactcgggtactgacaacattaaggtctccattctcttcaaccaagtatcaagtagagaagcccccagtgagtgggatcccctatcagacctacgatagttactctgaaacttgtgacactgaagattttgctgaatcagaagtcgatgatcctgagctggaagaagacgagcaggaatgtgaaaccccacggattcatgaagaaactaaagaaatgaaatttttgagcgggattgattatgaagagctgagaaagttgaaggaagaagtggagaaacttgaggcgaagaacaaagctcaaaaggaagaagtggagagacttcaggaggaaaacaaagctcaaaaggatcaattaaaccagaaagatgaagagaagaggcaggttataaggcagcttagtatggcagttgacatgctcaaggaagataatgtgaagctgaggaagtgtcttgtaaaagacccccccaaaaggcatagtccctttgagtttaacaaattaaaggagtcttttttggggaagatgtttatgaatgggtctcaaaagtatcctgttgttgctctttagacaagtatatgcaattagtgttagcatgtagaaacaccaccagtctttatagatgtccataggcttatacacagttatactacctggggtttgacccctgaactcagagagctagaaagatgatagttttttcccctttatctaaaattagcttccaatattgtcggtaattctatttaatgtaatatttttagtttttgaaagcaatttaatgtaatattaatttcttttatcttttctttggtttaagagaacctagtattgggttttgttgttcaatctacatatggttgttagattctaatacattttcaaagactagatatcattaaaatagatctacaaaacaactaccaacattcccactacaaataaaataaaataaaaataatgctctaagagccatagtaaatgggaatagtattcttaaacttttcaagctctccatcactaccattatgaaataacataaatataatttgaaacgaacaatctttatttactttataatatttattcagaaaaatcccagtgaccatatctatcaaaattcacagaaatgtcaagtactacttgtatatgaataatacatatatatatcatcatctacccctaacaccacactaaaacacatacaaacaacacccttgtaaatatatactaccaaaaataaaaaagctgaaacacttacatacaacaataattgaatttgcccacctttttttatttctctatttctttttattgtttctttggttggataagaatcatcaccaagcaccatttttctttttctgcaacattatgcaaagaaccaacaaaagcccaagaacagagcaagggagagggacccagatgaggaagctgaagaagcaggcatagacccagatggaggaaacgccattccaggtccaggagcaacgacatcgtctggatttggggggctcggactagagggaatggtcgggagtgatgattcttcaggagaaagattctgtttcccgggagtgggaaacagaggagttatgtccggagaaagtgatgggggtaatggagctgttacaggaccaggaccacctggtagaattgctggagctgctgaaatggtggagaattgaatatctgaagaagaagaagccaaggctactgggaatgaaaaggaatgagaataataagcaatgaaaagaatcaacattgttgagagtaatgaccaaaaggaagccataataatcaaaataaatgattatgatgattaaattgattgccccttatgagtagagtaaagctttaataaatgtgtctttgtgatatgaaaaaggaaagacagaaataaaaaggttggagaaaaagagagtatgagaggtttatatgattaaagctttaaaacttgaaaaaggtatctcttcttaggagaaagatagagaaagaatgtggtgatggggaccactgagttgccacgtgtcaaacaacaattgcaagaagttgagataatacagctctgtatgttttgtttatttagcaaagtgacaaggtatatagtttgtgattttcaaccttagcacatggtgaatgccataagttgttcatatatatatatagatattatataaattaaagtatggctgctgtattaaccccgtgatcaatctgtcgttttgaggttaaattcttagtttgcagtttttttattaacattttgtacttaccatggttgtgttgtccaaagttatatatattgatataataatatcagtgaaaatttgatataaaaaagaaaaagaaaaaagaaaaagaaaaatcagtgaaaaaaaagctgtggatttggttaagattttagataaaataattaatgaattttctagcaaataaataataccttttaatggtaattgattggtatgatggtctaatcatataacccaaaatcgattccatttccaccaaacaaaaggaacatgtatttaaatgaatagccagctcaactcaactaaaccaaggtaagtgacaaaaacataatacaaatttaattattttactatgcaagctaagcactacatgcagattcttcagtattatgtttatatgtatatgtgtatataatagatgaaaattgtagtataatatttctggttttctcactacactatcatgttttgacacaagtctcattagtgtttgattgattaaaataaaagtatgatggcttgatttgtgagggtttaaaactataatggtcatcatggggaccaattagaattggagtaattaaatataatcacatttaattagactgaatctcatcaaagatgaagaactattgacttgagttttttcactattgtttcatgtatgaaaaattatttgtgtgactgcaaaagaagaaggaaagtttgactaattatggatgtaaattaattctttaaacttatatgtatcaatattgaaaaaaggtttacaaatatgttgagtacccaaaatgtctcttatacacactcaaccattctcatttgtctctctctctttctcttttcatcattttctctcatcctctctaacaattcaaactaaaattttatttttagtatatagttaacttcttcaagctactacaaagtgctagaa

SEQ ID NO: 295487 - DNA, 4072 bp, Cannabis indica
aaaaagatactcgaatatgtgcacgttgatctttggggaccatacaaggtgcccactcactctggtaagtaatattttctttcaataattgatgattatagtagatgtgtttggacctacttactatcaaccaaaaatgagtgcttggaatagtttagaatttggaaaacttaagtagaaaatcaaaccgaccttaaagttaagaaccttagaacggacaatgggttagagtttatcaacttggaatttgacatgtgccaagagtatgggatcactaggcgtagaactatagtgaagactccacagcaaaatgacgttgtggagaggatgaactgaaccttgttgaacaaagttagatgtttgttgttcagtttcagattagagaaactattttgggggaagctttagcaaccacaacataccttatatatagaagcctaaatagagtgatagacttaacaccttatgaaatgtggtataatagaaccccaacctaatgcacttaagaacctttgggtgtataacatatgtacaccagtccattgacaagctggaacctaaatccatgaagggaactttcctaggttatgccttaggcactaagagctatagagtctacatttccaggaagggtaaaccaaatgttgtgattgctagaaatgttattttcaatgagtaaaaatatcctcacttgacctccaggaaaggtagcgtgtctccgtatgatgcaagaaaaataggaaacaaacacactgtaagtgtggacatagagtacagaatgaagctctagaaaaaagatttataggcggaagttagtttggaactagaaaataatgcacagacagaaggtgttgcagggcaagaagataataaagaccaaatagtggtgctggaaggattcaaacaaataggtctggaaggttaccagttgactcttcacagaacttggagagagattcaccctctagcaaggttcacggaagtagatataatagcatttgcactggcggcagtccaacaacatgaaattgaagagctcagaagctatgaagaggcaagtttaggtggaaacaagtctaaatggcttcaagccatggatgaggaaatggattcactctggaagaacaagacttgggtacctgtgccaaagccagagaataagaagattgtggactccaaatgaattctcaaggtgaatgagggaatcaatgagaatgaaccagtgaagtataaagccagattagtggctaagggatttactcaggtggaaggaatagactacacagaaatcttgtcacatgtggtaaattacaagacaataaggttgatgttgtccttggcagctcaattaaagttcaaggttgaacaacttgatgttaaaactgcttttccaaatggatttttggatgaagagatctacatgaagcggccacttgaattttaggtggaagggcaaagagttgaattagtgtgcaagcttagaagatccctctatggtttaaaacaatccccaagacaatggattaagaggttcgatacgtttatgcaacaaatcgggtttaaacgatctatgtacgatcactgtttatatttcaagaatctagagcaatctacaggtgtgttcttattgctctatgtggatgatatgctcatcatgagcaagcataaatctacaaccaaaagtattaaagccaagctaaaaagagaatttgagatgaaggagcttggaccagttcaaaagatacttggtattgaagtctcacggaaccagaaggaaggaactattagcttaaaggagtatgggtacatcaagaatgttattcaaaagttcaacatggaagatgcaaagagtacatccgtttcgttaagaggtcagttgttttgtcaaaagtccagtgtcctaacaatacaaaatagaaagaagaaatgaaggatgtaccctatgatatggttctatgatatttaatgtacgtgatggtgagcacgagatcggatatagctcactctctaagcatcctaagtcagttcatgtccaatccaggcattgaacattagaaagttcttaaatagttactgagatatttgaagggcacttgcgattatggtctgacctatgaaaattctaaaggagaattggaattgaaagggttcgtggatgcagactacgcctcgaatagagatactagaaaatcaaccacttcttacattttcttgacaaactggaactgtataagctgggaagcccagttacagtctgtggttgctcttcccaccatggaagcagaattcatggtaactacaaaagcttttaaggaagctttatggcttcgcagagtacattatgagttgaaacaaatcaaaggtggagtgactgtgtctttggatagccattcatccatccatctttgtaagaatcttgtttatcatgaaaagagtaaacatatatatatatatatataagactctactggattagagagaagatagaagaagggctggttgatttagaaaaggtcagaagagaagataatcctactgatgttgggactacggtcttaacaaataaacaattgcttgaacttgatcaatcttagaaattagtacattaagattcttagaacaccaaccatgatggatgtattctttcttcaacatcgtctttcttttaattttaagtaactaggtgaaatttattgtatagttcctccaaaatgaaaaagtctccaaagttgttcctaaaaagttaggtgtctcccggatgttattcccagacagctaacttgtccacctcagaaggattcttgtggaatgataattgtgtttggaagggagtttcccagatgaatatcatgtccactccaggttcagtcttcaggttagctagccctcctctagaaaagagtttcagacaactagttattcctcctgaaagtttagtcttcctgaaaggcagatccgaatagtcgactctagctggttctatcctatccaaaagctttttcagcaagtacctttggtccgtgatccaggaagctcgtatatgttcctggatgcacttagaattatgctgacgtgaagatctcactcataggagagttggttaagttagttattgtttaactaacttaacaacttcgattcttgcaaccaccaactttaggaggatcgagaagacaaagatcttacaattcagattgaaagttagagagagaaagagattgagaggtactaagaaaagagagagagagagacagattgggtttggattttgtatgaagaatcttttgtagatgaagaaaattcttgggtaagagtgtgatagttgaaacactttgatagaactcaatagagaatcaaacttgactataacgtacctgctcttgctcaatcaataaagaaaattttggaggtattccagaactagaatagagctatagatcacatcgatctgtaggacttgaaccactatatatcttggtgttgatttctttattttctgcatttatcattttttggttttacttactttatttattactgtttttgttcgactattattcgtgatatattataatcttgtgagtgctaattgtttaattgtttaaaatttaattgatttgattttacactgttaatcgtaattttcacacaattatattatcaaataaacgtacatgagcatacctattaaacattattggcgttcaacaatctctttgcgtgtgcggttagtaattttcacaataatttgtaactttaattaagtaggactgatattaaattgaactagacaccactaatattcctttaacatttctctacatataagtatatagatacaaacatatataaagttaaaatcaaaatgaatataaacaaaatcagctgggtgatcgatctttattcattaccttgcgcaaacagacattttttagagtctcttgaagaatctgctcccagtattctgcctcaagcagggtcgtgatttcagagggatcaccttcgtatatcctgcaaaacatatatatatatatatatatatatatattaagtgtgtgtgtgtgagagagag

SEQ ID NO: 295488 - DNA, 10167 bp, Cannabis indica
tttttttttattttttagttaatataaaaaaaagtgttagaattgaaatttaattaaaaaaaaccaatagaacccaattactaattagattggattttaaagtttaattgaaaggataattacataaaatattaatttttataagaaaaatatatatatttacgttcaaagttttttttatatatatatttttacagtattctataaaacatacaagaaaataacaaaaaattatcaaaacaacaacaaacaacaccaaaacaatatataataataaaaaatcaacaataaaataacaagagtataacataaaaagactgtattttatgtagataaaatctaaaaaattgtaaaaatattaaaaattttctacagaccgtatttttataataataatatttttttgtttttgtgtttttttaaaatattccttaattgaattggatcgaatgataattttttaaatctaattactaattaaattagatcggattaaatggaaaatatttgaattggatgaaatgtccaccccgcgcagtgagaaagaagagaggagagataaagggattttttgttaatttttcttagaaagcacattttaccaatgatttgtaaagtccatattttttaatgtatgctcagatttcccgatcaataaaatctttattgaaagatgattaagctagttgtctactgggagtgttctatttagatgaaatttacaacaaatttcatttcttcaacctctgattaaccacattgagtgtgatacttgcattgtcttcaaagaaaatcaatctgactacacacacacacacctgggacaccatgttcttacatacaaccctggccttactttcaataactcaactatctttggtggttcttctataaatatggtgaagaaaatgataaataaagaaaaagcatattcttaatttggtgttttggactatggaatttgagcaatttccaccaaaattttgtgcagggcttgtggctttgagaaaaatgggcaatggtcactggtttttatcttgaatacaccctctggtggattttccctcaccagcttctcttgaatgtctggagaaagagcatggtcatccaatgtctggataaagaaccgccgaccctttccataattttcgggggaaagtgacagtttctccatgatggggcctagtgggacaggtctcattgaaaccatagccaaggcaatgtcctgcaacaaaatcaaactcgattgtgacatacatacatacatacagaactaggaagaacacatttgatgaatgcccgaatacattacttttttatgagatagaaaccaatttcaaggtcacactagctataattttaatcaaagaatgacaccgatgtaaacatgacacatgtttctgcatcaaaatcatgctggatatatttgatgacgagctcaaaagtattaacatgatcttgcttatgataagcaacgttatatttttagtagtatgcttatgaaaaatctgtgttccccgagatgaaaaagtgataatgatatatgcttttgtgtatataacatacattatacatacctttgttggcgagtgattgaaatataatcctttcatctgctctttctcaaacatgaatccggtaggaggttgatcttttccattcccatgaatcaaaaacttggatccttccatgaattgttccgcggagccaagctaaaacaagaaaaagagtttgacaatagggaagtatgtgaatttgaaacaaaaccttggcatgaaaaattaaaaaagaaatgttcatacaccgaaacatatggaaaagctgaagcagtttcaataccatatttgtatacttatagtttaaaacatctgatgaaacttgtaatgacataattcatatgaaatcatttggaatttacctatctctgtttactttctaattccaagaccaaaaaaatcttagttacacaaaaatttattgcttacctcttctgcaaacacatcaaacggtcgctggccatcagataccattgtcgcacagaggaaaattgctttcgagatcttatgtgggaaatgctccattgcatatgaaacacacgcacctccactactgtgaccaaccaaaataacctacaacagaactcaatacattacggtatttgactaaataaatagacatttccataaattaaaaaactcaacactcttctaaccttttcatcctctggaaggttttgtagaaaattaatcaatggtttcgagtactctgccagtgtacaaacagcattagtatctgttagttcgattccagaccccgtgagatcaaatgcagtgggaaccaatcctgtttcttccaacagagaaattgttttgtaccaacaccatgctccaaatccttctccatgtattaaaacaaatttcttcgttgtaagattctcaagaacttcaggtgcctataccgaaaaacaaaaaaagaaatatacaatgaagtttcattttatgccaaaagggtactcaaatttgaaacaaatacacgcattcattgaagataattgttttacaagtataaggaattccacatatggttccaattgaaatggaatagcataactatagctttttcaatattctagcaaaagaatatgatagtgcttccccttttctcatattaatccatctaaataaacaacatattctgttttttttttcttgaaaggaaaataccataaaagtagagtcactcttatcttatctcttgaccaaagtacgtactccatgatccacattacaatcaataacgattcaattataaaaatactcaaacaaagggacataatcatttgcgtgggcctttttttttttaaaaaaaaaaaagggactttttgataccactttttattttttctttctctctttacataaagaaaaaacgtaaactaaagatcaaggaaatgataatactttaaaatagtacatctttagaagagcaattctgaattcttgttctttcaggtactattttattttatcttattcttatattctttaacttttccaacttcatagccaaaatacaaaatttgcttgaacaaaaaagatactgaaaactttattatggctttagcttatttttagcccatatcagatcttaattttcaaaccccacttttctatttcatttacttattttctaatcacagatctaatcattgaaaaaactccaatcaaattatgattacacaaaggaaaaatgaaataataaaaaaaagaagaacatacgagttttccatttgttactgattctgatagattatgtctccgagagcttgtagacccaatcctccttgacatcgaaccatcgaatctctgagacaactggtgttgatgaagagccatggaaagggcttgtttgtgcaagaactcttcatcagctaataatttcctctgtgaccgattcattcgcttacttctggatccattatctttgatttccttctttgacatgcaaataaaacgattacccatcgtctagaatcgttttagccagaaaacccagaaatcttttttggggaaatttgattgtaagaggaagaaaatcaagaaaaaaatgatatggtagcaatgaagtagaccagcatcctatgtttcaaaacagtctgtaatcaactttcttttaattttttttttggtatgataaaacaaaagaaaaataagaagaagaagaagaaaaaagaaatagagtaggtaaggaaagaggcaagagagatgggactacaataaatttcagatgtgaattacgaaattcaattcataataaagaaaaaaaaatcgccaactatattggtaaagagtattaaatgctttggcttatttcaacggtgggaggagaactgtaagactttggattagagtgttcttacttcttactctccctctctctatatatatgtatatataaaagttataggatattgttatatatagttggggattattcttatatacattagttattagttattaccctttacaggatttgggcatgtgcacataggttataggttttgagctttgagttttgtcttttgtgaatgttcgtgttgtcttctactctagtaagtttaaccacctttagcctaatttaaatacaaatgacaaaatataaataaagtaaaaatcttgagagatttgtttttgtcaaattccaggtttgccaatgacataatgacatgtaatataatcattttgtctacctagttgagcaaagaaagaataacaaaacacaaaacacaaaacacaacacaaacatacacatatttttatttactcaaaaacgacaccgtagaagaacaccgcaaatacatacatacttactggtcgaagcgggccgccattactttctagtttctactcatatttcttcatttatactatttttactataatgcccctccttcaagatcatttcttctctcttttgcatggtatattggtaattttgacgcgggattggtagtggggaccccacacatttgtctgtcattaacgtcgtcgacgtaacgtggtccagtatttccgtaccattatatctatttataaataaatatatgcaaaaaaaaaaacctactaacgtaacacagtcaacccaaaccaactctttattttttcttattacacataataatagagtttcattagatattagactagagtagggccacatacacataacattgcttttttcttcttcatttgtagcatacgtcttccttttaatatctatattcaacatagttaactagatggaatggaataattttatgttttacagaaatatgttcattttattaatattattattattttgtttttgtttccctcactatttttttgtctctggctttcttgatgcaataagatgaacgttttgtagggttggcaatattcgtgtatcactgaatcttgccagagtcgaaactgtaattatcagaagaatattgtagtttggtttctgcaatttgatagagccaagaatattgtattatattattatgtactatctaaaaattatattaagatgtattgatataacgctcacaatttaattaggaaaagacccatacaaatattaatttgaggaagaaaattaaacatgtgaacagttttgaaatctgaaaaaattctgctagcccgtaagtgtgcgtagatcaattccttagctttctgtttttattactgtttatatgcattatgcaccctaaaatgaatagaaaaaaaaaactgaaaatattcaaaagtttacaagtgcgttgattaatgatctgctgcatctaatctaccacctaaaattaaggctcacaactcaccaaaatcataaaaaacaagactaattataaacttcagtatcgattaaaccacctggtgttatcaaataactcaccttcctacaacataaagataaaaatcaaccaaaattaattttgatcaaacacacaaacaggagagtaggacttttaagattggatctatcaggatacattaataaatagatgctatgtgtaaaagacctagaataagatcgagaagaactaaaaaaataagtgtacacaatagaagagtatctgaagtcttcagctggacattagtttggagatgaatgaaggacgaaggcactttgctccgggtggtggatgaagctttccgtgccaagtgagcaaactccctccttttacgatggcactgtaaataatatcaactcaaaacagttaggataatataataactattttcggattaccaaaccaatggtgttcaggtcaggattatcgtcttgtaaattttggagtattgtgcatcacaattaaaatagcagaagcctaatatcagcctaacaacacatacctgaaaggaagagccctagacgtaatatgaaaatgaaaatgacataaacccaaaataaagagtaatgagagagaacatactgtatgtagaagtatcaatctgctctggaagctcctttatatccacctcaaacctctcctgaacctgcatttcatacaacaaaatttcgttaatgatcgatagcagtaccacatagagagtaaagaagagatgccgaacggaaaattaaatcctttacatcattgagaacatcagaatcagcagcagaagaaacaaatgtgatggcaagccctttcgtgccgaatctaccagctctaccaacctggccagaatttcatgtaaaaagcactactcaacttgtaacataagattatatttggtacaaaaattaaacaattaacatatttggcacagcttttacagctttgatccaatgaaaaaaaagttgataaaaaaaaggaaaaaaaagaaaatcatccgttaaaaagcttattgaatatttttgaaaatacgaggaagaaagtaattctcttttctattttatcatccccactaaaaaataaaaagtaaaaagtcttcatttgctttcaattaaaaataataaaaaagcatgcatgctatattgtgtgtaaaatttagcagagcttttggcacacaattggagtaaccacttttttttccttcaaaagtgtgttatattttaggactgcatcaccaatttggactccaatggaaatgctccaataaaaaaaatattataaaatgatatgcactactaaacctaccctgtgtagataggtgtcggcagaatcaggcatgtcatagttaatgacaatgttaacacgctcaatgtcaattcctctaccaaccaaatctgtagccacgagaatcctattctgcccctccttgaaacctttatagcgcttcaacctaaacatatacttaacttgaataagtaaacactccaataaaagcaacatattacaattgaaaggtgctacgtgatgtcagatgacatacatgtgtaaacaaaaatcactaatttttattttggtaaaagaacatcagtcacatgacactattaaaacatcaactgaacaaaatggcaaggcaaagcatttgttagattaagaaattactgaacagagagtgatcactggtttactacattgaagccatacatatattataactgttctagtaatcgtatgctacacaaaatgagattcataatagaacaaaacagtaacaaccaaaagagcaagggaagtaagaagtgagttagaatcctaacctttcctcctgggacatgcctgaatggatacatatagaaggaaagttgcactctgcaagcaacttgttcagctcagcagctctgctcacacttttaacaaaaataacaacttgattgaaatccaaagcatcaaggaggtcgttcaacttgcggtttttctccgactcgctcaacttgatgtagtgctgcatttaccatacgtgaataagattcatatctaaagacagttaaaatacattaagatacatatatttatatatatacctgtacaagcccatgtagggttaacttggcctcgtcatcaacgtagatttccataggctgaaaggaacaaaatgtcacattaaatcaaattaggggccttccacaggctaattgaatccagaacgaaatgaatgatgacgcacatcccttgaatcaagaacctggtccacctcttgtctcctcgaagatacttttctatgttacatcaagcaagcaccactggcgcttaaccactctattaagcaatgaacagcagatggtgtggtgacagcatacactcccatccctccccatataccccaggcaaccacaaagtacccatgactcaaaactaaacccacaccaaacacaatgctaaacaaaaggatgaagagaaaacaatttgaagaaaaacagaagtagaacatggaatactaatcccacaaccatggaaactcctaaaaggtagacctacttccttccttctcactccccattgtacagcctaagaaccagcacttgttatgacggaattaaacaccgaccacaagaaaatagcgaggaagcaggattatgaaaaagacgtcaaaattgagtagtactggccatggaacattacatcttgcataaatttcttgcaaacagggcggatttctttgctaagtgttgcagaaaacatcatgacttgcttatcatgaggtgtcatcttgaaaatctcttgcacatctctcctcatatctgcaaaacacatggaatgagaaactctcaaaatatatgacaccagaaagtatccaaagactggatgatataataagaaaacactctcataccaagtgattcaagcatcttgtcacattcatctagaataaaatgcctcacattcttcagggaaagatctttatctctggtcagtgctaatattcttccaggagttccaacaacaatatgggggcactcatttttcagtagatctttgtggagtttgatgttgacacctccgtaaaagaccgcaaccttgagatcaggcaagtaggtactaaacctctcaaactcatgacatatctaccataacataggctaaacaagtgagccaactaaacataaataagagaagagttgtatacaaagcagtcacaacttcaatatacctgataagccaactctcttgtatgacagagaacaagggcagaaacttggccagccacgggatcaatctgctgcagacttgacagaacaaaaacagcagtttttcccattccagatttagcttgacatataacatccatacctagaatagcttgagggatacattcatgttgcactgatgaagaaccaaagaaagccaggttgaaagaaccattggtaagtaaaacataatgccaccgatcttttcttattgaaaggctaaagctaaccatttctctgaattcaatacaatgacagtaatatattacctgaaaacatataagcaaatgattaatgaatgaaacaaatatgacaaaccacaagatgagaaatggaaaagcataacaacctaacctctacaaagctcccaattcatacagtatatcatcagcaacaagattaccaaaaaggacaattaaaccatacaacaacaccaagtttggaacatataaaataaaactgaacatataaagcatccgcatatcatcacaaacattgaattaaaaaaaacacattggtcaggtaggataaagcacagaaaatcattaaaatttccctcgtgcaaaattacacttgaaacagccgggctctccatagttatgtgtacgactacaagagaatccaaattgcagacatcttcatcctaccaaaactaaagctaataaaacgtttatatttagtttcagaatcacccaatataaactcaaactcagtaattactgtaattactgaaatatacgactatcaaaatatacatgtatataaaactataaaactatactgcagaattaaaatacttattgcaaatttagtgttgtaaatataagccgggctttttaacacggcacgaaatcgacacgagcacggctaggcacgaaaaaatacggacttagacacaacacggcacgatgctacaaattgacacgacacggcacgagaaggacgaaagacatggcacataagcacaaatagactatcccgaaatgcacgctatgcaacaaactcgaaaaacacgacacaacatattaaaaaatcttacaatttaatcataataataataataatgagatatgaatttatcaattatatataagttaaaataataagaaaatttaaatataatacttaatattataattctataattaaaactattaaaacataaaaaaaaattatatattaatttatgtatagaaatctgagtatttacaagtaaatattcaagttctaatgctaattattttttggctaattagtaatttttttccctgaactttacatgtatcaaatcatgcccctaaatttttttggccgttaaaaatttcccttaaactattgagattgttagatttaaggacttttgtctaattttagtaaaaaaattttacatagatgaaattttagggggcatgatttaatacatatcaaagtttaaggagcacgatttggtagatatcaaagtttagggaacataatttagtacataaacaatcactgaaatagtaaaattgaatgaaattagacaaaagtccttaaatttaacaa

SEQ ID NO: 295489 - DNA, 2956 bp, Cannabis indica
aggaatatgctttagtcatgtttagaaagtaagaataaacttcttcaaagaaaaaaaaagtaagagtaaacttcataagagtagtaaaaaggtttatctaccggcataactaatcccatttagtaagaaataatttaatcttattacaaaatttagaataaattttcttatttttaattatcggttgatactattaaaaaaaacggatccaaatatttattcatagtaagtttaaaagattgtaacttcaaatttctcaatttaatttattcgtttaaattttgatttctaaacatgatgtttaagtatagattaataaatacttgttgttgacgataattaagaattattttattcttaatattagtatctttcttacgagtttcaattataaaattactaatttcagtacagttaaattaaaattttactatatttttttattgacaaatggttaactgatttattatatataatttcttaagtaatttaatccaaataatttataaatagtataatatgtaaatataaattaataaattatgttgacgatgaatatttaattgagaaattattttactattaattattttgttacataaaatgtttattcatagtaaatataaaaaggtgttgttgagaaatgagatgcaatgcgaaggtgcactgagtcttagcagcagtgtgttgcaccagattgctctcttctcagattgtgccaggtgtaaaggggtccgcgtttatgggaatcaatgattagaaattttgttagaatattctctctatgtaatctttattgggatctgtattttaccacctgtaaaatgaatcgttgctcaccaaccttatattggccctaatactcttctatataaacaatactctggctcaatgattaaatgggcttagaaattattcatcaacatatttcgcttaattttacttggtatcagagctagcctctgccgtcttcaatggctgcgcctcaagaacaaaccaaaggtggtttagtaaccagcaccaacaaagatggtgcatccccatctcagctcctaaacacatatccacaacagctaacaactctcaatcaacctttctccctaaaacttgacaaaaacaattttaccctgtggaagacaatggtctccaccatagttcgtgatcatagactacacggctatcttaatggcattaaaatgtgtccacctgagttcataccagttactggtgaagccaaatatgaaggggaacttgaaaccaaccctaagtatgagcagtggatcattaatgatcaactcctcatgggatggttacacagctccatgacagaatgaatcaccactgaagttatgggatccacaacagctgctggactttggcgtgctttagaaagtctatatggagcatactctaagtcaaacatggatgaaaccagaaccctcattcaaatagtttaaaagggtaccacatccatggcagagtatcttcgacaaaagaaaaattggtcagatgttcttgctattgctggagatccatatccagaagcatacctggtggccaatgtgctgtctggattggatcctgaatatttatttattgtggttcagattgaggccaggccagccacaacttggcaagagctccaagacattttattgaattttgacagtaaaatagagaggctgcaaactctcaacatcagcagcaaaccaacaaatcctacttctccttaagctaactttattgccaaaaataactcaagaggtaactcgactggtcgcggtcgtggctctcacaactcgaatcagtacactggcaatggtggacgtttctcaggaaacaaaggaagctcaggacgcttcagaggaaggggacgcactaacacattgagaccaacttgccaagtttgtggcaagtatggtcactctactacagtatgttataacagatttgatgagagctatatgggggcagatccaaacaatactaatgggggaaacaagactcctcaaaccaaccacaatgccttcatagccaatcctgaagtgcttgagagtgatgcttggtttgctgacagtggagccagcaaccacatcacttctgatgttgctgcattaagccagaaacaaccctacggtggtaaggaaaaagtcattgttggtgatggatctaaacttagtatttctcatgttggtagtggtaatttggatacaaatgatggtaaacaattgcttttgaaagatatgttacatgttcctcaaattgcaaaaaatttgattagtgtatccaaccttatgaatgataacaacatattgattgaatttcatcatgatgtgtgtttgattaaggacaagggaactcggaaggtggtgcttcatacttaaggatgggttgtacagactggaagtttccccacaacatacatcctctacctgtcatgatcagccacaatctacaaataaacaccagtccaatcttgcttgtgtgcctgcttgtttttctgttaagtctagtattaactagcctcgtgttgataagtgtcatgtatctagaattgatgtatggtataggcgtctaggccatccatcacctagaattttaaatcttgtgttagagtctgccaatgtgaggaaatctaagaatgaaatacaaaaagttttgtgatgcctgtcaatatggcaaatcacacgctcttccctatcaattgtcatcaagtcatgccaagttccttctcgaattaatgcacactgacctatggggagctgctcccattgcatctaatgcaaattttagatattatatacatttcttagatgattatagcagattcacatggctatatgtaggggtgttcatcaaactgcccaaaccgctcaaactgcccgcaccgcaccacaccgcaaaaaaaatgcagtttgaaattctttgcggtgcggtcgcggtttgaatttttcct

SEQ ID NO: 295490 - DNA, 7768 bp, Cannabis indica
tatctatacaaatcatttctataaaagcaaagcaatcattttctatacagaaaaaaaccaacaaaactaactgcatacgcaatcaattaatacaagaagaattatttcacatacgaatgttgcacataactgcattactaaaatccaatttgtttacgaaaggtgatttggtagttagacttctccatgtcttcctcttcggattgtatatttgaatgtacaaacttctgcctttcttatgctgtcgtaaacatcttcggttctctcctgactcaacacccttcttaactgtaattacgagcaactcaccgtccaacgcaacgaaacctattgatgataaggtgcaccgctcctctttcgggacatgtgactcctcctgccaacgatttgaatccatgtcgtatctgcaatgtataaacacaataataagcaaacaagcaacagagaaatccatcaagttaagaaacattagaagtaactgtaatcaatttaatcgtgtagaactgtggacaatgactcgtgtttccaagcataaagttatcatgatactttaaaatttaaaaatgttattatatcgtttcttggttccatgtatgttagttaccgacccaaaatgtagcatagtgacatagttagaaaatttcaacactaaagctgcaacagaaatacagggggagatgttttgcatgctttcttcactccaaagctttttttttttattagggtccaatatttaatgctgacaatgagctccttggcatcacaaaattcatatttctctacttcattcggacctaagtaggaataacttaagccgagcaaaatgagaccttttttttttctgtacttcttgaaaaagaaaaagaaaatagataactgaaccagggacctcataggagcaaactatggccataaggactacctaaccaagtaagatatttttagattagtcccaaaaaaagctatgtttcaggatgaacttgataagattgtgcacagaggatttttgtacaaactgtgggcacagaaaagtaaccaaaccaggaattggagattctaagaattcaatgggtgtcaatagttagaagtagattttccgcgtgtgtgtgtgcaccacatatcattactcttttcatacataaaaaaaatggtctttctacagctaaatgatacactttcctctgccctgtaacagaaaatgcacactccttatgcaaagctaagaaatcaccactaagccgttgcaattccatccacccaagccgcctactgtggcatgagaaaaatcactaagctgatgatgatgtgttagcttagttggctaccccttcttattatgcttccttctagcttaagtaaagagcagcaatggcctatcagaactttttgttaaggctagtcacaagtacaacttttgtgacattttttaatgacctttaatagtggtatctattatagaatatcacaaaagaggtacaaaaggtcataactttttgtgacttacaaagtcacccagaaaatggtaataaaatgtcatttttttttcagtactcttctcaactatcttcccaaaatctaatcagttaaccatttcccaccttaaactgaactgtgtttaaattaggtccaaactcctaaacccatccatttccctttcttgagaacaaaagcctagattaatataacaacaagtgaaaagcctcaggccaatttccctacctcaattatgattcactaaattatattaaaactctactgtcaaaactctgtgatcaatattatttctcagaacaactctgcttttcccaagaccaaatcaaaaaagaagttaaaatatatcgcaattagagttacaacatttcaaataacaatgggatcagtttctagcttagtgtatcagagatctctattctataataggcgaagcagtatatgcaaacataatttgggcaacagttcttcaactttcttcttccggcttagttattaggaagcttattgccctgaacacaagggcctaggtaccactaccaagtagaatattcatttacagccaacaataataatgcaaaactattgaaataacactacacaagatttcattaaagcgtgctaaattgagtagtaatattttcagtttcatgtatgtacatgtttatcttctacgtttcaccaggttttagcttaaattaacaatatgtattataacaataatgctggaaatgtgcatagcaaagttcccaatagttaaaactaagaaatttgctaaagctaaataactcaaaattactaactttatgcagttgggaccaattatcaggagcaatgaccatggcaaacaatattaaaccacactaaaagcaaaatctcaaacatgaaagcaatcagatatcgaattagaaacctgagaacgtcaatcacatcacacatataactttacactggtcgcacaaaattactaactttatgcagttgggaccaagtttccttaaagtgattcgtgaaaataatcattataatttagcaaaataactatgtttggtagaacaagaaaccaaaaactacactataagaccataaaacgaccattatggttgtaaattcaatgtagtaaattttcaaccatgacagacaatagtaaacgaatatcaaccccatcaagcaattagatgtttaatgtgttctttatgtattttcctttcactaaatatctggaaactatattggatatttgaataaaccataaacaaatagcaacggcatgaaagcaagcaattaaatatttaaattaagaatctgagaatgtcaatcccatgaagcatataatcaccaggacatcaatcagtcaaacagcaagatttcattaaagcatgctaaattgagcagtagcattttcggtttcatgtatgtaaatgtttatcttctacgtttcacttaaaattaacaatatggctaattagaataaggctataaatgttcatattgaaattcccaaaagttaaaactaagaaatttgctaaagctaaataactcaaaattactaaattcatgcaataactatggcagacaatagtaaacgaaattaaaagcaaaatctcaaacataaaagcaatcagatattgaattgagaacctgagaatgtcaatcccatcaagcatgtaaacaccagagcatctatgatccttatcttcaacaacaacaatcttcccaagcctaatcctctctccaattttccaaacatccccaatctcccgccactttccatcatttccattcttcatttccataaccacagcatctctacaatactcatcaacaggaaacatccccgaaatcgttctcgattcaccatacccaccaactacccaaaactcactattctcttccccatcttcaacaaagaatccaacacaacccgctcgaaaactcggtaatccatcaagcgaaacccactcatctctcttcacatcatacatttcaacagagctaatcctactcccagcagcggcgaacaacttatgccgcgaaccaccaccggcaaccaaaatcctacccgaattcggaaccgccacacacgcaaaactccctctcggagaaatcatcggcgaaatccgttcccatttccaagtacaaaaatcaaacctaaaagcagccgaagacggcgacggacgatccaacgggaacgaacgagtatcaaaaaccgaaccaccgataacataaaggaaaggaccgatcgcaacggaagtgaaattacaaagcccgtaaacgtgagggttacaaggcataggagggagaggacaccaagcgagattttgaagatcgaagaggtaaggagaagccacggaaggatcttgtgagaatatacagagaaggtgagaaagagaacggcttccgtggctatggcgaagtgaaattaaggccttcgaagagagaaaaagcttccacgatttgcagatggatttgagacggccatggtgagagtatgagatgaaggagaggatcaaagctccgatgtcgttggggagacctgggattagatttagggttagggtttggttaatcagtgaagaagaagaagaagaaggaagaagaatttgggtcattctcaaatttcagagtgtatttttttttcagttattaattaacggaaaatgagagtcggttaatggctttactgaaaaggttcttttttgctataatacccctatacttttacgtctttttggataagttagtccctttacaaaaaaaattgattatttaatccctcaaaaactttatactttgtcttttttgtcttttggtgagaactttttataataataaaaaagatttaaagttccttcttttgaatattatcattatttattcaaaagtgtaatttaattaatttatacttttaataattagactcaatcatataataaatataatttaatttttacttaaaaaatttcatataatttatttattattgtacactaattaattttgaatttatataattattattcaaaaaaattatttagtcactattagaaattcatataatgatttattattgtattaacattttatcaagtaatcaataataatttaaacctgatacttataaataaaaataatattatcacacttaagatatatataatgttaaatcaaaataatattattaaagctaatctcatattactaatgtatagaaataaaataacatatatataagatgaatgggttattattctcatattttgagatagaagctcatgcattttagtctctttcattctaaattgtaacatggtattagagccaaacttaaaactttcgttgtctgatcccctttaacttttatttgggacttttcgactaatgtgtgtcagtttccaatattagggtccttaacatgttttaaattctacaaatttctcaatgtgtacacctacaaatttctcaatttcgtttgagattctttcaaatatcacgttcagctataaagatcgtttattaaacttacactttctaattcctaaacgtgaggaggtatattaaaattagtcgcacattactaatgtgtaaaaataaaatatcatatataagataaataaattactttcctcattactaattaattttgagataaaatatctcatttatcttatcttaaattcttataaatatttaatatgagaaataaactaagttagtgaagtggagcacgtgagagcttttcatgcatgaggttgttttgtatgtcatcaaaaactaacttggaggccaagtaatatatagattggggcaggtggccattgctaatgtcatgtacttcatttttctaaatccatcttaatcttattagcatttggatcctcaaacttgactagatttatcacttaagtcgtttaaatgttttttcctagcaattaaatccctaagaatctttacattttggctcaattcgcttatgtttgaatagtcattgcaaccaaaaactagatagtttatgggttaagttgatgcacaatgtctacttgagggatgtgtgttggtagacatacttgttcctgaaacaaccccaccgaccctaaaactaattaggttctcagtagcaacaaaattattaggccatttttgaaagaaaaaaaagtactgtattttttacaagtattaaaaaaatgtgtatttttaatatgacttttttgtacttacaggttgggaaatttacatggtatactaatttttgctaatttttttataaaaatagtgtcaggtggtattttttacttttttactgtgttttttataagtttcatactgcaatatactgtgttaagttttcactggtgttctactggtgttttgtagttgttctactgttgttttgatttgttctgctttgtgttttactggtgttttataaaaacacagtatttttgaaaacttttccgtttgacagtatttttgtaaaagttaacccaaattacagtatttttgtaaatttctctatgagtttggtggattttaggcccccacctagtccgctttagttcatacccaactcttccatgaaacaaatagttggtaatgatattgacagtaggcccgacaccagacttagagcatacctagtttagagaccccaaaaaaaaattattttaaaattagatattttttacgattttaaaaatactagaattttctaaataagtactcaatttttttttgtttatgtcttattaaatttcaaggaggacctaattggaagtgtatattgtgcaagtgaatgaaaagtttaaaaatttggttaacaggcagagttcatgactgactagttagtatgtggaaaagatgaggaaacaatagagcacattttctttgattgctacttattatatatggcagaatataaatgaagctaaaatttgggacttttcacccaaatatgagataagcataaaagtatataacaaattaaaatgatcaaagaacctgccaaatgatatataaaattgattgaaaagatgggacaaaaataatgcaaacatatataagcataaaagtatataacaagtaaaatgagcaaagaacctcccaaatgatatataaaattgattgaaaagatgggacaaaataatgcaaattaattaaagtatttggatcctcaaacttaattttttttctttaatttaaaaagagaatcacgtggtgcagatcgcttctccacccctctaattattttgtcaatcctgagaactacgtatcagctatagagattttatactttagcttctcttaattgagtcatcgctaatcacttttagagtttttatcacacaaatgacactccttacagtagttaacttttaaagggccaagccttttttaatgtagtaggtttcgaacccttgagagaagaattcccaaactaattaccatatgatgatccagttgattatttgctcctttatgtaaacctcttccatttgtaaagttaaaacacctcctcaaagtaattacatcacaatacaaaaaaatcatttctatatcaaaaattaatccacgaggagaattgaagattaagagttgaagcaactaattttaagtacaataatctactcgtgaaactaaaacactctttgcaaaaacctcaactgttttaccagtcagtaattagttttttctgttaagttagataattcgagtagctttacacttctgttttgaaactcggattaaatggttaattaggactcacattaggacacaaatatcgtaccaattataaattaaatcatagctagcctccatttatgcatgaaattatatatgtcacacttaaaaattccatctgaaacaaatttttgacaaaagaacatatatatttaaaatctaactaagcaaacacaaattaagttcagatcaaattagtaaggtttgtggtggaaacaaagggttccacctcacttaaaattaactaaaagattataaacttcatagtaattactaattagcacctaaaaaacatcaatcaagatctaaaacaacaacctcctacaccttctactcatggtgatgctgatccacacttacaacgttccaatattaacatctcatctttgcattcatcaaacaattcttaaaatttattctctttaattagattaagtttattcacaaatggtttattattataatttgttgttgtccctgattgcaagtaacgaaattgaataaaaattcatagcaagttaaaaataataataaaaaa

SEQ ID NO: 295491 - DNA, 1955 bp, Cannabis indica
aaaaaaaaatgaatattttacatgtactactcatatgtttgctctcaaataaaaagctttgtagtttataccaaacgctttttatatggaataagttgaggaatatttattttttgtatcaattaatcaagaatatttttatattatatttcattaaaatgtacccactttttttagaagattgcctaatatacacttttacttaagtctagaacataatttatattaacttaaggggtataatggagacattatctacaaaagtggatatatcttaaagaatataaaaataaaagtaaaaattaaaataaataaagtaaagtgggtatacaatataattttctccgtatatattcaaaaaatcaataaaataccagagatactaaatcacatattattgagaaaactataaaaaaaaaacttatttgagttatttatagcgataacaaagatgaagcatatcaaatgaataatcgaaatatataattgtaataagaaaatatatatagaattaggaaatggacctaacaaaaaaacttagttgacagaccctcctcatgaagagtttcaattaattaaaaaaaaattatacttttactttaactaaatttatcacagatattaaactcattaactataaatcactaactatatgagttaagaagaaaactatcaatcaactcatattttaatagagcaattaaaccgttaatataaacctaaaattaaagtcttacactcgaatgaacaaattgaaatgaaatgtatacctcaccaaatatgagtaattttagatacatttcatgaagtaatgagatataaaattccaaaaataacactattcctctacaaacaaaatttgcaacaagtgattatttgttttgtaaatattaagattatttgaaaatttatcaactaatggaaacatagttaaaaacacaagtaccactagtggcaaagctaataagtggaaaagttaggtatgggagagtgtggccatgatgttgggttgggacatcatttatgctttgtcgtttaatggtttctatttggcttgttcttaactacacatgagtaaaaaggaaaacccaacttgcaataaagaatgaaaaaaaattgcaagagataattgggttattaactctagacttatctcaaatctcatgatatacaccaaattaattaaagttaaagctaaaactaaagataagataagaaattaaacatcatttcttgcttttcttttttggtcctttccatttctgcagttcaaactaaacctaattaatttatcttctccttttcacttcattgtctctcctttagtgatactaaacttgctttggtttcatattttgttaccaccaatcattctaatatatctcattttatgaattataaatattaacagttagtgactctgaattgacatgttaaataaaaaataagaaaaaaaaattaattttttttattattatgtaaaattaagagactaggaccattcttagtcctcttattatctatgtcttggtggttgagatgtctatttatgatttttccttaaaaaaatataaagaataaaagcaaaaaattgaaaaattgaaaaatcttatggcattgctataaggtattgtagtatttaacatattattattagtacaatttataaattatttttacgtgatataaaatgttagatatcttagtatttctcatcaatgcgtaccttatgtgtaaaaggtcatccaagtggttccaaggattcttgaatgtggtggatataagttgtcaaagaaaaagtgggacattagcctgtccccttcgtgttggattttgtgctctaaataacaccaatttccatataatcagatttactaattaataaagatcataaatgattttatgttgcatggttcacatgatttatttcatatttatatttaatgtataaattc

SEQ ID NO: 295492 - DNA, 4286 bp, Cannabis indica
ttataatatttaaaatttaatttttttaataggtatagtttttaagaatatgaattggaagaaaaaaattaacaaaacttaatacaattaaagatataaattttatataaaataaaaattattaatagagaaaagatttatataaaaaaatggagggttaattggaatcgtccacaaactgttgagttaagcatgttttgaagagatttaacagagaagtggttggagatgttgtgaatgattattggagattgaaagaagattataatacagcctaaggggaccttgctaataacccaaatgattgaatgcttcaataggaggagatggttaaacaacaagagtatactattttatcgaagagctattttagttttctcaagcagtagagtaaaatcacctggttgaaatgtggagaaaaaactcgggatacttccatgcttttatgagaaaaagaaaagtagagaatcgaattattacgtacgtatctaatgaagaagtggttgatgactacaataaagttgttgagcattttctaaactattttaaaaaatttatgaggagaaaaagttcagcaactagaaggattggtgttgaacgcattgagcagggaaatactctgaatgtacaatagcaagtcaatttattaagaccgttcaataacggtgatgtgaagaaggcaatgtttgggatccattcgaataagagcctggggtgagatggatttggttctagttttttcaagggcctttaggacgatattggtgatgaagttgcttaagccattctagaattttttcaagaaggtaagctttcaaagtctttgaatgaaactattatttctctaattcctaagactgagaacccaaaagatgctagtggctacaagcttattgcttgttgcaacactctctacaagtgtatatcgaaaatgctttgtgaaaggctttcaaaagtcttgccttatcttgtttagagcaatcagggggccttcattaagaatagattgcttgctcataacatcttaatcttccaagaccttctcaaagggtatacaaagaagaatatttcagctaggtgcatcatgaaaattgatttcagtaaggcatatgatactgctgattggaattttttagctgatttactaaagagcttttatttcccgtcgagatttgttaactggattctagtttgtctgaagggtactagctataagcttcttatgaatggaaggctccagtgttccttcaaaggagaaaaaaggctttgtcagggagatcccatattccccattctctttattcttattatggagtatctaaccagattgctagctcagagctctaactgtaaagactttggttttcacaccctttgtaaatccctaaaactaacaaatctgtattttgcagatgatctaatcatcttttgcaaaggtaataccaagtcagtgaaaagtgtttttgatgctttcatgaaattttgtgaaaccccaggcctttcagcgaataaatccaagtctctcatttactttagaggagttaaataggatatcaaacaagaaatacttaagatgattcatatggaagaagattcctttcctctaaaatacttgggagttcatcttaggcctacaaaatggaaagcttcgaattgtggcataatcctaaataagttgaataaaaaattgaattgtaggctagcagaaacttgtcctttgctagttgtgctcaattgattcactcagtacttcaggggatcaggaacttaggatgagcctcttcatttttccccacaaagtcacatttgctattgataaacctgtcgagactttcttcttcagggagtaaaagataatagaagtaaaatccatctcttttcctagaaaaaggtacgcctcccaaagaagtttggtggaattgggtttcgagaaggtaaaaattggaacatagcaatgataactaagttcctttaggtgattgcgagcaaacaagacaatctttgggttaaatggattaatgtcatctatcttaaatattagaatttatggagtatcttggtcaaacatgatatgagctggtactttaaaaagattttgaagcttcgaagattaattgatgaggactgcttgtatcaagcgtgaaagaatggaaaatttaaagtgaaaaaaatttataactcgctgatcaatactcaggaagttgggtatgctaccacgatttgggacaagataattgtgcctaaacgtaaatttatttactggcatgctgttaacaatcatctcctcactagagatctcttaagaaaaattatgttagcttgccctgtgtgtgatagtgaaattgagaaccattgtcacttgttcatgcaatgtttatttactaagaaggttatggctgatgttgagatttggttaggccctcatcaatggcctcgtgacttatctgaatcacaacaatggtgtactacttcaacctctgatttgaagcatcaagtgatcaatgctgtgatttctacagtagtatactttctgtggtagaatagaaactgttgtgtgtttgagtctatttgaaacactgttagaaattagcagtgatattaaaacggttgttaagaatagggtgttgggaataggtagatgtaagattaaaataggaggtatgtatattttgaacgtaatagagagctggtagtttgttggttgtgtgttttcgtgagctgtagcttgttgctgcagtctagtttgtttttgcgagttgttgtttttgcttttggctccttgttgtaattgctctgttttttgaataaagtatattctcttgttcaaaaaaaattattaaaatagagtatctttgtgtgtaaataaaatttatcataaataaaaataaaaataaagtgcaaatctcatgctcaaatctttttttatttgaactttcaacacaatcatttgcttatgatactacattttcataaaaaataaaattccgatttcgatcatattatttcgatacattttgatttctttttttcttttttttttttttgaaagaaagcctcaaagaacaccacccaaagacgcaaagaacttcaaagggggttgaggactagaatttattaaataatgacatcagtcaaaagaacgttctaaatacaagaaggatagcccgaccaccatacaatactaactatgtcagacaaatcatatttaactaaggtgtgaccaaccaaattaataattcaagaacaaaatgaaacaaaaacattctaaagcaaattacaatcaaattcaaagggtagggcctggctggtcgtgatgcttccttggctggctagacctgcattgggcagggtctggctgcccatgactccacggttgactggtgtttgttgtgtgttgattggcggtagatcaaaccaattgttagagtctggtggatctagatgcctaaagtgatcggtttcacttctcaaattatcgttttgggtgtttccacccactctcagtcctcgtcggtcgaagatcaacctctatgcaccttgctccccttggggtagaagtgatgtactctggtcggccatgggtactcctgttggtggttggtcagccagtggctgtacaatggatggtgttgctaagctagagatccctagccggcccccatgccgctagttgacgagatttggctattctcgtcatttgacctttgaggaaaggtctgtcctccctctggtaggggaagctctttcttagttcctaaagaacttggcggtagtcttccttaaagtggatccctaaggagatcttggcctcttctatcaattctttgattaaaccgtcctattagatcgctggcctcccgattgcggcgatctaattctgcttggtgagatcgaaggatgtactccaggtcatccatccatcttaggaatttgcgtctctactgagtgaaaacatcgcacttaggagcccgtggttcttcagttaggcctacacggcctgcaacttccatgagtctggccaactcaaggtcttctcttaggtccagttgaggcttgccaattgctagctcgcccactcccgagcctgtctctccagtgaagaatcagagttgaggaccagttgttgtgtaacgtccccgcttcaagcctccattgggcccttacacccacggactaatggctcttatacacgagtacgccactctagctgcttcctggattgatgactaaccctacaaaccaacacgagtgttttcagcgtgctttgtcctcactcacacgcatcc

SEQ ID NO: 295493 - DNA, 3851 bp, Cannabis indica
cttttttttttttttaattcatatggaaagaaagtcatgaatgagggtggggaaaaggaaggaagttgagtctgaaattttctcttccgtttctttttttcggtttttcgggttaactggtttggaaagtaagtttctgtctgcatgaattttttttaagttatatgctgtgagatgagggctacattacatgttagtagggttgttttgtattttcagactttggttttagctcaatatgacttaattgttcatcaatttaggttatgttttttgttttatgaaagagagtgcatttttttttggaaatttgatgtagcttaaaacttaaaaagcctatgccttgttggcctgttatatggattttggtttatcagatgtttaattatgtttaagtttttttccttttattattatgtgtaagattagcatacaaatcaatgtccttgttgttaccaagtacataaattataaagggaacttcatattgaagactgtcaaattagtctcaaccttttacaataatgcaacccctattattaggctctttagttttaattagagctttgatttaatagtctccttgtatttagttatggacaatgtaacataattaacaaatgcaaatctacaagtctttgtttaggaaaaaaaaaccagcttgagaggtgagaatctcgaggaaaaattctatttattctattccatttataattttaacaattttttatattatttattaaaaattaaagtgcaccaatagtactatacttgtgccaaaaaggttgatctctaaatttcattttagtatgtgatagtactacaagtaatatctcttaataatcaaatatcaaatttcaaataatttaatttaataattattccagaatatcactaaccaattacatttaataattattctaaaatatttctaaccaattacaagcacaatatgccttacagaaatgctctttcaatttataactatataccatatttagagttaagagtactctattattaaagatgtctttacctatattgctgatttaagttgctaaaactagtatgaatataaccaatattgttcataattatcagattaaaactaattatacaaaatcataacatttaagttacttgattagattactaaaggtcaagatgatgcacataacaattagtgcccttcgtacataatttgcttgcaaaaattgagatacttatcagtaaacttagtaaaaattattatttttgtatataaaaaatttgatcaatcatgaatgagagtgattaaagattttacttcagcttatattttaaaagaaacaacttaacactttctcaaactatatgttaaagcaacacaaacacaaaatattagtaaaaatacaaaaaccaatcccatcacattcaacaggggcatcccaaaaattaagaattaatctaatttcttttctttaaaatttaagcaaactcatttcaaagaacattgcttccacagttcactagaaaaatattagagtaaatgtaaatagaataatcctaaatccaaatggatctatcatttttctttgttgttaatcaactgttctactctttataatgataattcttctctcttgttttgacactcattaatcttttttgtttttatcattacagtattcttcaaaaatttctctcggttatttcctcttggctattacactaacaaaaccgaggatgcgaccactgaaagattacctgagaaaaaactcagaaaattgccatcaagactctgtttttcttctctttcctttagacttcttgattctatgttcattgttgatagataatgcttccccacttacagaactaccgggatcttgtaaaaccgacgcctcttcatttttcttcctcttcttcacacttcaacacacaaaaaaaaaagattgagaaaattaggtgaattattaaatttacatgtgacctttgaaacactttcgaaattccaagttgatgttaaaacctgtcgtttactctgaaaccttctaaatgattcgctagccaatgaaggcttcctgtgttttcgggtactagagaaccagaaatgtgtagtacatcctcatccatactgcagagttgaatcaatgtcgcgaattaagttttcattagtttgtttccgaagaatcgagcaaaactgatatcttaatttacactagtagtatttgttaccttttgactaaaaactgtatcatacttccaacctttatcacgtggcgcttgtgaaatttgctacaaaatagttcctccccgtgtttctattaagcatttaagcgtatcaaaattggtgtcgaagaacgatatcaacattcaaacataatagtgaagaagaagaagtaagcactactcacaattttatgtacaaattcatcacgaatgtcttcgtccgttataacagctgatgagaagccaagaacaacaacatgaattgatccttgagtaatttttaccaccttcccctctgaaataaataaacaaacaaacataagcaattacaagagagaacataagggagttatattggttagaaagtcttataataacatttttcagaatttagaaatgaaaagcaaataaattgacaggaacatactaccaataggctatgaacagcaaaaacagagaaatattttgtattgaaaatttgagagcgatacacaaccctttccaatttcttcacccctacaaatgaaatccctccctctaactagttctctatcaataccgaatttcctgctctatataaatttgtggaaaacaaaaaatttaattttgggtagctatagaaatacttaacactaaggtaatgtttggttgggaggaatgaaaacataagaataagaatgaaataaaatttaatatgcataaaaaaagttgataaaaaatttattaaaatttttcttatctttcattggaatgatctttcctttggtatagtcattcaactaaaatggtggaaaggctattccattggaataatattccaatactttaaaatgcaatcaaacaaaggaatatagtgaaaattatttcatttacattccattcaattacctccaaccaaatgccacctaaagggtataatgtttttactttggttgtaagttaagtgattcatcccatatcatcttctatacttgaaatacttaataaataatcagaaatctcggaggaaaaatatatttaaaccacataataaaacaaagaaagttaacagcattactacacaattgaattgttgtttttaatctctctctttctcaaacacacacacacaaagggattattacaagttaagaaacaaagttacctaacagcatattaggttttggagagaaaagcaaaagctttgcttttagcttcacagcaatataaggatgcatcccatttaaaattcttgcattcttatcaagaatattaaattcataagccaacataacaccatcaaaattctcatgaaacctgaaatatagaccaaaacagaacaaagataattaatttacataaaatcatcaacaccatctcaatgagaaagaggaagaagaatacttgaaaagcatagagctaagctcgcgaagaatggcatcgtaaatgttgttgctcttagatgggtgaacatagaccaccatgtttgcatccgaaacttttaggctctccattcttcttctaccaaccaatttccaaaaccctattattatgtcagagagagtaagcctgggtttgtactattgggctaactaaaacaacaaagagaaaattacactttataccctttttatattgtcctttttatttttaccctcttt

SEQ ID NO: 295494 - DNA, 4709 bp, Cannabis indica
cttgtgaatatgttaatggagaagagaaaaaaaaaacatagaaaaacacagaaattaagatggctttcatcatgagaaactcttgataatacaataatttttctagcacaaacttactaataagtactaattaaactatagtaagagattaattaactactatatatattaatacgagtatagtacgaaaacctctacagcttaaatctctcaaactctctagcaactactactactgttcctaaaagcaaaaaagaagaagtggtaaagatcaggggaagaaaaaaaagccatgggagatgatcttttcttgaatgtacaacttgatgaagttgaatgtacaaaaaaaagagtttataaaaacagttgcagagtttataaaattggaaatgaactccaatctccggtcacaaatacattagctagaatcgattagaaagaagaaccctcatctgaaccccaattgccgccggtcacagcactaccaccgccggtaatgtctgaaactccaatctctgattccacaaacacctcctcaaagccaacactacctgccgcaaacctccaatcccttcccaaaatcttcgtccccagttaactcacacaaccagaaaatgagagagagaaagagagatacctggttcagtgaagtgaagaggaagggaacaactgaagtggagaacggctagggctttacctagctaagatttggagagatgttgattttccaagctaaataaaacacatcattttcagagatgagatgttaattttgctgctgtactaaaataacctaaagaaactacaaaacacacaatatgggtttttggcaaaatagttccagccgtatgggctttaaaatcccataaactgttgccaaagttgaaaaaagccatataaaggggtccataattaaatatgccatatttatcataaaaggtttaaaaaaaccatataccacgtaaattctactatttaataaccaatatattatttgtttctcaacaataaaattggtattgttatattaaaaaaataatctaaatttttagtcgcctcgtgtaatttaaaatattttgggatttagaatcatctttgatgaatctaaatttaaattacgtcaaaaaaatttaaatttaaatgtgtaatagttgagagaaaaataagataacgttaccttacaaaataataatactataagtaggtcatttgggttattaggcttggaatattacaattaagcttttaaaataaaattaaatatcttctaaaaaatatatatttataaaaattaaataaaacaaaatactgaaaattaccttttacctccttaattaagctatatatacttatagatatacttaattgacattgataatgtaaaatttgatatttacttattcgtgtctgttatgtaatgttgtaacccaaaaaaaaaagattgaacaaccttgagcaagatctaaaataaaactcaaattcaatatcagatccatcccataaaaaaaaaacaaacaacaatatcagatctacaatatatgaaaatttgtttaaacaccaaactagatatttttaggtttgagggatgatgattgcggttcaatggattgagggactaataaaacaacaaccaaaatagagatagatgagatcgagagataaagtgagattgagaaagaattagagagatagcacttattaggcagcatagggtgaagtaaagccgacaacaagagagaaagagagatttcaaagaaaggggcagctgggatagttcagggttatgatatattttttcaatcatatattccgtcaatttataaccgacgcaaaggacgcaaaatacttttgcgtcatttaaaaactaacgctaggttgcgtgaattcaaaatcaacgatatatttacccactaatatattcggttaattttagactttgtctatagctgtgttgaccaatgcaaaaaattgcttttatagtagtagtgttagatacaaatggtgcactttagtatttctctaattgatacaaatgccaataaggctatgctttctaaactggcgtggcagatggagaccaaatgcgataagctgtgggtgaagagcttggaagcaaaatactgtaatagaagctcattttggggagtagagagtcgaagtgttagatacagagagagaaaacaagagatgaatgaatgaatcttgtgtattgattaatatgagctgttagctcagtatatatacaaaggataagttagttaacataactaactaacagaatatatacagggaaaatgaactaacagattataacaaactatatacagttgtaactaactaatgacatcactaacaccccccctcaaactcagagtggctttagaaaccaaactgagtttgtctcgtaagaacttaaacctggtgctagataatgccttagtaaacgtgtctgcaacttgatcatgagctggtgtgtgcttgaccagaagctgatgcttgagaactctttctcgaacgaaatataagtctaattcgatgtgcttagtccgagaatgaagcacaggattggcagacatgagaacagtgctcttattatcacaccacatagtaggaggtttctgaaatggaacctgtacttcagtaagaagagactcaatccacactaaatcagcagtagcaagagccaaacttcgatactctgcttcagtactcgagcgggacacagttggttgcttcttagaagaccaagaaataggattagaaccaagatatatgcagtaccctgaagtggaccttcggtcatcaagatctgaagcccaatctgcatcacaaaaaccagtgagagacatagttgcaggaggctttagaagtagaccaaaatcagaggtaccactgagatatcgaaggattttcttcacagttttccaatgagcttcaaggggagtttgcataaactgtgaaaccttgttaacagcataggatatctcaggtcgagtgagagtagcatactgtagggcacctacaatactaacagagagagaggtatgcattggtgtagagaaaaatagtgaggtttgaaattttaaagtgataagtaaaatatatctctctttgtgagtttgataattttaccaaaccgaataaattttctttatttcgtttctttattatttcgttacgcttgaagtttatcatttttcccaatagtttcatatacttctatatttcaatgtaaacatttatccatattttttttttttctgagaatgaataaacttcactaaggcatctgccaaaagagccaaaggtcaaatacgattagttccggacactaaacctttgcataattcaagttaaaattaagtatttaaaattcgtcaaatattattataatgatgatctttaaaatttatataacaaagcgaacaattacttcccattatttatttttacaataataatattatacagcaaataataaacacatgaacatgttacacttactcatttataatcaactaatctaaaaggacatgcaaacacttattatacacagaatttgtcatattttttttttaataatcaaatagaattgacataattaaacgagtagtgtatataatagcttctgaaaatctcatgaaccagagatttgaatagctttactaacatcaagcttcttcacctctgccttagggacaaccatagtgagaagaccacactccatgccagcctttacttgatccaatttagcattctccggtaacctaagccacctcaagaacattcctcttccctgctcatcataccttatttccttctcctccttgccactaacctggaacagtactctatcgttttcgtaactgactttagtttcttctttcttcacctgagaaggtaccggaattgacgattcttcgccggccgaagtaggagaagtgtagtccgggaagaagaaagagaagtccttcaaagggtcccacacatcgatagcgtaagtgtccaaagggtcacctattcttccccggaaggggctgggaacgctcgacatttctggtaacgacagttgtatatatttatatatattatgtacgtacggtcgcttactgaaactatttttgcttagtttggttattgttttacttttgtttttcaataaattttgatgagttgatcgaagagcttagaagtgagccggtattataatactcggagtcggagggcagtattctagtgctttcctgtatatttgtctgtttgctacagttttggataaaattttgtcatgtatcctatgtgtttccaattctaaatttaataattcacgactctattatctaaatcttatataaaatattaatatatattgatatatagtgcctatatcacattcttcttgagatgattgtttttatttaattccacgtatatttccgctgctttagaaaatatatttatagtatatattttgtggtgtaatcaaactacacctatcactaacataaaccagaagagagtatagtaaaaataacaaagaaacaaatgaaaaacttgaaaagaaataacaaagaaacaaatgaaaaacttgaaaataaatagaaattgaaattttgcaaatgtcaataataaatacgaacatataaaattgtatacgtttgcagaaacagaatgtaattctgttactgcagaaactagttttgcagtga

SEQ ID NO: 295495 - DNA, 4230 bp, Cannabis indica
taaaaaaaaaaacaaactaaaaaaaaattataagtaaaaaaaaaaaataatatacaaaacaacaataaaaaaataatataaaaataacaaaataaaaaaaatataatataaaaatagattaaaagactattttatgtaaataaaatcttaaaaactataaaaatgtttaaaattagtattttatttttttatatgtttttttgaaataatcccaattactaatttacttattcttgaaacaaattaagacatgttacttagacagatacagagattcgaagttgttccccctctgcttcaagagttgactacttatgccattttttttttcaagttttagtttcttctgatgaatgatgaatggaactgttttgaaactgctttgtatgggaagaactattaccttcatgtgtgatcattctatcacagaaacagaacaagaaaactagttctagttctacggctcatacttggattaggaatgtaagatcaaatcgaggaatgaaagagaaggtctaaacaaacttctattagtaaaagtaacacattgtttcaggttgtaaaaatacatatactgacaaacaatattattcatcaagataacatcaaatcggaagataaatatttagaaataggataatactctgtgtaggtaatgtatagaacactaaataggcaagcatagtgaatcatgaaatcaagcagttccctttagcttcttagcaatgccagcaaagtacttcccctgatggaaagcttgctgtagctctagttcagatggctgtctagtgccatccccagcaaaagttcctgagccataagggctgccacccttcacattctccatctcgaacatcccagctccaaaagtgtatccaataggcacaaacaccattccatggtgaaccagctgagtgatggctgtcaagctgcatacatggaaaccaaaccgatcagcataatgttatatctcgaagtgaaaagtataaatgatggtctcacagaatatgataaaaaaataatttgtcgagaattgtaagcttacgcagtagtctcttgtccacctccttgagatccagtgctgtagaaaagtcctgcaggtttgcctgcgagttcttgtgttctccacaaacccccggtagcatcaaagaatgctttaaattgtgaagccatcattccaaatcttgttgggaagccaagaagtaatccatcagcctcagaagatccttgggttcaatgataggcacatcgctctttgggggagcacccatcttgccaagaacatcttctggcagtgtctcaggtacctgttgaggtgccaaatttagtcaatcagactaagcacactaaattacaagtgtctttaaacatctttctctctttagtgaaagctagcacacatatgctgaagactacaaattctaaagtctaaaacagataaatattgtaagaggctacaaaaattacacggctattgtgttttgaagcatacatattaagcaaataagcacaaaccatgaacctaacctaaagagaatgctaactccactaaacacaaaaacaaaaaatcaacaacactgtaaaatcatgcatgttaaatagtatataaagtaaaatcatgcatttatattaatactctgccgtcgaaacaaaaattaattaggggaaaaaaacaggagaaaacattgtaaagatgtcttaatcattgttgaaacaacaacaattcaggttgagtttctaatgttctgcttgatacacatgaatgctcaaggactcaaaattttcatcctgattagtcctgagaaatgataaatttaatgccaatttcatacctgccatagttttacttctactccctccactgaggcagcacctttctgaatctcttcagctagctttgcaacatgtccgtacatggaataataactgatcacgcatagatgaattccaagaattttaatcagttagcattatttaataaaacatgaaaatcaattgtataaagttaaagatatggttaggaaaaaaaccatattccaaatacaacctgttttgcttaactaaggtccaagatgatatggtaagagtacgatggtcccatacagaaaaattgctcaaaaaatttcagctttgatgcgaacatgtgttattagcaatagtgacataacaccaatccatcaatcagtatcactactttgtggggctaagcaggtagaagactaaacatatcaactagttcaacaaaacatatatttgcaatctttaacagtgccactaataattctatcttgttcaagttttcttttgacataaatggaaaggtgaaacaaaagaaatggagtggttagaacagtttaaaagcttatctaataagttttctagaaacacctacatacaaataaataagtgaagtgtctagagtagactaatagacacattagatatatctgcccatgagagaagtagcctcaatctataatcatgatttctaaaagcacacgcactagaatatttctctccattatgattttagttggttttcactttcactatcacttcatctccagttaatatctgttaccatcattataacataaacttcatattatttctccaaaattttgaattatgtatacacagtaatgttgaacttcagctacttggacataaattattacacatcaaacagtacgatttgactctgagtcagatggcatatatccaggttgcaaaagtaaaccaaaggccagagctcttgagacataactgggaatctgagatcattctcttttcaactaagtaaataaatctagtcgtctttaaatttgatcaggacccttatcatggaatcattacttatctcatctaaggttaatgaactgaaactacagcccagagaagaattgattttatcattattataattacaaattcatttagctcagactttaggaaacagaataaataataaatgacatttctgcctctcattttagtaattaaatataaaaggagaaaaacaaatcctcataagttattaaaatcttctaaacagcatattcaactttgaaaaatgaagcttttaaaaaatagaacatgagaaattggcctttcccacatagtgatttgtgggatttatattacacacatagttaccaaaccttaaccccatggtatgattttggtatttagagaaatgctatttgtgtgattgaaatttattaaaaaaaaaaaaaagaaaatttgtgtgtgttttgtcccacatattggtcagtgaataatttgtggagtttataccaagccttaacctcataataggtttttggtaattggataaatgctatgtgtgattgaaatttaattaaaaaaaaaaacagagagagcgagagcgagagagagaaagaaattggcctttaaaatccattgccattaaagttaaaaccagcaattctcaattccttggttttacaaggtgtgaagccatgacttccataatgaaaaaaacccagaaacagatctcatattctttgatcaaaagaaaaagacccagaaaccatttcattgaaagcgactagaaacactgatcggatatctcgtcgaacaaataataaagatcgataaataatcaaaatcaaatcataaataaaaacgagagagaaagataaaatgcatacacaatgtaaactttagtggccattgatggaggagtctgtgtcgctctgcgtgcgctttggtccctcacgagaaaagaagaaaaagaaaaacgtattttcggatgaatggagcgttgacaaggaatcacgaatggggaccttatttatagtgctccataactacataataatatattaatagcatttctcaaccaaaaaaaaaatggatattatattaattataatactgctgcattattatttcctttcaagaaaatactgctacattattgtgtgtgttttttttatttacaaaaattgtgtatttttttagttgggtaaatattattttggatcttgtattttgtaaaattaccgattatattatttattttgttaaatgattaaattcactctatattttctaaaataacacaaataagatcttgagcccatttttttttgtcaaaataaaatttaataataattcaatctaaaaatattataacaaaattaattatattttttacatttgttcgtgttaagaattgttttctagtttattatattaaaaaaa

SEQ ID NO: 295496 - DNA, 4187 bp, Cannabis indica
ttaaatatatagttaattataatcaatttaagtctaaaaatataatttttaccacttagttacatgttatagcaggtcataaaaaaatgtaaccatcatagttatatttttaatgtaaccataatagctacatttttaatataaccattgaatagtcacccattgttattattattattttttgaaatcgacttttttttatctcctatttatttatttattgagagaaagatcaaactttcattcaacagagaactaaatgacatagttcattacatagctcaacgataagaaaaagtaaaattaatcctgataggggcgagcaaataatagcaaggtcaatataccaacaaatttaggtgcacgcgtccatggtagtcataattattgtaaagtaccatattaccataggttgaaggtaaaaaaatagaacaaggatacaaacccccaaatctctaaaaagagaaagtccatagttggaccaaaaaacaaaataaaacaacaatactaaataattaatatatctaaaacaaaataacacaaaatgaaataagaaccatagatcctagttcaatgggagaggaagagacatctagccacgagcaaaattttgacgccaaagggaaaatgagaccggaccacaaatccagcacaaccaatccccatggttaaaacgaaaggacatggaaacaaatccagcaacgtcagctgagaatggttgacaatccccatcggagacccataattgcattcttcgaatcctcaaacaaaaatccaccgacgtagaccacgaaactccaaaaccatcagcctcccacaaaaggcctctccgtgaaagcctacccctaattggctttcccattttcaaagatcaaagatccatggccattagaaatgccatcaacctccctctcgaccaaagaacaccaaacgcacaacagggccgacgactgggtccttagccagagaaaagaaaaaaaaaagaaaccctagttcagaaaaagagaaaaaaaccccacagagagaaaatttttttacaatagagggttgaatctcttactttttttatctcttagaatatcaaatttacccctccaaaatgattgttcaactaaatcaatcattttagtttgtaccttctcactataataatgacataagggcattgacggatctagacagagtgtctcttgtaatgaccgtttgactttatttcccggataattaagaatttatttaatattttgttagtatatgctcttagtagataattaaggcttattttcagaaatagcctttagattattatttttgtcaattatagagatatatttgaattctatgtgtattacatatgttatatatgaaatttcatgtttttcatattttatgtcggtaatagtagaatgcgacgatttggtcaatacagttactttgatatggtaaagtatcttaaatttagtggggtaagatagttgggcatttggaatattgggactttttagagttatagttttgaaccattttactcctaaattgatagattagttcatgactaagtaaaagggaatattagtcttttacctttatttgttagtaagtaagattattctaatccctaaatattaatgcttttttctttttattgttgaatttaataattagtttatctaaaaccaagaaaagtcaaaactctctctctttttacatttttttcctctcagcctcaccctagcaccacccaaaccagaccaaaattttaaactttcaagcaaaaattgacaaggatttcaagtgttagcaagtgattgtctaaggtaagttccttccttctatttctctttgatttcctagcaagaagttaggttttttatgcatgttttggggttttggtgctgtacgagatggggttggtttgggattgttttatggagttgatttaaagttaattatgttgttatatgttggtgttgttggttttagcaaagttcgatcaaggtttgagccttcaagctcaaacttgatcctttaatggtgaaattgattttaagagcttgcgactgtgtttagttgttgaattatgtttgttggatccaaaataggggttctggagctttgtagaagttttggagttcttttggagttgaaatgatattttggaaaaatctatagcagaaaatggcagactgttttttcagaaacggtctaccatttttctctagcagtgtctcagaaaaacggtctaccgttttcagggaaacgacctgccattttttggagattttccccaaagcctcatttgtcatgtttcatcaataattacgatattgccacgctataaaattgatagggaaactattagttttgggtgtaagtccccaaaaagtaatttagtgggtcacttaccggtttatgtaaattttgacttaggaccttaaattgtcgagcaacagtttccactcaggttgaccgacacacatgaatttgaaattgaggtaagattagtataatgatatgcatgcttacatgtttagcgtacatattttattatagcctagtagataacatatcagtagagcggtattagtgtacataaagctacacagaataccgaaaaatatatgttttgaaaagtatggattgatgctatcacatcagtatgacctgagaaccgcgagtataggttgatattatggtcaattgtactgtcgtatgaacgttccagacctggtacattttggatgcatgatagggttgtgattaggtgtatgggcatctgatcacgatctggttttatgtttatgcttatacttttcttactgaatttgttgaatcacatatattatttacatgtgtaggtaaaggcaaggcaaagatgagtagcagtgagcttgagctagatcaagattgtacatatcaagacagtaagacatggagtgttcacatcttcgggacagttgggcttttattttgatagttgctaggcgataacttttataatacatgtatttcaaaagctattttaacttcttaaatagaatcccaaaatatgtatatgtatatatttatttaagtttatgttaaattatgaaaattttaatttttatgttttccaataaactttttgattagcaaaggagtccataataattagaaaatacagtaacgtgcctaatctagtagggcattacatctctagacaagtaaaaaagcaactgcctctatttgattttttatttattaacataagttacatgtatttacaaaaattacaaaagcaaccgtctctgttagatgttactttgtaaattaacctatgtggaattttgatatttaattacatcatagaagtatgacatataatagtcttagatatcacttgtactctttagaatctatatatatctataaagaaatacaaacaataagtttatgtcaaatcttaaatttttttactatattttttgtgaggtttttttattttgtttaaaaaataatcacacaaataaaattatgcacacactttcttcttcaaatacattagaactaattccccacattatttataaatcatttagacattattcatatgggctctaaatattacttttagtatgtcatattgatttgtttaagattattcttgttaaggatgattaataaatttttatgatttatatttctacaagtagttatttataatttaataaatattatatatatttattttaaaaaattcaaactaaactattttaaatgaaactaaataaactactttttatctattttttattcattctaaaattatttttttttaatttattaaagacgactaagtgaaaaagaaacatatatacataagatgtatgtgtgaagctatagacttacaagttatcatatatgttgacagctaataagtgtaagttttggagttcttagtccaattaatgcttaaaaagtattaaccccgtcatttggaacataagggctgagcatcggtcggtttggttcgttttttctatataaaaaattagaattcgattttcgatctggattggtgtaatccgaaaaccgaccgaccaatccaaaacctatcttaaaactgaccgttttgaacctcggtttggtcggttaccgcccaaaccgaacttcttttttttctttaaaatatgatctaatttattcta

SEQ ID NO: 295497 - DNA, 3422 bp, Cannabis indica
aaaaatggagatcaacaggtgatcagtactattttcagggaaattctgcggtgggtgtactttatacttcaccaggggaacacaattttgactacttatttagttatttcttctcagattttatgagcagatcctttcctttttagaactcaaaacactataaatgtcaattcaaactgcctgcgcagatgccataaccgttctcttcccaatgaccattccttccatggaaactctctaagaattaatatattctcccatttcgaatctcacgttttgctcctcaacagtctaacatagcttatttaacacttccattttcgtaacatctctagtttctacttatcaatgatcatattgcagagtctccagccaagatccttcgacgaattctgagttcaccaggacttcaccaaacccctgcttgttttgatgctctcagttccaagttggtggagagagcaggctttaatgtcggttttactagtggtatgtgctgttacttttacttctttcatgtgatttattcaagttctcttatgatgtttgttccttttcctttttgggtgcttgttgcagggttctcaatatcatctgctagactgggaatgccagatacgggacttatatcttatggagaaatagtggaacaggggagacttattaccgatgctgtgtcgattcctgtaattggggatgctgatactggttatggcaatgccatgaacgtgaaaagaactgtgaagggatatattaaagctggttttgctgggattatgattgaagatcaggttaaaatgattctactatgtatataaatttttagattgtactatatattgagagttctttgaccttagtcttggctaagcatcttacttaaccttggtttggtttatgcttgggattgattcttttaaaatagggtgatttgatttgttagtcatctcattgtccaatctttacacttgttgtccatgttttttttggtttccatcttacttgagaaatatctgttgaaaggtactaccaaaagcttgtggtcatactcgaggcagaaaagtggtatcgagagaggaagcagtgatgcggataagagcagctgttgatgctcgggaggagagtgggtctgacattgttattgtggcaaggactgattctcgtcaagcagtgtcttttgaagaatcgctctggagaacaagggcctttgctgaggtcggagcagatgttcttttcatagatgcactagcttcaaaaggagaaatgaaggctttttgtgaaactgctccccaaattcctaaactggtagaattaattttgttttgttagatgtcaagtcatgggcaaccatatttttgttgaaagaaacatataacttccatgatgtgtttttttttctggctaattgcaatgcacatgaaagagtcaaatttagatttggattttgcttattgaaagagctccttgattctgctaggccaatatgctggaaggagggggcaagacaccaatacttactccatctgagcttgaggatattggatataagcttgtggtctatccactttctttactcggggtttctatcaaagcaatgcaggttctgtatctaaaccttgttggttctctaacatttttttcttttagaaccaaagaaaagcacaaacaatacaaaattgttctttaccatcatttactgatgcaactcgttcgaattttcttaaaatatttattcaatgtatgtaaaaccttgaattcactggttccttctggtatgaaagtccaaatattttcttgaattgatttgttctctgattgccacaatccaggatgctctcatcggcatcaaaagtggccacattccacctgttggaaccatgccatctttcgaagagataaaagagatcgtcggtttcaacaagtattatgacgaagagaatcgttatgctactaaggactaacaacccgctaccttcacaaagtggtgagtgagagacttcatagagtttggccttggttggcatagcttcccaaagcacttttctttgttgtttattataaaagctgttttgataactgtttgaatataacaattcgaagtgcttaacactgtcatctgttaagagtactttttagagaagtcaatgcgtggtaaataagtgcttgtacaaaaatcacaagcccagacaaataagcctttcagctaaactggttatggaattgtcttaaaattggcattggctttgcataattgcattgatggacatttccaccttatctgtattatcattctatcatgatacaacttaactaagttaacttcatggttggatcaagaaagtggctaactagctatttgttgggttacctaactgattggaatatttttcttctagaaaacgaagtaacatcgatctttcagaaggaactgtgtctatctttctttgtttcaataatgcgactatatgtagtaaaggaacagtggctagcttgttccatattgtcacaaatgtgaaatgttaaacagatttgtttggacttttttcttttcttaatgaaaagatttgtttaagttgagaatagttttgttgctctcaataacgagctggtccattgcgcaactgtaaaatgagtgaaacttccggttccacatctttgcatactcttaacgtgcagattagatattttcttatttctacgaggggattactctatactcagatgagatttttctttagaaagtttgattataagaaatatatatcgtgtttgttagaaatgatattctataaagatttgtattcgaaaatattttatgaaagagtgataatatatgcacatatatatacataaatgtcacacacaattatgtaagtgggacccattttaaaaatagatgattggctgaaatgttttgtgtaatttgtgtgtaattgtagctacaaagaaatagtgaagatgagtacaaaggttacaattacaacaagagcaagctctccaaactaactccctattaagttgaaatgcatcttgagtattattatgagcatatacattaatattgcgtagaacataagagatacattataaaatgtagggctcttcatccgattcaatccgcactttttttgttaaacacatctaattcgcattaggtgcggattttatttttggatccaatccaatccgcacaatagctcaaatccaatccaatccgcaaaagtgttgattggatcgattactttggattggttaccttttaatattaagttatttaatatttataaaaaaaatatttttttttctacataactagcaaaaaaataaaataaattaatagttattttatgtctacaacaacacattaaattaataaaataacaaataacaaatttaaaggaaaaaaaattagtatatataaa

SEQ ID NO: 295498 - DNA, 2787 bp, Cannabis indica
gatgagagggagaagaggcaaattttttgggttagaggagaggggtattttggggtcactattaaaagatgagaatagttataaaatttttaaaagggtagtataattaaacaccacctctaatctttaagcataatttatcaaatttcccttaaaaaattcattatatattatagtaataataatttccaaactattgtataattcataacccaacaaaactcacaaggagtacttatcgagaaaagaagtactctaacaacttttttacactattacttaaaatacattactaaaaaactattttttctattttccaacatatttttatattatatcatttattagtttatttaaataccctatcaaaattttattcttttaaaaattttatcatattttattcttttcaaatatataatgttaatatatacacatatcccatataaaaataattattaaaatttaaaataattaataaaatatatttcgagcaaatgaatagtattctataaatgtagagcatacataataaattttaaagaaactttaaaataaaaaatgagtttaaaaaacgtatttttagtaggttttttaatttttttaaagttttcctatctcaaaaaagttattgcgagtactcgaaaatattaatattaccttatcatcatggagtatatatacctccatatacatgtacgtatatattcgcaaaaatatacaagttttttttttttgggtctaggtcgactctgacattttgtgggcctaagaaataactttgggtaatagggcagctttaggcattatgtgcctatttcacaatgtttacaaaactatcacttttcttcttacacattcatatatgtataaaaaaaatttgccctaaatttggatggaccctaagcacggacataactctcccgccttaacctaagtctaggcggcttggagttaggtttaaacccataaccctttagtataaagcaaatttagtgatcaaatctttcaaagacatagatcttacatgagaaatcgagaactattccttgttttgtaagagaattattttttcctttgttggccgtttattctgtattactgtaagaacttgtaattttgtagttcataacgtagtcaagtgagcttttgtccataaccgatttgggcgattagctactttgtctattatcctatgaacctcttttgtaatggccgtggaatttaacatttttctattgaatgaacatttctttcaaaaaaaaaatagtacaaagcaaaagataccaccattaggccagcatgtggtggttgaaaatgttgaaattgaaaacactctttttttttacctaaaagaaaactatcaatggaacagaagacagaaccaactcactcactcactgcatggtaataattttgacactttgttctaagtttatatgatgatatcatcacaccattaattcttttctatatttttttctttctgcaatgtaatgatgaatagtacctaagacatatatatcatcaccacaacaagaaaacataatgaaaaaggttattaatttgttatcatagttgatttgaatttgcatttccaatttagtgtcattctttcttgtagtttttgtacgtacaagacaaaaaggaatgttcacaacaatagaatttaaagaatatatatgtgatatgtcatcatcatcatcattctcataaacacaaaacaatgcaactaattgaatttgaaaatcatgctttttatctaattggttgtaccaaacttcttaattatagtttgagcattgttgctgttggacactattagtgtttagtactttttagaggtgtcgctttatgatggactatcaatactctctaaaaattattatattaaattatatgggatataatacttagttgaaccaataacaatattgacatgtaggagggtgctaaacattactagtactttttagcatttctcttataatttatatcctcgttccctttcattgatcacaacttaattttagggaaattatgaaaatattatgatgataaataatggcataagcacctaaaattataatttgttaggactaaatatttttgtagtcataatgcttgttgtaactaaaattaaattagtgacaatttgtatttaaagactatgttttaaactttaagtcacaagtaacttattattactaaaagtcatatttcgtcacaataaagtagtttttttttttttgtaatgtactatgatatatttggtaaaaaaaataaaaacattggattatgataaatataaaagagttcaatacttcaattattgaaggtcattaaaaaggaataattatataaaacattatattttgtaaaaaatttatatttttaagttgaaataattttttatatatttttataatattttatattaatttttaatatatttttataatattttataaaaactacataaaaataataagaaaataacatcaaaacaataacagaaattaataaaaaataaagttacattcggtcaggcactaaaaatcgtaaaaatatttaattaaaatttcgtactaactatatttgtgtaatatttttttttggtgtttttactaaaaatccaacaatgtattggttatggtccttaccacctttgatttcaccaatttaaaagggaaatttacataatatactaacttttgctattttttacaaaaatactgccaagcggtattttttacttttttactgtttttttataagtttcatact

SEQ ID NO: 295499 - DNA, 2287 bp, Cannabis indica
ttaaaaaccaacggcttaaatgaggtgattccaggaagccaaggacttgatgcacaacaaatgttttcaccattatagaaataagacttagtaactattaatgtaatataaataccacaaattactcacacataagaaatataggcttttaacagcaataagacaaaagtggtagctataacctatcaattaagaacttgaaaaagattaaaaaaaacaactaaaggtgcctgaaaccaattaaagtatatgcaccacactacaactagtcccactggcactccttcatgttgtcctcatttttcttctaaatacattccaaaattattgcaatttactgcccacatatataaatatgtcaaaatcaacaatgaaataagcaaagcaaaagattattataactcttggtctttaataggatttgcaaaacaaagtctaccccaattaaataaacttaaacctctttgtttgttggagcaagggactgaacaggtggaagagaatgagtctgattgacctcaccaaatatcttcttaaagtttgggagattaaccatggtccagaagtacctctcaacatgaggaaactctgaagtgaaggccttagtcatgagcttggtgaacccataaaccaaattgcatgttgtaatgatatcagcaagggttacagaatggccaaccatgtatgtgttagaagcaaggtgtgtgttcaatgcacccaatcctctcttcaaacctgagattgcagcttcctcaacaggaccatagtatggggctctcccaactgttggtctaaaccatgtcaaaaggttagcatcaatctccaaagttgtaaagtcaatccactgctcaatctgggcctgtcacatgaaaacaacacagtaaatgtgttcaattggaccacatccaatatttttaaatttgtccagattcgttcaaattaatttcagtcatccaatcgatccaacatttattgggtatattggttttatccaacattttagacctattactttttcgatcgaaacggatctattcaatattttagaaaaagagtaaatttttaatattaattttcatatatatatattttacctgtaacaatataaaaaattactcatctaatgtattagaatatattggataggataaatcccctcataagcaagacggaagagcaaatggaaatagagagttttacatacgtggttgattggatgaaaatttaattactcgtctaaactaaatggaaatactaattggttagatagaatattggatgtattgaaacatattgaatcggtcggatattattagattggatcaatttatagagacgctgatcaaaagcaagaaggaagagcaaatagaaatagagagttttacatattcaatcaaagaagagccataaagagcattgtctgccttggagttggagcgtgcaactgcatcaaaaataagtgcacacacatattataacaactatcccaacaccaaaaggaatggaaaaaagattggatggatggatggatggaaacatgccataacgcgcaatggcgttgctctcgaagatagggccatccggggtttcgagaacaggagactgaaaaaacaagggcaaatcttaatctgagtgaaaatcaaaaacatatgagaattggattatatatgttactaaaccttgccaatagggttcatgttgataaattgtggagttttgtcagagacacccatctcaaagttgggagcaaactcaatattgagaccattatactcagcaacaatgagtgctttgtaagcattcttcttaaaggtcagtgagtgcatgacctggagtggtggattgttcattcatgttcaattcagccaaccaaaaacaacaaacaacaaacaagtatctaagagcttaatcaacttaaaagtgtgtcttgacttgagcaaataagtaagatatataaaaaataatcaaagactacataccaaagccatgataggtagactagtaataatgaagagaaaattggttgatatgaaagagaaagatgtatagcatagtatggaatagagattaaaaaggtaagaggaagatgatattgatacatttcccaaaacaacttaaataacacatttcccaaaacatcttaaatgacacatttcccaaaacatcttaaatgacacatttcccatcccaccaacaaagatctcaataattaataacgttggttacatatatgtctacctagtaatatttgggaaatttgaatttatatgcttaaataattaaaaaa

SEQ ID NO: 295500 - DNA, 1160 bp, Cannabis indica
ctgagataataggcattaaaaaagcattgtattggattgcaactcattcgcgggatggagtcatgttagaaacagatagcttggtgtacgtccaagcgatttagagcagtattttatgccttcacaatttgtattttgtaaaacgatctgcaaataagttggctcattgcttggcaagagactcttgtttctctacaggtcgtgtatttctgttggaggactgttcctctgaagtgcgttctattgttttgaacgaatttactaattaatagatcttatgatttttattcaaaaaaaaatagttattttttaaaaaaaaagaaatagttatattttttaacaaataatagtaaaaatataaaaatgatatttttaaaaagtaaatttaagatatttttgttaaaaaaaattgggcttgtgtgtgggccctactgacccaaccttcggccctgagaagaaacagaaagagggaacacagtaccctccttttcaaaatgaacaccacagaatttcccatcaattataataatagtagtactacaactcatctcctttgaaactatgttattgttcttttacttctttccattatgtcttttatttatgttatcaaatattcattatgagggaaaagctatgccattcattatgtatctatttgtatatctaatatctatctatctactcctttttgtcttctccaagggaaattattaaagccaactttgtcgtgcatagacattgtgataatgtgttagtgtttctttctaactctataatacaataatttaacaacgacaatgtgttttgtccatagtttaccttaaagcaactaaagtccaaaaccaaaaagaaaagatagagatattaattctctcttattctttgatgttatagtttaaaacaatgatttgtatcccaagtatcatttaattatgattcacattgcaattagtgatttgtttgtagtgacaattttaataaaagaatatattaatattactaaacatggattccataagaacaaaatgagaataattctacttacaacatctaccattcactcctcattattctcctaaaaataaatgtatctaaatagggtaaatactattttaaaccctgtgtgttacaaagttatcaattgaaccatctgtttt

SEQ ID NO: 295501 - DNA, 6069 bp, Cannabis indica
aactccaatccaccaagaaaggctctttagccattgatgaataccttctcaagatgaaaaatcttgcagatggtcttcgtgcaacttgaaatcaaattacagaaactcattcttcatgaaattagttagttagacttggctgttataggttgttaagttcttatattcaactaactgttagaatgttagttaaagattatgtaacagttacttaagctctcattaagtgtataaataaccattgtacttatttacttcgataaatgaaatacacttttccatactctgtttctctgaaaatcaactctatgtgaaagtatatggttttcccaccaaagttcttaaccagtgtgtctttgtaattacttttgtgtgaaacaaattctcaaagtgaagaatgtgaattcaacttcctgagaagattttatttaagtcttgcatcagaagaaagcaagcaccgctatcttcgggagaagatttttacaaatcttacatcaaaatggaacaagcattcatcaagtaatttgaaaagagttcagacatttataacttaaggagatttattcaacgaataagagtacatcaaacttgcgacaaaaacagttgagagaatttaagttttgtttaagtcaattactttgtacttttaaaatctaactaataaatcttatctttgggtgtagccccgtaaactagtagcaatttataaaaattacaaataccatatataattttgagcattctttattttatgtttatttctatcttctattgataaattacttaaacatatcaagtttctgtgtctatgtaaacatttttgtaacataacaacaattaattatttaaattttataattaagttattaatcatgaaaatcgaatttaagaaagttgtatagaggaaggtggtaacaagaacaagctggtgttattacattagactacaaacccttctctaaagaagctggtgttgttgtgatcaacattactcatagtaagtggtgtacataatggtattctatatctattctgtcacaaagagaacagaaataattaaatctgttttgcctttgtaggttattttataaaataaaacgaattttatttgaggaagcaaaatcacctaaatattgagtacttgataggttggaatgtgcaacaacaaaaaatcagatacagaatcttcaacaggaagccttagaaggaatcttaaagcacgatctgcagcttgatgagcaaactctcaaaatacttacatgagaagcagaaatgacagaaacataaggtaacaacctgtggaaggtagcattggaatcaatagagctcacagcagcaacctcgataacacaatccggttcttggtatttggattggaataacacagcatgaaggtcggcccttgtctgtacttctacatgcttcacactatgctgtcaacatgtttttaagttcagaagcaaatacttgactcacaaatatacatggtgggaaccaagattaggtcgttagtaaatcgtgcagcatagtttcagtacagtggaatggggatttgaaccgcttccacctcccaagcacactcacattcccaccacttgagctagcccgaagtggcggaaaaataatcatttatttaagtctataggcacatctaactttagctattggaccttccattttatccatgatcaaaaaatcttcacttggtacaaactatattgactttttaatccagacatgtattcaactctaaaccgctgcccagaaatttacaattacaaaatactttccacaaatcttcatcccaattcattctaggagcaaaaatcctaattagccaaaaaagataataaaaaattgttattttcgctctatgtatagggaatgatgtatggctgcactattacttgagaggaaaaagataaacaggggaacaaaatggaaataaaagatcttacccatgtgcaatcactgattgaaatgtcacgagaagtgtagaaagattgatttagtattctttcttcagttctttcagaaattggaagaaggctgaaaattgcacctccataacccactagaacggccattggtttcggtgatgtcctgcacacattgtaaattattattgaagaagttacaagatagtatgttgtatttgttattactagatatgctatgtaaataaattgaacatcaaatggataacaaaattaaatataatgatgacagctttaattagtcacattctcatttcaatatatagaagatgataagagggttaaaaccaggggaaatttatcaatacataaattaaatagataaattacaaaattatatcccgaccctgaaaacagacagataagatccctacctttgcttcaaaagtgccaagcaattggtctcatgaagaaaagaaacatctccaattacacaaaggaccagaataataacacataaatatgaaactgtctataaagaagccatgtaatagcaacaaattgatttcacaatgattttctcaaaatcggtctccactaaggtcccaatggattgtccgccctgatttctagcagagtcgtgaaaaacattctataaataggatgcataaggaatttacctgttttttgcatcctactgcaacgccatcacctgcagcatctacaacctccgttgcattggagctcatctcagccattgctcatcagaacaaaaatcaggtctttatgttgacagagcaccccatcatgaatcaggattcaaaattcacttcaaagggcagaagcgtcctacagttcgacatgatacaaaattagaacatgggcactaatgttgccaaactacaaaaaggaaaaaccttggatataatgagacttctagtgtagtaagatgtctggagaacaaaactgcacctgccaatataagcttttacttgtttgtgatttccattgatgtgcagcatcatcataagtagctttattctggcacaagccagaaaccaatttgaaatcttctctgcctggggtctttgcactctcaattttgggagggcaaatatgcgatgttgcttgggaaaagttgtgaattgcattcaactgctctcaagttctagcatcaggaactgtataattgcttgtccccttaattaaacccctttgtaccaactcattttgcaattcagcagcttcaactacattccctaggtcatggtattttctcactagacaaacacataagatctcatcaggaaggatacccttctcagtcatttcatcaagccatgcttttgcttgttgcacttgaccacactccgaaaaaccccagatcaatgatgtatatgcatgaagatcaagatccatacccatttcaatcatcctgtcgcgcaaattcaaagcttcttgaagattaccatgtttcaagtttccatcaattagagtggtgaatgcagatctatcaggtattatgcccttttctagcatttcatcgaacagcttctcagctgcctcgacgcaatcatttttacaaaacccgtccattaaggctgtatagactgcaacattatgtcgcaaaccaatttcaaccatcctagcaaaatagttagttgcctcctggaccaaaccatttttgcacaagccatcgattaatgcacaataagttacaacattcacctcaattccgcagtcatgcatttcttgcaaaagagagagtgccttcgtagtcttacctgccttaaaatacgcatccataagagtagtatatatgtaatgatttgcacttagaccagaactcttcatttcattgatcacaagctcagatgtgtcaagttcactttggctgcacaaaccccaaataattgttccatataataacaaatcaggtttaatatttttctccttcatttctttcaaagtatccatagctttctccatattcttagccttaatatacccatgaacaagggcagaataaattggcaagttgggagttagtccagccttcagcatctccataaagacttcttctgcttcctttatctttccatcctcacaaaggccatttaataaagcagaataaccaacaatattcaacttaatttctgcatttaacatctcatttgtcagcttcaatgcttcagttaaattacctgctttacaatttgcatcaaccaaagaagtataggtatattcattaggatatagaccaactcgtctcatgtccacaaaaaatttaagtgcttcttgcatcatcccttctttacaaaaggcatcaattagtgtactataagtcacaacatttggtttcaagccatggatcttcatctcatggagaaacttcaaagctcgagggagttttcccaatttacaaaaactattaatcaaaacattgaaagttattacatcaggctcacaacctacatttttcatttcttcatataaacaaactgcttcctctaacttcccaacctttccaaacccatctataagagaattataagtcacaatatcaggcctcaggcccctgtgtttcatttctgcaaacatacttctagcactgtccatatccccttctttgcacatgtaattaatcattatattatatgtgaaaactgaagggttaatcccagccccaaccatgtccttgaaaaacttcttcgataagttagcctttcttgaatttgaaatcctatgcaaaaattcattacaggaccgagtttttggcaaaaccttaaacctcctcatcttcaaaaaacactggtttgcttcctcaaacattcccaactcaaccaaaacactaaacaaggcatcaaaaactccgaatcccggaacacaaacattcctagttgaccacaacacatcaaaaacatcacaacccggcaaaacccagcttaaagagaccagttctttcaaaatctcactggcctgaagatacattctggcacaaaaaagaatgtgagccaaaatgcaataagactcagtagtgtggcaaaacccagttcggtttccaacccatttaaacaatttcaaagccaaaaatgggtactctttcaattcaaccaaaaacttagaaacccaaatgggcgccacagccgaatgaaacaaggtaacaaacttaggatcattccagcggtcttgttcaattattttacgtaagttctccttatctaaatcttcaaggaaagaactaggattcgacttagtagaaaagggtaaacgaataacaagtagaaaactggtgaaaaaaaccaaagggcaagctacaatacaacggtcggatgataatgctggaagaaaattggaagtaggaggataataatgaaggatcggagagaaggggcttactcgaattgaagctctggaagccatggtgattagattattgcgcagaaagaaaagcatcctcaacaaaaagaggaaaatgaagaaaaagaaaggaagagcagcttcagttggcttcatttttcaaagtgcttcgatgaatgaggagattgagattgagaataacaccatttctgcgtgttcataacgattttttgtgagtttgatacgataagaagaagaagagagtgactgtgttcgaaaatgatttactagggtttatgcagcggtttaagctttttatttttcttattttatttgtgttttttttttaaaacaaaaaaaaaaaatcttactaataatcaatatgtttttttatgaaaaataataatcaatgttttttatggcttcttcttccagccattatactttcgaaatccacatttaaaactcacgaaaagtacctcccactcataaccttcgccatctttttctttcaactacctcttttattagttttttttaggctaattagtaatttttctcccgaactttgacatgtactaaattgtacccctgaacttttttggccgttaaaaattccccctgaactattgagattgttaaatttaatgacttttgtctaattttagtaaaaaaatttaacatggatgaaagttcaagaggcatgatttagtacatatcaaagtttgaggggcatgatttattaaatatcaaagtctggggagcatagttt

SEQ ID NO: 295502 - DNA, 4748 bp, Cannabis indica
tcttttcttttctttttaattttaaagtgtgtgtgagcccttttattaaaattttcctttggagagggctaaaatctgaaatacgtttcttgcttctcaagtttgataatagtagtactagtattagtatagtagtgtagtgcttatctctgctttctcttccacactgtttttctttctttctttctttctttgtctaaactaatctctccacacatagcaaagttagttaaattttgcagtttgttgttacttctttaaatgccaattttcacttttccttttcttctttttcttgaataatgaattggagttaattaaatcgcaaaagggtagttttaatttgtcctttttcattaattaagcttaattatttttttctttttttatagtatctattgataatataataactctgttaaacataatattaaatcatggatgaagctgcttgcttcatgatttggagcttaattaagctctgaaagcctaatgtttggggaactgggactcaattttcaatacattcttaatacttagttaattcattgaatttataactaatcaacttagaacatgggctttaagtattgatcgccataatgtttcctttgacttttgaggaaggagaattttaaatttttgaccatttatgatatttttgattattggagccaaatatattattaagtttaacaatatgtactttttcaatgaccaaataataagttttaacaatgtctttttccaattatacatatacaagtccaacaatatatatcaaagtccaggactatattgtgtagactctgttggctatggccctgaaaacaggcaagtcactccaaacatagtgcatgtgttaactcatcacttaatgagcttaaaactcaattagttagtgaaaactaataatcagttcaatcaacctttttatagttttacaaacccaaatctctgcatgtgtgcaataactttaagaaaatgtcttattgtactgttgaagaaagtaaattagattagattagattatgaaagattgacagattaaatgtttccctttatcacaaaactaaaaatctttgtctatgttctatatttgcagaatcatcatatctgtattattaaacattgatatataatatatgtgtatctatttaaaatgttacatcacatttgatggtgacacaagcacacacacaaaatacattttgaaaaatatattgaaataaatatatatgaatttttgtatggatacagatgaatacaattagtagtagggaagaaaagtacaggttgatgtcaatgattctctggttaataagatgagtttagattcttgtttatatgttattctttctcttgtctatatattagggctggcttaattttagtgacacttacttttcaactaccatatatttgcagggtccttttattttgatcattttgtaattttgtattatatatatatttcctaaatattaaatccttttcccctaattttataatcaaagtcggttttgaatgtccttattataaaaaaaaaaataaaataaaataaaaagtttcaaagttaaattatgttatactaaaaacggttggttatgcatcattgccattgacccccctaaattagagatttttatttaaaaaatatttttcatgttattggtaggatctccctttgacacttcaaatggttgttggagtttaaaaactatttaagaacaatgtggagattaattatgttataaaaataaactctgtttctctttgtaaattaatgaattttgagcttatcaattaattaaataagaaaagaagcttgaaaagtaagtaacaaattcacaaaagggaaacaaaacttacacataataaataatattatttcacaaatacataaaattacaaaaatatgattgtacataattataaatatttttacgattttttatgattttatttacaaaaaataccgtctttgatatattttttatgttattgtcatattattttattgttaattttttgttgttattttttttattatttttatgtaatgtttttgttattttgatgtttttgttatatagtgtattatataataatagaaatctatatatgcaatgcagtagaaatctatatatagacatacagcaaattgtacatcgatttatttagccacagaaaaatattacgaaaatttctatataattttgttaatttgttcatcacataatacttgcctttacttccaacaagttatgtcaataaagcctaaaaggctgatgggattccattcctatcttaccgtatgccaaatgccacctcacacaaaaataaataaattagaagaaaaaaactcccaaaaaaaaaataaaataaaataaaaagatgatagggggaaaaagaggaaagaaagatgtgatagtctattaactgtgacaatgtttgtcaaacagctaaggtgaacattatgaaaacgacaaggccaaactagttaaactcctatatatatggatatcaatttcactaccccaaaaaccataaatagtaaaatacaaaagcaaaacaacaatgttggtttagtcgtataaagttttgatcaaccctacaaaaaataatacaatcacattacttttggtcagtttattctacaacattataattaagtattacaaaacatgcacaaaagacacaattaaatttaactcccaataattaaattaatattaattaataattgtatgttaactacaaaattgttaattatttgatcaaataaacaaaaacaagaattgaagtcagacctcttatgaccccatttcgcagctggaattattatatatgtgatgagcaaagcaaattaaggacccacttctttgattaccgtctttgtcctttaactataagatttttttctctaaagtgtatatgcatcattattgttgcatacctctatgcgtgttgtgagtgtgtgtgtatatataagaatatataaatataatttacgtggttgaaaattgatagtcctttaaagatggcactaataagattgatttgatttagaattaacatcaatggaccaataattagtgaccgtctggcacaagtgtttcgccaaggacatttaagcattatgggtctctctccatctttttctaaatagtaatatttctctccaataaattttcccactttcgctatttccttttgcattttcgatcaatatatatataattggcttttcacgctcaaataatccaaaatcatatatcatgatcaaaacattatatagctataaaaaggattctattgtgtccctattagcatataaattataattttaaaatttaatgaatgaataagaagaaactaataataaaagaaaaaaaaaagtgtttaaagagtcacttttggacttacaattgaaatttagcacatattcatgaaatcattttttttttttttgaaaggggtctccatgaaatcattatcatttaccaatttaattatatattaaaaaaacgagaaggggtgaggaaggagagaattttataattatttatttttgtttttgttaggattagttatatattatggaatgtattaatgaaatgcattgttattgtgtgtacccaacatcttttattggtagtactttacaattagttaacgacaatgttttttagaagtcattttcttaagtttatatgagatttaatatttaattaaatagtatgatactaaggaggatgttaggtactaataatgtcttttagtatttttcaattataaaaaaaaataaaatggggtttaatgaatttcttacttttacccccatttctcagataaatattgatgagttcaataatatatgttgataattaatattttccttaattttactatacatatacgtaaatacacatgttatttcaatcattgagtaataatgaaaagtacaataaatgatataaaactactttgacaaagaggttaatgaattgttacataacttataaaaataaatgaattaatattctgggtaacagcagcaattaagttcccattcatggaaagtgcttagaaaaatgaggtttcacactgcattataacatttaaataaggggaaatcattttcttggctttatttttttttcttgggatgtattaataacaataataaagaaattagttatttaattatttttttaattttattggaaggaaatatatatagtaattaaataaataatttttggtgagttgtaataatcagtcacacgtgccctttttaattaggaagttgacccttattattgaaggaattaattgggaatcacgtaattaataagcgtttggcagcatttgtatacctgtgttttccacgttccttctatattagattctcattttctttcatttcccaaatcatatcactccactatataatatatcatatgattcatatctatatttccaattatatccaagttcttcattctcttttctttttcttttaattatagataaatcgaaggtattaataaagttttgatattgaatgtgtataattgttggattctaagcaaacaaaaatagaaataaaactatttttagttagggaccattgtttctcctaagcatatattctcttttgtaatttgacattgacttctaataatattataaattacatgtaaaataataaaattaagcaaagtaaaaaaaaaaaaaacgaa

SEQ ID NO: 295503 - DNA, 3031 bp, Cannabis indica
ataaacgacttaaaaaaaaaaaaaaaaaacctcattgtggtagagttgaaaatgcatgggacgaaaaagaggataaaacaaattaattactaattataaatgttgtaaagtactgtttgaagcttcttcagatgttcgtattggaatagaatgtttctgataagttaattaattgaaataaagaaagtcaaaggtaagagcttggaattcatttatttatttagaagaaagaaaggaaaaaacagaggtaaaagctaggaaatttagaaaaatcaaacaatatatatgttgttggtttttttgaaagttatataattaatgaaatgtagaaaaagccatacttgtctttgagcaagttgaagaagaccaatttaaattagtatatataaccttactattacccactttcgttgattatatattggtttaatttggactaaattataaaattaccgtgtaagttcctccagtccacacacaccaaaaataaataaaaataaaaaaatatatatatatataaatattatatatggtatggtatctgccctagccaaagtcgttttcactttagaaatatgggatttggacttattgcagaagccacaaatgcctgcaagctatatatatatgtataattactttaaccaatgctttcttttaacataacagttgcaacagtagtcactactcagtttttattcatgttcaaatctcaatacaataaacaaacatcaaaatccattaaaactaaataaaataaaataaacaaacatcaaaattatttgcttatttgatggatttaatttagttttattaattaaaaatatatggtatgtgtgttacacaatgattatacaacttaaatttgatagtatataaaaatatccatgattaattaagctagagtatataaccggacagtaatttaccagtgatactatatcttcaacataatttataatggtagatccacatagagccaaaagagggagcagttgcctcttttgaaaaaaaaaaaatcaacaaaaaaaaaaatacatatgtattttagttagttagaacatatatttataattaaatatattttataataattatttacttaggtttttggaaactaaatatttagaagctaaagaaataataactttgcaaaaatggagagatgatgattttttacgtgattcgggtgttaataaaccttagtccacgagtcagtctgttagcctctaaagacttgatgtgtttacaatatttttataagaaaccctagttatgtactctaagtttctattggagaaaaagaagaagatctagagcaatattaatagagttttacctaggtaaattctgatatgccccttagtatgagaatggagggatatttataggctaattggcgggtatggacagacccatgacccgcctaggatttctgctaaaattccactgttggggtgaattacacacaaaataaatctgagtgttgaatccttaagcaaaatcacgctcgtgtacctggcagctaggtaatttgagataatacatacagcatggacacgtgtccttcaaaggtttaacctttaaaagggatggtccgtaataactgcctggtgaaaaggtagtggaggtgtgcaccatctatgctgggatgtaggagacaggattttatcttctcagaaaaagtgtaactgtcacttggtgattcagcgtgtacacaaaaggtcgacgtttgcaataccacctgatgatcgacgtccgcgatacttcctaatggccgacatccgctttaggtccttcgaatgcctgttaggatatacactaagcgagcttccctgtagacccttccgggttcgggagaggtatttcgctttccacatctcaaaagtcgaggcaaacatgaataggccttcatataatattctttcctgtatactcctcagttctaggatggctttctgtgatagagtagtatcaaaggactttaattgaggaaggattaaattggtttccctcattaaatgtcacatgtcatgcttcacacagaaaatatttaccccctaaacttctgggatgctctgcggtctgggagcttgcaatactcccccgcttctttgtgtgacaaaacccctgacacgtggtgttggctaggatcgtagatgtatcccacgagtcggcatcaattaatgggtcattaactacagttattattggcatggcacataggcagcactttaatgcaattgttagcagtacgcgcgcgtgggggcgtatttcttgggaggattttcatgacgacatgttgatttagatgaaccttcctttaataagcacatcacacgagacatgtaatgatgaatgttaaacattggagctgatcattgaatgcaatcttttcaactccccgcccgtcagatcaaaaatgctttttggcaaaagggatctgggcaatttatttcaaattgcaaagattttaagtggcgtataaataagtctcaagagcctttttctctttctttatcaccttcaaccctcagaaatccctctgcatttttcgaaccagagctcataaatcctaatttgctccacccttgacagacaagaaatttgacatttgggccgactacaactgatgcgatcgactaggtactacactcccaaactgattcattgggatgagactggagaaaggaaatgtatgggtcctgagttagttcagcgaactggtgaggcaatggagaaaatcaaggctcgaatgcttgtttcgtaaaacaagtagactagtaatgctggcagaaacatagagtttcaagtaagagaatatatttttctacgagtctcactagtgaagagtattaagcgcttcgaaaagatgagcaaactaaaccctaagtttatagggccatttgagatgctagtgtaagtggcggacctaatgaaagacaaagtgagactcttgcctatcctcatttatcttttttcttaatgtatacaaaaaaattaaaataaaaattaattatgtagaataaaa

SEQ ID NO: 295504 - DNA, 2328 bp, Cannabis indica
ttttattagcatgaattgcataatcacgacgacttattagttactaatttttgccttatttaataattggatggaagacaaaaataattatttcgatcttcactcaatgtcctatttagatggaaaatttcttatctcactacgaatagattttctttcgttggatcattcttgtgcgaaaaatgtacattcctacgccaatctttttcgggaaaaacaagtcggtgtgtttgtacttatttagatttggattttgtatgaatagcatgatggttgattggtatgtcatctcaatgcaatgtagcacacagttgtaaatagttttgcatattttttttgttggattcctatctctattttctatcactctactcaaaatgtttatttggttttttgttgcattgtgtattttgttttcttttgaatcaaatttcactctccctaaagttttgtttttgaaaatttatttcctttgtttaacaataatatttttttttaaatggaaaaattgttatttatgatttttttgggagtaaatatcaattataaaaattgcttttcaaggtaaaaaaactatcccgagctcatgtgtcgagtttttattggttaacaaaagctgacaagaattaataatatactttgttgttgttatattttatttaaaaagaagctcatatgatgatcacatgtacaattgtttactctaccaaataaacttgtaaaaacataaattttcaagattgaataaaattttgcttcacaattgttacaaattgttaatatatttcttgtgatttattcccttgttggccagttgtgggcatgggcgaggaggaattcaaacccccgacatcgtagtttgtagttatgtactctaattctttgagctacaagccttatcctgtctccagactcttcactggatctgttctcgagagtaccaaaaaagaaaacaaaattttttctctccccaaccattttggtttaagatgtgaaaacacttctctctattacttttacagtaaataaaataaaataaaacaaaataaaaataatgtaacatttcataaaggaaaccatgtccttcttgattaaaatcattaatgcaaatcctgtattaattaagatacaaatgttcaagatctaagtttaacatcctaatcatgtgtatttgtattttccttattattctatgtcataatcatgtgtgttatttgtgtatagttgaagctaaatgcaacaaattaagaacaagagattctagacagctaataagatctaaagttactaataaaacaaacatattatatgagatagaaaagtgttccaataatacttgtgtccctctctttaaatgctccaaatgagctgcctagaatacaaagaacaattaacaactaataaaagctattaaaagagaaaaaaaattaaagtttctcgttcttaaatttttattattagaatttggaggttttcttttttctcttcaggcccgctaacattccttgagtttaggtgcggctttattgggattatgttttgctactacaatttaatttttgctattgtaattagtcttgttattttgatatgattttagtattctagtcttatctctatgacataatttggagtgtttaatcttgtctttgtggcatgatttcattttgttttgtttgttgatcttctttgtttttcgatgactcgtcataaaaccattgttaatggttggtaataacaagttcgttgcgactgaaggggttgtcagtagtgcagttacgtaccttacacaatagttgaatgcgaggttgaatgaacatgctgtaacagtttctactattgtatcttctgaacggtagatgtaataaaatataggtattgttaagattaattatgacgttgtaatcttttccatctgattttattttagttgagtaatttttttaattttaatccttgtcgtgtttccaactaaagaaatgttctaattaaattgtagattattattttagttgattgtcattattaaaattacataatttataaaattgtaattaaaataaaagtaccacaaaacaaaaaagcttatttattatgttattctctaacaaagtaaagtagcaaataaattatttaaattattacaaaatttctaaaaactcatttcaatgagaataactcaatcacatatatttgactttaagtgtattttaattaatttattttcacgattgtagttatttaaaattacttgtaaatttttttaaaaaaacttagaataatttataaattacttgtaaattttttaaaaaaactgaataatttata

SEQ ID NO: 295505 - DNA, 7028 bp, Cannabis indica
agagagagagagagagagagagagagagagacccctttgtattggtcttttgggctattcccagtaaccaatcagtcagtctttgagagagtgtgataatatgaaacggtacagaaatggcgaaatttgggatttcgagcaccacgttcccctcgctttagctgctagagatgtcattctgggcttggacggtggcactacttctactgtctgcatttgcatgccggtcatccccttctctgacccactccccgaccgcccgcacgtgctcgcacgcgccgtcgccggctgctccaaccacaacagcgttggtggtaatttcgcttaatctttctatattcttttctcttgaataatcaaaattgtttttttaggtacttgaactgaatgaaatatgtttgattagagcctgtataggaaatggtatttttgtgtcttgtctgtcaagtgatctggtttcatttcgtttgaggaggtacccctctcatggtggtggtcaaaattaaaaaactttgaccaaaagagtattgggaacaaatttaagtctgtcatcacgaatgtttagcttgtgggatattaactttttggttggaaacattattgttaacatcaagttctgttctttctttgtgtttgtagaagctgctgctagggagacgttggagcaagttatggcggaggcacttctgaagtcgggttcaaaccggtctgcagttcgagctgtttgtcttgctgtgtctggtgttaaccatccaactgatcaggaaagaatattagactggcttaggtaccataactttttagagttgaagccaaaatcatatattgatagctatcatctggtgaaaatagcattcgattgcatttagttgctcaacagttattaggaaaagaaaagaaaatttgtacacttcgagggacagtaaagatttagtagttgtatttgtagcatcccatataagaaaaacaatcaaaaaatctctgaaatggatatgtaagttggggcattataagtaaacagatgggaaggggtagtaaagccctcaatttaaattgcatatcccttaggaaatttcttctgctcattgatgtgacaagcactccaaacctggatgttttagtgtcatggacagcatagttaatgaaatctaggtggcttggctttagttgactaggctttggtggtgtactttttaagtttaattactgcattatttctggctgcagtgcataacttgtagtaattttgattatctagccaatatatggaaacaagatgaaaatatgcatttcacattttagcggtaagttagtgtgtaatgtttcttttaactcattttgttcttgatataaacagggatatctttcccacccatgtcgggctatatgttcagaatgatgctgtagctgccctggcaagcggaactatgggaaaactccatggatgtgttttaattgccggaacaggaaccattgcttatggattcacagaagatggtagagaagctagggctgcgggtgctgggcctgtattaggtgattggggaaggtatgtgatttattaatttttttttgtttcatttctcacacacacacgtggacatataaaatagtaaaatacatgtgagtactgttgtccattaagagtgaaagttttgcaaaaactgaaagcaatagttcaattttgaaacatggattcattatgtattttatagatgtacatgttttccccgttttgattggatataaatcatacataattgaagaatattaatgagcattgcatggacgaaaaacaaatctgaatctcatttgctgtttaacaatgtaagaagttcttttccacatgtaacaactagcaagtaaaatgaaatcgtttaaagtagagaaaagagctggaacttgctcttgtatgactttcttggttagctatcttcttttttttcaccataagactatagtccaatattcagcatatctgttggtaatttttatttctgcattctttttcatttgtctcattttttcccattgttatttcatttagataatcttgtttacttgcagtggatatggaatagcttcacaggcattaactgcagttatcaaggcccacgatgggcgtggttcacatacaagacttacatctagtattttacaatcgcttgatctttcttctccagatgaactaattgggtatgtatctgaaactcttactatttattgtcacatttgctgtaaaattgctacgcagccaatctgttttgcgctgtttggagaatataaaggacaagatttatatcattatctcgaaatttgtttgttagaaaatccttagacttgttcaagaaacagttgtattgtttttctcatagttattattaatttgaatgattatacagcaccactgtatttgttcttgtagtcattctaccgacgttctcattattggtggtttttgtgtatatgtttaaataatgttgtgctgtatgtgttttctcattcgttcacgagaaatatgttatgttatatagaaagtatcatgcattttgtatatttgttgagtatgcagctgaaacaattttttccttttctattggaatttaggtggacatatgcagatccatcttgggctcgaattgctgcacttgtcccagttgttgtatcttgcgcggaggctggtgatgatgttgcaaatagaattttgtatgattctgtcgaggagttggcatcaagtgtgaaagctgttgttcaaagacttgacttgggtggagaaggtatgacatacaaaactaacatgggtctctgagatagattttttgggttcttattgtgttgttgtagccatgagatcatacacgattaaacaaggcactgatattgttaactccaggtagtctaataagaagagaaatttccacacaactttcaccatgtagttgtacgcttttggaattttagtttggtgtggcacaacttagtttaactttcatctgaagcagctaatactggcgtagatgaattaggaagtaggagatataaacatgcctttcccctaatttctgcagagttctatcttcagtattgtgatttttgtgaaaaatattatcgcagatggaaaacactcctttccactcgtcatggttggtggtgtacttgaagcaaataaaaggtgggatataggaaagaagttgtgaagtacatcaataaggactaccctggtgtcatttcaattaggcctaaggtaagcatatttctcctactttattattattatttcaattataataaagaaaagatgaaagataacaatgaattatttttattgttttcttatttttaaagattatactaagtaattacttatgattacataagaaatcatcattaaatgttcaaccaagagacaaaattagtaatttttttttttttgttttcaaatttcatcttctaatacttccagatgctaacagaactcttctagtgaaatttcattgtcttaaatccttgacactccttacccgcatcaggagactcgtttaaaaaaagaaaagaaatgtctttgtatcaatactaattaaaacataaaggtaagagatcaggtgcagatcacaagaagctaaattgtaagcatagaaacagtacgcggtaaaatgaacataaaagtttcccgctctttactaagatcaagaaaatataaaccctcaaagcctttagtttgaaaaacacaagttgctaaccaaaaattaactttctctcaaaggcccttctgcaaagtccactttatcttcaaaacatttatcgtaaaaagtacagagagccataagctttaaccttatttcagagtgactccctccaacccttcaaaaaattctaatgttctttctttccaagggaccatcataatggcaacatttataattttttacaccctattttgacagtcttttgtggatttgatattagtaatgatttgttattcgaaatccaaagcttttgctttcaattgcaacctgtagtccaattccaaaaatatttgcatgcttgagtttctttagacaacaaaaatttggtttaggtaatatgaagggaatcatctcctttcccagttatttgggttggatgcagtgtaggcaatactgtagacactgattcatgttttgatttaacaaacaataaaagacatagcatagttggtgataccagtgaaattattaatgataagagtgaagtgaataataagcttatgcacctgtgcacattattcgaccgaactgttaatgtgacactacattcaataaatcttccccatgtaaaattgatacaagttttgcatatttgttttcttgaatgaaaattaggtggagcctgcagttggtgctgcatggttagcttggaattttttcatgaaagaatctttgagaggatgcttgaaaagctgaccactgaagatttgtaggttcaattgtatagtgaaaaaacaaacaaccaaggaaaaagtggaagcagcagtcattatgattatttaatccatctagtataggttatattgctctacctggagtgtttggtaggcagattttttgtatgatttttcaaatagtgtgttatcttcacatgtaacagtgtttcttgttcatagtattgtgaactgtataacagtatatttaagataaaggccgtcatttactcatgacagtgttcttcactgatgggcttttggaagatgtcatttcaaaattagtcattattattcgtttaaagtcttggatcacttgaatttcattatatagcttcctacaattaaatagttaaaagtcagttttaaaattttgaggctacagagagatagattttaaggacaattggaaattgttttctcagctcaattgatactgagagagatgatttcattaaatagccaagatcgatacaacaggaggagccaatacaacagtgtcaagcggcattacagaaatcaaggcagcaacagaaattgtacagagaatattcttgatactaatgattgccacatcatgatgatcaagtaattttgtgtagtagaggtgcaggggtgcagtgtaccttaggcctcattcttaacaccacatcttaaacaaaggggtgataccttcactccaagtttgtggacgaggatctgaaatcttgaatgtgttaatccttttgtgcaacttgatctgaagttggcacatactaaacttcaagctccttctttagcactttgtctcgaacaaaatgaatatcactctgaatgtgtttagttcttgcatgataaattggattggaggcaagtgcacttgcattttgattgtcacactaggtgactaatctactagggagtctgaatttgagttctttgagcagtgattcaatccatgagatctgagctagggtaagatactctaacttggtgttggatcttgatacaactaattgtttctttgatgaccaagcaacaagggtatctccaaaataaacacagtatctaataatggaccatctgtcatcaggacaagaagttgaattcgcttctgagtacccaacaagagacaagtgatctctatagctgatttgcaatccatggttgattgttcctttcaaatatcttagcaccctttttactccactccaatgactagtagttggagcctgcaagaattaacttaatttgtttacaacaaatgcaatatcaggtttggtatgacacatatattgcaaagctctgatagcacttcgatagatagttggattagacaattctactccatcagactttgaaagaggcttccgtgagaccatgggagtgggacacatcttgagtatcagcattttgtactcatgtaacaaatttgagatgtatttggtttgagttagacacaacctagtttcatcccgttgtaattctatgccaaggaaaaaaagcagtgctctaagatccttaagagcaaaacttttgttcagtcttgttgtgaattcttccaactatccattatcattgcctgtcatataatattgtccacaaagattaagatcgtgataatagtgtgattagttatgtaaaagaacatggatgagtcttctcttgaatttgtaaaatttcactcaagaagggttttttttcaattgatcaaaccagacccttggggcttgttttaggccatacaaggatttatggagcttgcacacatggtttagtttcttgggatcttcataacctggtggttgaaccgtatagacatcttctttggaagttctatttagaaaagcattattaatgtctagttgcttgatttaccaatttctagacacaacaatagtgaggacgattctaattgttgatgcctttacaacaggactgaatgtttcattgtagtatataccagctctttaatgaaatcctttagctatcaatcttgctttatagcattgtattgtttcatcaacattaatctttatttcgtacacccatttatttctcaccaaattgtattcatcacttcttggcacaagagttcaagttttatttttttgttaaagcattaaaatcaacatccattgttgaagaccattcttttaagctcatggcttcttcaagggtgcttggtttagcaatgttaggcttctattttgcttgttcgaggtaaactttaggcttgaatatgcctttgtcacgtatcactattggatgagattgcactggatgaccaagtgttcaacattatcaatagctgaatcagtatgttcacttacctcttgttgattctgcgtggcagatggtgttccaagggaaggtagagatgaatcattagaattatcatcaacttcaagtgtgacaatcggttgggaaaatttagtgaagtgaaatcacatagttgactttagtgggtttttttgaactattgtcactttcttttgggcataagtatttaaaaacccacatttaaagggaaattcattttcattaaaaatgacatttctagatatatatatatatatatactactact

SEQ ID NO: 295506 - DNA, 4826 bp, Cannabis indica
actaggacactctaatgttgggtctgaacctgaagctaaacctaaatttgacatatctataacataaataaatataatcacaagttagttatagctgagtaactatatacgctacaacattttaactgtattagaggcggactaactcatttttttcatcgctaatggttattagcggcgggcatccaacgctaaaaacaggacgctattaataattattagcgccaaatttctagtccgccgctaataagcggtggactctgtgatcctaccactaatttttttggtcaagttcggcttacaaagctgacaaattattagcagcgggatccgccactaatatatttagtttttaaaaaaacaaaagataaataaattaaatataattaaaaaaaataaataataaactaataaattatataaaaaattgaatataatttaataaattaaaaatattctaatttagtaccaaaataaatacaatatttattactattataatgtctcaaattaaactacatatataaaataaacttaatatttgtaatgtttgaattattaacatacttaaactaattagtctataaaatcatcattaaaaatcttaatttacattaagattgggtgatagacatagcggaaaaggaacatatagttgatctgataataatccaagtgtttgtttccgtgattgagcttcattgagtattgaagtaataaaatattgcgaagaagtactcccaagcccaccaaatgacattatagtctttttcaacaaatcaaatatacaagagaggtttcatatatatagttagaaaatatgttaactatatatcgatgttcatttaattcaattcgcactattttctttatagtatatcgagccgcactaaaaataaattttatattttagatccaatccgcataataatttaaatctaatccacaaaataccgattagaacagttatttttaacataagatacgttatagcatacttaacaccttcgtgtaattattctatttctatatgataaatacatgaagaagggaatattttcaataatagctattaataaacacattatcgaagaagcagtatctacgaaagcaaagtcaactaataatatctaaaattgatcattaattaagattgtgagaggagatcgatctataagctgctataaactgtagtaagttagtaactcaacagttaaatattaattattgaaaatcacacacacacacgaattttattatataaatatatttataacaatttgattgactagtataaataaatatatattaaaaaaaaaagaattgaaagctcaattaataagcgatccgttctcggctgcgatgctttcggtttctttggatctttctttgttgtcaccaccgacaatttccaagctctccacacaattaattacctctttctatactgcctacgtatacacaccaaaaacaacattaataaaataatctacaactacgtaaatattttgcatgcatttatgattagagtcaaatggtgcaacatgggattaattgttttggttacgataatataattaagtacgtatttcttctactgataaattaattagctatagctagaagaagagaagtctcattcattaattatatatgagttaatttgtaagggaattaaatgagtggcatgtatttttagcatgaagtgcgccgcaaatatgagcattggggagttttattttatttttggcatcggttttcaaaaatatgtctgtcacatcccattgtgtcacagccaaggcactgatctttattagttaattctttcatattctaatattctatggggtaatgggtttgtaattttttttttaatttttattatatatataagcataggctttggtgttcgtactcaccactcaaccattgccacttttctcttattcactacttctttactactctacattctcctttcaaggaatttctcgttccttggggagaattctataactcaggtatatcatatatatatatatatgctagctagtaggatttattttgttttttttttttaactttgaataatatctatatgtataagtaatatataagtatattagagcaactcttatgcaaatcacaaattaaatgaataatggtatatattgtttctctttttgcaagccctgcaactataaaatattgttttatttacttattatttttggcttcatataaccaaattgtgtgtacgtaatcagaatatacacacacatatgtaatatagtttggcataatattgagttgaaacaataattttgcttttatgaatttacagatacagtacttggattttattatttccttggagaaatatatataaggaaatgatgaaagagaccactttgttgcatatcttgttggttattacattggcttgtctaagttcaattcatgcagaagacccatacagattttatacatgggaagtcacatacggcaaaatttctcctcttggagttcctcagcaggtatattataatttaaattatatataacaaatatacctatatatataaccaattaattaatgcttggttcacttaattaatttacagggtatcctcattaatgggcaatttccaggcccaactattgattgtgtgaccaatgacaacatcattgtaaatgtcattaacaagctagatgagcctttcctcatcacatggtaataactaattatttatttatttaattttattcaaccaaggacatattttttgaatttatttaattaatatattattatattatattataggaatggaattaaacaaagaaagacttcatggcaagacggagtgcttggaacaaactgtccaattcaaccaaggacaaactggacatataaatttcaaacaaaagatcagattggatcatacttttacttcccttctactaaattgcacagagcttctggtggttttggtggtttcaacattgcacataggtctgtcattgcagtcccatacataatcccaacccaagaatacactgtactcgttggtgattggttcaaagctggccacaaggtatttatttaccattatacatattttgtattattattcttattataatttttatacatgaacaaataattcattcaaaaaaaaaaaaaattaatatataattactgcaggcattagcaaagatattggactcaggcaaatctcttcctcttcctgatggtcttctcatcaatgggcgttctaaaaataaggctgtcttctcaggacaaaaaggtacacactcactcctctcccctctccacgacatcttttttttttttaaaagaaatatatagcatattttttttttctaaaaataaagttaaagaaaattcactgctatatatatgaaaaatagaagaacgaaaatagaaatattatgtacaagtgtaacacaatatattaattctgtgtgtgtatatatatatactcttgtgttgaccaagaacatataaaataaactaattacactttgctatatttatagaaatgattaagtttggtttggttatattgtataggaaaaacgtacaagttgagggtttcaaatgtggggatagcaacatcaataaactttcgaattcagggtcacaaaatggtactagttgaggttgaaggagcacatacactccaagaggtgtacgagtcaatagacattcacccaggccaatcactagctcttttggtcaccttacgcaacaatgttagagactattacattgtggcctctacacgtttcactaagcccattctcactaccacagcaattctcagatacgctggctcatccaccccacctcaaggcccattaccaatcggcccaacttatcatatccattggtccatgaagcaggcccgaaccatcaggctaaacttgactgccaatgctgctaggcccaatccacaaggctcattccattatgggacgattaaggttgccagaacaatcgttttgggtaactcacaagcccaaattggtggtaaacttcgatacgcagtgaatagtgtgtcttatgttgatccaagcactccattgaaaatggctgattggtacaatattcctggggtatttaccttaaactcgattaaaaatactcctactacggctcctcctagacttggcacatctgttattggaactacacttcatgattatgttgaaattgttttccaaaataatgagtctaaggttcaatcttggcatttggacggaaatagcttctatgttgttgggtaagtaatttaatttaactaattaattattgtaataatattcaatatctaattattatgttattatataatcagatatgggcctcggcaatgggaacctaagatgaggagacgttacaatttggttgatgggattccaagacacactgtttcggttaatttttttttttttttgactattgataaaggttattatattatgataataataataataattaggttgatgatttaattaattacaggtatatccaaaatgttggactgttatatatgtgtcgttggacaacaaggggatgtggaatttaaggtcagcaatatgggaaagaagatatttagggcaacaattgtatgtgagagtatggaacgatgagaagagcccttacactgagactgacattccagctaatgctatcaaatgtggcaaggctaaaaatcactagttaattcttattatcattgattattattatgattatttaagttgtagccatcctcttttttatttttattttt

SEQ ID NO: 295507 - DNA, 3012 bp, Cannabis indica
tgattatagtggcattggaaagcttgaatggaaatttaagtgatgttcttttctaatatcatattcctgataccatctttttactgttctcccttcagatcaaaacagtaaaaggatagttttggctcttcagagtggattgaagagtgagctaacatgggcattgaatactctcacattactctctttcaaagaaaaggatgatatgcgcagagattcaactcctcttactaagattcctgggttacttgatgctgtacttcaagttgtatgtcttagactctttgaatttgtcatttgcgtagaattaatttagagagtttccatatttaattttaatgccaggaccttacttgactttgttgtaccatcatgttcatgtcaagctcacattgtgttaaaattcctgcaaaatgattctagattgatgactggcgtgatatagcggttccgaaagatcttgtaaaggcaccgagagtaagaactttaggggcaaatgcttttgtaacaggatttggtaatgaatatgacgcgttgggatcaaatggcaatctgccacatcctgggtgagtctatgatatgctttcttcttgagtgaatatttagatttgaatatagaaagttttgtttatgtataacctgttcatggattattgttcaaatcgtagcttgggatctggttcttctcattcggaagcatcgccaaatgtgtataaacctcgcacttcagagtggtgggctaatgaagatggtttgtttaatctagatgaagaggggagagcagagagacagcaaggtgctgttgccgcttcaaatgtcatccggaacttctctttcatgccagaaaatgaagttattatggctcaacatcggcattgtttggaaacaatgttccagtgcatagaagattatgttacaggtgagaaaatgttgcttggaatgaatatgattttatatcttttttttattgagatataaatgcttatcaaatattgagatagttatgtggttgtattttctaagactgcaactactggacttggctaatggtgtcttgaacaaataccttttatgtgggtaatctttattgtttattctgtgcatgtattggaatgtaaagcgtattagctgattttaaggaattctatactaatatctaaataaaggtgtataactattggagttcaaggtatagctaggaccataaatgtatattaatatggatggtaggttttgacaataatattagctttccttttaagtggaaagtgttgttttgattcgcttaaaaagtttgtttttttttcttttttacttagagtctacacattggaggctcttggcagggttgcctcttggttcttgaattttgataattatatattcctatcagcgtaaaatgaccttagcttacactcttaaatgtatggaatttcttatatttatagaggatgaggaacttgtcacaaatgctcttgaaacaattgtaaatttggctccgctgcttgatcttcgaattttcagctcatcaaagccatcctacattaagataacgtaagaaacctattgcacatattgtgtttgactaagctactcttgtttctattttctggttaataatataatcaattgtcaaacagagaaaaacgtgcagttcaagccatcatggggattctaggatcttcagtcaaagcctggcattgtgccgcagctgagttacttggtcgtttaataataaatcctgacaatgaaccttttcttcttccctttgtttctcaggttaagatttggaaagtctatttttcacacacatataatcaaattcatattatataacagggctacatgaactgtgcagatacacaagcgcttggttgatcttctgagttttccagcattggatgctcaagcagccgctgttggtgcactttataaccttgctgaagtaaatatggattgtcgattaaaacttgctagtgagcgatggttagaatttctccttcatctattcttgaactgaaacaaaaattttgttaccgacctgatcatatacctgtttcatggtacttgatgtcagggccattgaccgattgttaaaagtgatcaagacaccccatccaattcctgaaatttgtagaaaagcgtctatgatattggagagtctcgtgtctgagccacagaacaggccgttgctgctagctttcgagaatgcctttgcagagatattgtttacagatgccagatattctgatacatttgccaggatattatacgaattgactgcgcgaccaaatagagtggcatcagctcgcggtgtatggggcatgtaaccaaaaatcgtgccttgaaggtgactattggattggtagtcaagctaaattaacatttaggtactttttttgtacatacaacagttaaattaagcaccaaatattaaattggggtttataaaaaattttctattcatgtgttgtattatttaaaaatcagatgtactttttaaaattctccgtagttcactgatgtttcctgctgaagatttttatctatattttgttgttgttgataaaatgatttatattttattcccatcttgttgtgtggatgtgcattaattagaatttgtgaaattgtagaccaactgaaacctgattgaaaatgagtttttcacataccagctgctaaggggctgtttggtagggtgtaatgtcttcatgggcatggtaattcatattcccgtatttggtatgggctattatttgtttttaatccatatattaataattttaaactaactttacatacaaatttatcagattcatttgtttaactaacagtaatgtaactaaatattcagcataattatattatccgtattaatattaaattctagcctcctataagtgactcagtgagcaaaagaattggacttttttcaggcttatgaataagtcatatgttattaagtgagcctttgtattctgttgttagttggaaagagtagtttagtct

SEQ ID NO: 295508 - DNA, 754 bp, Cannabis indica
aacttgggttgtctcttatacaaaatgacttaccgaatcatgggttagataagtgtcgcaatagtcacagtaatacctgaaaataaaaaacctcaaataagattattcgatcgaaggatggtgagtagtcttataaacagaatttgcgagtttgagtcttaccgaggcattgtcgtatgttggaagaatggcaagtagaacgaactacggagttgagaagagacccaaaatgagtacccaattcaaaattaaaaaataataatatggtagagagaggagaaacggagacaagagggagaagcttctagttctacttctattctaggtttctggttcaacaaatttaaagacatcatcaacaacaaaacgacatgtcgttttttctttaatttgtatatatttatttattaatgtgatgtatttttgaaaaaatatcaaaataaaacaagaagagatcttcgaccgaacttcaaactcaaagcttttagtgatagattaccttgggtgatagcaacgaagaggatatctaaaatgaatgaagtgaactgagtccgttacttaaagcagtcgcaccggcaatgttgaagttgaagcagccatggttctgagaacagaatgacgaagatggtggaccggtgatctggtgtgagccctaactttttcaccgttctttctgtgttccttcttattttggaataattacataagccaccattttttttgtaaaatatttacatttttacattcaaagaat

SEQ ID NO: 295509 - DNA, 3125 bp, Cannabis indica
tttttttaataaaaggggtaaaaaaaatttttaacggtaaaagaaataaaacctaacaggagaagcataattatgcaactgttatatttttggagaaatttgtaaaagcaatatattttagggggcaagagatcaggtagtgtcaaaaattcaaagggcaaaaatactagttattctataaaatcatgcttaattttgatttacttatcaactcattaatatgtttataacaagcttgacatgtttacaatcttattatgacatatttatgagcaatttaagatttttatgtcctctttaactaaaaaaataatttacatgtaataaatataataaaaatatattattgtcatgcccctggtcctgatggcatgggtcccgatttttaccaacaccattgggatgttgttggccctattattgtgcagcttgttacaaagttctttgaaattgaagaattacctcctgatattaatgacacatatcttgtgttgattctgaagaaaaaaactttgcaactatatgtgatttgcgtcctatagccttatgcaatatatcctataagattgtggtaaaagttcttgcgaatagggtgagaagcatgattgatcatattatctctccaactcaaagtgccttcattcctggtaggctcatctctgataacattatggttgcttttgaaatcatgcactatctcaagcggaaaagaagaggtaaaaaaggatttatggccttgaagcttgatatgagtaaggcttttgtcagagttgaatgggagtatctaaaagttgttatgtgtcgtataggttttgctagtaaatggatcaatcttattttgaagtgtgtcacctcggttagatattctgttattcatagtggtcatattatgggtcctattactccatcttgaggtattcgtcagggtgatctgttgtcaacatatctatttatcatctgtgcagaagggttttcagttttaatcaagaaatatgaagcatacagaatcattgaaggatgtcgtgtggctaacggggcaccatctattactcgtgctttttttcgatgacagctatctattttgtcaagaaactgcaagtgctgctgatagtatgaacatacatcttcactcttccgagcttgcttctggacagagagttaatgctaccaagtcttctgtgtttttcagtcctaataccgacaatgtggtcaaagatcaaatttgctcaatccttgagatgcctgaagctactgatggctcattctatctggggctgccaaatataattggtaggaaaaagcctgttatccttggcttcctcaagaacaagatcatcaatcagataaatagctaggatggtaattttttctctcgtgctagtaaagaaattctgttaaaaactgtcattcaatctctcccaacttatgatatgagtgtgttcttgatacccttgggaattttccatgatattgagaagcttatggcaaacttttggtggaaaacaaaaagtgctgaaggcaaaggaattatatggatgtcttgggatcggttggctgtacataaagacttggggggcatgggtttctgtcatctccatgaattaaatcttgcgatgctagctaagcaagggtggcggctgctatgctcaggttcttctcttgttagccaggtctataaagctaagtactaccctcgttcagattttcttaatgttgaacttggaagtaatcctagctttgtttggcgtagcatttggagtgcccaacacctggttcgtcttggtgccaagggaactattggcacaggtacttctacgagtattcttactcatccttggcttcctgatgctctcaatccttatgtgtccaccactggctcgggccttatcaatcatatggtcagctcactcttccatgtccatgatagaagctgggatgattctcttattagagacatgtttaatacaagggatgtgtcgttaacactgggaattcctcttagtcttagggctaccaatgaccattgggcttggattggtgaaaaaacaggccattactctgttaaatcggcctacaacctgctgcaacttcagaaaaacaatcggcctggggaaaacaattctggattctggcgtaagctttggcatctcaaaataccacctaaagtgaagaattttatgtagcgtccagtgtctaatgtgcttccaacttgccttcagcttgtttctaaatgtgtaagtatctctcccatgtgccctgtttgccactagattgttgaaactgttactcacatactacttagctgtccattagcaattagttgttagcaaaaagctgaattgtttccctatgccaattctgctggaactattggacaatggcttcaccatgtgttcactagttttgatgatgatatctcttgtcgtgccgtgatgttgtgctgggcactgtggaaagcaagaaatacattagtttggaacaaaaaagcttcttctccttctcaggttctctgttcagcttggactactcttgatcactggtgtaaagctcaagataaaatgtgtttgttatcttcttctctgttgggagatagtaacagccttgagcaatggatgaaacttgctactaatacgatcaagatcaacgttgatggtgccacctttgagaaagacaatgcatacgggtttggtgttgttgcttgtgactcggatggcaaggttattgactttgttgccaagtattctcatgggtcctactttgctgaggttgttgaggctttaggggttaagaaggcacttagttggctaaaaggtaaaagttggaatatggtagaggtggaaactgatagcttactcactgttcaggcaatctttagcaatcaacaagtatcttctgtctttggtttgattactaatgattgtaaaattctcttatcctttctacctaatactagtctccgttttattagacgatcagcaaacaaagttgcccactttgtggttaggcgctcttatttttattctgatcgtagcattcaagatgttgatgttctggttgattttcaaaccaatttgtaatttgaatgctttatttcaatgaagttgatatttcatgttttaaaaaaa

SEQ ID NO: 295510 - DNA, 4372 bp, Cannabis indica
caagattgacttttttaacgatggtagacgacaaccatggcagttatcatagttgggaccctccgcggtggaatggagcagtggattttgggttgactaggcagcctgagagcgatcttggtttaattcaagatacaaaccctagaagcgttttccagcctaaatgtgggatcagttgtgaccgatctgcggagacgtttatttcggcaatccgaaaattcacaatccactgaaaatggttatggtcttggttatggcatcgagggtgatcctgtcaatccatttctaaggaatggtatgactactactgccagtactagagcaattttgagtacgggttcggttttcagtactaccagggaaaactatcctacttctgatataaattctagtccgtcgactcacttaggaatgattgcctcttctaattcgaatgattcgctttctgatcgattcgtttggtttagagaatggaacggtcggcggtctgccaatcacaatgtcatatttcgaacttttttaatgttctgggaagtagtcctctttgttggagggatgaagatgcagtggaatttctgcggggcagggttgcgtttttgtgtaaggatcaatctgggtctaagataatacaagtgatgttgcagaagaggagaaaatctttcgatgttattcttgctgaggttttagaagatatgtccgacttggtgattgacccatctgggaattatgttgttcagagtctggtgactctttgtaccgatgaacagaggaccatgattctttatgcgatgaccaggctcaaatttcaattttttggaatttgtataaacatgcatgggtatagtacttttttaattctttattgtttcttgttctaattctgtcttgaaagacattggcttatatgtacaatttttcttttttattagaattttacttctagttaaggtaatgcataataactaataagcttcttttttgttttttccttgtggcaggactcgcgtggtacagaaattgttagatcatctatcctttaaatttcagaggttgatttttttgaaggctatacacccttttgtggttcctttgactaagtgtgctaatggctatcatgttattcagcagtgcattagacattttgattctgaagaaaaggaggtaatgtctttttattgtttagtgctctagtaaagtaatggaactgattttcactaaagaaaaggagataattcgtatgtgttttttacatggcacttcttgagtcaggacatctacttgatgttattgtttgcctttatcgactatacctttttctttagtcactgaataactattaacagtaaaaaaaatttaaggggtcagcttgacctgtacatttttaatttaatcatgtctcttcataaatagcttcaataatatttgaatggagctatattatggttgtaactaaaacttcatattagtcaccggtgacattgtgcccaaaaattctgttgttataattgacaatgcctaagagtctcctattcataaacttatcaggctatctcctttactaacgagtaattcaattttgttttcagtatctcgttgagttttccaggggttaggggaataggtaaaccagatgagacaggattataactatttttccaactgtcttttttatatgtagctgagataaacgatctcttgttcttgattaaccgatgcccttaaatttactctttctttacttgtaattgtaaacatgcttttataaaattgatttgtatcgtttcccttggaggatgtgacgtacttataatcttaatcgcctctagtacacacatagattcttgcgaagaaaaaattaaaaaaactaagaatccaatagacatgttcttaaggttctgtttcctgaacagtttttttactcgagtttccgtcctcagagagccatgcccttgtgttttatgtgctcaagtgttttctccaactccaatgtgtggtaatttctttttcagttgttttgttccttggtatatttcgtaagattaaatggcactggatggtcggtcatgactttttatttttttcttttttgtgtgtttatgtagcattgatatactaacactatgtttgatgagggggaaaagttgaggcatggacaagagaggagggaaacgagtgagagaggtcaaatcctcttgtttggccagaagaatcataggaaagaaaggaaaattgggaggataacaaatccactcaaatgaaccatttaaaatcctttaatagaaggattgatgctttccattctaatttattcaaaattacaaaattgtcctctaaagaaaaaaataattatgaaaatattttagtagtttcttgaataaatagtgacttattattccacttctctctcttactactctcctctccctttcatcctctctattctccttccaccctaccaaacattttgtgagagaaagtaaaatcacgtagtgttttgttatatctagagcaagaaattacttagtctcgttagctttttaattttagaatacaattcttacttgtctactactaccactacatgtagtggttgcaatatgaagttgtagggtactagcacgtccctaatcctaattataaaaggttttgtcatatatatgcgcaggaaacctataaatgattctttcaatctatttcttgcatcatcatctggaaggtgaaagatctaccttctgtattttctggctaaacctgataagttaatatttcacatgcagtgtcttctgactcaagtgcttgattactgtgtggaaattgccatggacaaatttgggtgctgtgtgctgcaattttgtgttgaacacgcagagggggaaatcattttgcggttgatggctgagatagtattgaaagcgttactccttgcagcacatcgttacgggtttgtacctctataatcacttcatgcttttacttccctcaatcaacagtgtacagtttgcactgacataattttctttttgtacggggcctcatttatatcagaaactatgtagttcaacatctactcggtcggaaaataccagtaattactgaacatatcattcgtcagcttgaaggaagctatgtgtccctctcactcagtaaatatggcagtaatgttgtggagaggtgcttgaaggagtgtgatgaaaagcaagctatgaatgtgattatggagatgctccaaaatcaaaatgtttctatgctttttctcgatccatatggaaactatgtgatccaatcagcattgttggcttctaaggttggtggataaataatactcttgtgtattccttgtttgagattttctgatagaatactgtctttggttggttattattaattagctattattggttgtgcgagcagggtcaggtccggaaggctctaataaatataatcgacatgcatgcgtataagatgcggtgccaccaatacggcaagaaaatactggacttgatttggaagaggaagctgcgtaatcataatacaaaatctatggctatatagtaatgctaatatatagaattttagcaactgtagatgttgtcgttttgttgtcccatgctatccttttgtgtcctgtccaacccatgttgtattcgtagcttttcctcaaggcaataccacatgtcttgttgcaaagactgctattagctacttctgttgtgtagtttactttttctagtgttaaaaagaatattaggccctctttgacattcataaataaaaatatagaaatagtaaaaaaaagtgtttgctttagtattttattttatttcttactattgttgttgtttttttattatttttataatgaaaataataataataataataataatattgttgttgttgttgttttatgataaattgtccaagtcaaattttgttacataaaaaccgaaaaagcacgaaagactcaaactaaaggaaatataaaaaatattgactatagagttagttgggttttttgacacaggagcccaacacgattttggaaggtacgatatggtacgatgcggacacgatacaaaaaatatgatgtaaattgacatgacatgacatagtacaataaatctgaaagcacgatcatattagctggagagcacagcgcgtaagtatgaatatgtaaaatctaaaagcactatacgcaaaagtccaaaagcacaacatgcaaaaagcccaaattaaacccataaaaataaaataaaaatttcagtcaatttttttcggagtaattatataaaacacaatttttttttgaaaaaaaaattatatttttcacgtttaaagatttttttttgtatttttacggttttctatagaa

SEQ ID NO: 295511 - DNA, 2568 bp, Cannabis indica
gataggggaaatgttgaagaagaaccaacatccacgtcagcatcgacgtcatcaccaatagatgaaaacgtgctgactttcgacaaaattggatacgaatgcacgtaatcctcaaggccaccgctctttccaacttccccattcggcggcggaaccacgtccgggagcggcgcctccctttctaagtacctaacaatctgtttcatagtgggccgggcctcaggcttgtcatttgagcagataaggcccaacttgatagagacaacaacctcagtctcatcaaactcgcccactaatctaggatcaactacacccaaaacggctccaactctccactgctcccacacccagtccacgagaatcagttcctccggtagggctttgggctcaatgggccttctcccgcaaatcacctccaataaaagcccaccaaaagcgaacacgtcggagctagtcgtgggcttccctgttcgtgtcagctccggcgccaagtaacccaatgttcccaccaccttggttgtggtcggattggaatcgtgctcgtacagctttgctaggccaaagtcaccaagccgtgcatttaactctgaatctaacaaaacatttccagctttaatgtctctgtgaatcacagtctgttcccactcttgatggagatataataagcctgaagcaactcctttaataatcttaaacctttgttcccagctcaatatcaacttgggttcattgaaaaggtacttgtctagactcccattaggcataaaatcatagaccagtaatagatctcctctacgccgacaccatcccaggagttggacaaggttcctatgtcgaagacgaccgatagtagaaatctcggatacgaactctcgaataccctgtttagattcgtgggatattctcttaacagcaacttgaatttttgtgtttggtagagttcctttgtagactcgaccaaatcccccgaacccaatgacttctttgtctctgaaacctctcgtagctttcttcagctcgtgatatgagaatctgtgtggaccgatgtctagctcccaatcttcgatgacatctctgttcttgatttttcgaactatgtaaaaggtagccccagaaaccaagaccgttaaaaccagagccgccattaaaacacttagtatgagtgttgtgtggctctttttgggaccagggagagatggtaatgtgtttaaagccaaagattttgcttccccattcattttaaagctccacccgaagatgtagtgagagctcgcaagaagcccagttgaggaagagaaccccacaaacatggagtcctcaaaatatggagaaagatccacatcaaaggtgagaattgaagaactgggctttgtagaaaaaggtgaaagctttacatttaattgggttttagcatgatcatagtcgatccaagcttggatgaccttaccacttttgagactaagattctgtttgttatttttctcatcgaaaaaggaccccggagcagatttgtttgagaccaagctattaatgtctatccctacatgattgtcgtttatgtcaccaaacccaaagtcttgtacagtatcgaattcaacggcgaatatatggtttgtgaaatttcctatgtcggtggagttaagcaagccaaggtactgacttggaagagcctgactgaagtcgatgctaggtgagatcgtgaaagcgaagccatgaccgccgagcttagggtactcaggaactatagcaaaagcaaaagcggttgagaatgagaaagctttaccagtggtcgagttcttaaacttcaaaggacgtgagtaaaatgcgtggccaattactcgaagggtgtcagttgtgagcttcagtatgccattgctctgtatctttgatgccccatctatgctcaagttgttagccccatggttgaatctggtaaagtagagctcatcaaactgagactttactgggttttgaagaaaaaggaaaacccagatggtaaagaagatttttttctccatggatatgaagaatgaagtttgagaattggaagttaataaaaaactgtgcctaatctaatgtacggaaaagataatagttgatgcgagaaggtttataaaatattgctttcttatttaatttggtcggttacaaaaacacactagaataaacaagaaaaacacatactttggggatttagaaaatgtggaatgttttttaaggtttcatatgtgcgcgagatcatgtatgctagttgaccaattataaggccaatacatatcccttcacttcaacttcaaccagtcaactttgaaaccgaacatcatattcatggtacttttgcaatttctaacattaaaaattggtaaggcgttgtttttctttaaatcactcttgtttattcaattatctttgaaagtctaagctttaattaattcaagtattttttttattcttttttaaatgaattaattcaaccatttacaatatcaattctatataaagcatgcatatataactgaaatttttggtttatgagaaattaatgggtgactttttatttttatttaa

SEQ ID NO: 295512 - DNA, 2960 bp, Cannabis indica
aggttacacatttatttaccatacacttaatatatattattcacataatattatatattaccacattttaatctacatattattatattaaaaataatataacagaattaacactataagagaactaatattcgatcctcttgaaaagcttggattctattattttataatatgttcccagccactcatgttattaagctcccaaaatagaagttgtaagactcatcttctctgagaaactttaacgagtgaatcaaagaagtcaatgaacagaaatagaagttcatgtatacttaggattcatactaatctacgaaggatcatcgttgtgatatgaattactatttcatggttaacaccatgttaatgaaagatgttattacatatcgatccagtcatgtataatcaaattatatacaacacattgactacatatctatccacatatgggtgccgagtcaaaattacacatactagagtatagtgtaaagtaaatcgtacatagtagttctatattaaaaatccctttactttaatacactaccgactatttttactcatattgtataatcttaattctcttgtacatttatgaataaaaaaatttcacatctttatcaattatacttctaaaattaatgtatctgtttatcttataattgtatttcatatattctataatgtagcatctattaattacttgcttttagggcataaatcccaacatataggcctaataatattggatgtggtctaatgaacacccaacaccaatgtcaacctgggcgatggagccctattttagcccttgaaatgatcttgtttgcttcccaagatcacttgtatctccgttatttttgaaaataaaaaagatgcacaaaacacttttttatagaaaatatttagaattggcccatgttgacaaaatgtcaaacttggcactgggactaggccacaggtcaacctggtcgctaggtcctagttttgctcaccaggtgatcttatttgaacacaaaaaatactcatattttaattgatgacgtacgaaaacagagaatatgcccgaaagacttctcaaaagaaatgttttgtaatggtccaacaagttgacaatacttaaacctaggcactggggcctggcactaggtcaacctgggcgttgggtcccagttttgactcctagatggctccgtttgttccccaaaagaacatatatgttgattgttgataaaaacagataatatgcctggaagactttgtctaaactattattggaatggcccagggatacaacattttaacttgggcgttgggatttagcactaggccaacttgagcgctgggacccaattttggcctccaggtcgattcgttacctaaagcacttgttttctcattttggatgatgaagaagaaaatgctcaagatacttcttcagtattttagttggaagcgccctaggttgacaacatgtcaatccgggcactgggtgcatcaccaggaggcctgggcacccagtgcctgggtgctccaaatgagaagtgttcagattctgattacgatgcctctaatatgtttgtgacaggaggtctaaatgagaagggtacaaaggttgtgtcattttccctaagacagacccgaaaattggaacctgagttaggaatgtaaacttgggcacaagttgaaaaccctaagcgctcgggttgacttccgggatgacgtttcgtcttttttttttcagtttctaggcctcaaagttggattattcatctttttcgttcagaatactaaacgatggtgagttggaaacaacttggctggatccaaacacccattcaggagtttcgagagtcaacctgggcagagagctaagacccctcccaaatcgactgctatatgactcagaactactaaacttcgtaaatattttacttcttatcacgtgtcaaacattaatgtctacgttaccagggtcagtttttaggtaaataagcactaattcttgaacatatttaggaatacgactccccttttcaagctaatttaaccctagtcttaagaagggcaaccaaaccaatttttctagctaaaataaaattcatacttcaatttgtttgttattttggttcaaccctcttacattcaaaagcaacacttaattatccattcactaaaggaggagctcccctcctatagtgacaccaaccaacaattcatctcctttctcattcgcgctcctaaaatcccaaaagaattgctaattttttcaagtggagcctcatgttgaacaacatgacaaacactttgcttacccctacctaacactaattgaaagtccctcatcatcaatgacccttcccttcatctttttcttatggttattcctttttagaacacaaactatttttcctttgtttcttgcaagcagcggcttcattagagatggaaatgagacgggtaagtgcagtgaatgcatcatccaccactttccccgctacccatttatgccccccatatctgccccatccccgtttaaaacccaataaattcgaataggaccagttatgaggaatttgttgggtgcccacaaggcaagatgaaaaaaaaaagtaataaataaaaataaatgtcaaaataaattttttaattttaaatcaaacaaatattaattatacttcataatctatattcataatctatataagataaaacatatacctcaactttcaaaataataaaagatattattattaaaaaagtattttataacgtaataaaaaaaatgaatagtcaataaaattaacatacaacaatcaatattttattattatatataggatttatttttcagttttaactaaaaaagtaacaatacgacaaaaatactttcagctagctaaataaataaatatacagcccaaataaaaaaaattacataaataccacttacacacaccttc

SEQ ID NO: 295513 - DNA, 3439 bp, Cannabis indica
gaccgaagcaaacaaataacagaaaaaaaaaaaataaaaaaaaaaaaaaaaaaaaaacaaaaaacttacacttgcattaaaacaggtcactgctaaagactaaagtgctctgttacatgtacatatagttttgtttgttttgctgccaagtagagaagtaataagtttttagcagaaaaaagtagatatttgaaatgatcctttaacccaaaaagtaaattagtagcagctcaattataaagtaggagagtaaagcacacatgggatattgggaatatagagagacatagagacacagatataatattatatactagctgtaccttaattgaaacacttttctttctgtggggccttaataattctaattggccagttctctgaaacccctaactatttaacaccctctttctacaccaattagcacacacaccatattccctcaagtcaagcaattcttctatctcactctgagtagttagtactactcactcttattggctattatggcttccttagttgtagtcatggtgttattgggagccttcattggtcatcatcaggccacagaggcagctcgagcattttttgtgttcggtgactctcttgttgacaatggcaacaacaattatctggccactacagccagagctgatgctcctccttatggtgtggactaccctactcatcgccccactggccgtttctctaatggcttcaacattcctgactttatcagttctgttttaactgtcattctcaatcccatttttaatggttatacatacatgtatatttactaataaaatattatgtatacttttttcaggcctgaaaattggttcagaaccaacattgccttacttgagtccagagctcactggtgaaaagctacttgttggtgcaaacttcgcctcagctggtattggagtcttaaacgacactggcgttcagtttgtaagtctctattacatttttatttttgaccattaaaataagtacaatgtgacacctcatataagacctagtaatatatatggattgatgaaaagggtactcaagaaagagtgctgataaattgaattataattttatatatgcagataaacataatcagaatgtacagacaattccagtacttccagcaataccagcaaagagttgctgcccttataggagaagaacaggctaagcaactggttaaccaagcacttgttctaatcacagttggtggcaatgattttgtcaacaactattacttagtccctttttctgctagatctcgccaatatgctctacctgattatgtcacatatgtcatctctgagtacagaaaacttcttttggtatacatatattattctcaatttccttctttttttgtcatgtctttatttaattagttgttttttttttccaattattttatttctgttttggtacacagcaactgtatgatcttggagccaggagggttttggtgactgggactggaccactaggctgtgttccagcagaattagccctgagaagtagtaacggtcaatgctcggctgagcttcaaagagcagctgggttgttcaatccccaactcattgagatgattaagggactcaacagtgagcttggtgctgatatctttattgctgtcaacacacaacaaactcattataatttcatcactaaccctcaagcatttggtacgtatctgtcgtcttcctttattatgataatttattatatcactatatatatacatatattaaatgctatatatagctttctctgtataactcaagtatatataagtaaaggttttcagcataactgtctcttgattaactaagtttggcaattgatcagcacttgtgtttttttttcttcgtgcaattagtcaagtgttttggaaaagagttttaataaatagtagctttttttagatattttagttaatttttaataatatccaaaaaattgtatatggatatttttaaaattttctatttattatttatacatttttacacatcttattttatttattaaataatataaatattgaatcaaaaagtaaaaaattaactaaaagagaacttattaattaattgctaatatttttaaatctcaaatatacttgatttccattttttttttccttgggaggaattgtatttccaaaaccatataaataacatcacataataagtcatataacgtgtgaccatatccatacacccatacaccatacattgtttgaattgcattaattaatatacagaatattacctgttttatgagttgtaaaaaataaaatacaaatagcaaccaagctgtggtccttattaaaagcagcccttttaattaatactgtatagttggaagatagagttgttgtttacactttactgcaattcagtatagtagtaattaaaataatggagttattaattactaatttaatacatatatttgttgttgtgtgttaatgaacaggatttgtgacatcaaaggtggcttgttgtggacaaggaccttataatgggctagggctttgcacggctgcctctaacttgtgcccaaacagagacatttatgcgttttgggatgcatttcatccatctgagagggccaataaaatgattgttgaccagattcatactggctctactgaatacatgtatcccatgaatcttagcactattatggctttggattcaagggtttgatcatcttcaattttcaagatcaaactctctctctctctctccctattattattttactagctactttaatttcatatatttaatatattattgatcactatatttcgatcgattatgcatgagagatcactttgtttggactttagctagctactacttttaatatttatatatatatataatatatattagtacgtacgctgtgcatgccatagttttgagagaaaactattactaatgcttgtgatattcatatcatatatatttaccgaaatttgagggttaatatatgatatatagtttgggatgatcaaaatgtacgtagatctagtgtgtgtgtgtccattagtattattattattttgtaatttggttgatgaaaaaagtttgatccatcaaccaatctttaatattattattaattattattattaccatctctctccactttaatataattattaattaataattattataagcaaggcttcgtatatttctatattttgtttggaggaggcagagctcaattattagtacaagcaaaccaattaatacccaaccaattcaaatatgttctctctctgaaattaattatgtatcttattactcttaaataaagaaaaatggtacataatgtttggtagctagacatatatacattaagtattacccttgaatgattattattaaaaaaaataaataagttatta

SEQ ID NO: 295514 - DNA, 2938 bp, Cannabis indica
taggcaccactggtgcctaatatgctctaatacttattatcattcattggtttggttctaaaagttgtttgtgattttccatatatcatatcatgagctctagctagtccataaaaaatgattaccaattgtaaaggtaacacttggcgtaacatattcaagcgcagataatgaagagatagctagataatataagagtgcattaatgttaaagaaaataattcaactaagaaccaccacagaatgtataatgtaatatattattctatcatcacaattcacaatccatgtcaaggtccattatggttgtcttaatcggcatatatacattgaagtaacgtacgtatatataattaatttgttagcttatgttcccaataaattggatataatttagatgcatttgttaatgaagagaagagtcgtagcatttgctaaaagtgatatcattttgtgtagtcttggttcccaagtgataccaattaatttaagactaaaacaacgtaactctaaactaaaatatatgatacaagaaaaacaaaatctatattatttgaggtcaagatatatatatatggtttgactttcttagaaaaccacgtgaaaccatttttattatattgtagtatttgtgttgttatgatccgaactataaggcatagagtcctcttagctaggtacattcccttttgggactataaataaaaggaaactgatcggtaatgaaaattatcacactaacacaaacgaccaaagcaaagcatatagagaaagttgtctcaaatatggctcaacatagcccacatctcacaatctcaattctcatcttggtgctattccaagtagtggtggaagcaacacctcctggaatcgctaagaacccaagccatgcaagatgcatgacaaaaatgtacaagcattgttataatttggaacatgtttgtcccaagttttgtcctgacgagtgcactgttgagtgtgtttcttgcaaaccgatatgtgttggggcatcaagccctaatctgcctgatacaaactctccgccagtatatcccactcctcctactattccttcatcatccactccaatacctccgaccactaccccagaaataccttatcctccaacatcccctactactccatcgccaataacaccttctccaaaaccccccaacaccatcaccttctactccaaaacctataacaccttcaccaaagcccccaacaccatcacccacaacaccttctccaaaacccccaacaccatcccccacaacaccttctccaaaacccccagcaccatctcctactactccatcaccaacaacaccatcagctccgacaccttatccaacaccccccaaaccatcaacaccatcaccaccagtaactccatccccatcaccaacaaaaccttctccaacaccatcaccaacaataccttctccaccaccgttgacaccttatccaacacccccaacaccatcaccttctacaacaccctctagtcctagtccaacaacaccctcaccgacaacaccttctccaacacaacctaaccctactccatctccaacaacaccaaccacaccatcaccatcgaacccatctccatcatcaccaacacctcatacgccttatcctcctccaacccaatctgatggtgatggtgttaagagggctagatgtaagaacaagaactatcctcaatgttacaatactgaacatgtatgtcccaactcttgccctagtggatgtgaggtcgaatgtgtaacatgcaagccaatttgtagtaagtctctcaaaagaaaatttttaattaaataattcttttaattaatgcatgttattctcataaagtaaaaccgttttttgtatatataatccagatttgataatattatatacttttgtccaaatacagaatgtgatcaacctggagcagtgtgtcaagatcctcgtttcataggtggagatggcatcactttctacttccatggcaagaaagatcacgacttttgcttgttatctgattcaaaccttcatataaatgctcacttcattggcaaacataacttaaatatgaaaagagactttacttgggttcaatcaattggaattctcttcggtaagcaccaattattcattggtgcacttaaaacagatagatgggatgactcagttgatcgtctcttcatctcattcgatggtgagccaattacgctatcagaatctaaaggtgctcgatggcaatcgagtaatgtcccaagcatttctgttgtaagagatgatgacactaacaatgtgatagttgggttcgaaagaatatttagaatcacagcaaaggttgtgcctataactgaagaggactcaaggattcacaattatggtataacgaaagatgatacctttgcccatctcgacctcggattcaagtttttatctttaagtagcaaagtaactggtgtgttgggccaaacatataggccaaactacaagaatcttgttaatgttggggccaaaatgcctataatgggaggagacaaagagttcaaaacttcaaacttgtttgctactgactgtgttgttgcaaggtttaagggtattaatagtaaagaagaaaatatattggaagatttagatctaccaagcttaagttgtggtagtggaatagatggaggagttgtttgtaagaaataagatggacttgtctgtatgatcacaaatgaaatgattccttttatagcaaataaagtaattataaactatagaaaatcaatgagtctttcaatgtaatttgttctcttaaagataaatttatgtgattttatttaaaataatattaataagaaaatagaagttcttatctattctattttttattgggtaaataccattttggaccctgtgttttgcaaaagttacagattggacc

SEQ ID NO: 295515 - DNA, 2998 bp, Cannabis indica
atacccttttttgtagtagtgaatgtttggtatttattagggtagaattagtacactgtgaagaggttgatgtagtatcagtcataatttgtggctgcatttgtgactgagatgaagagtttccaaacacagcaggtttaaggggagagtgcatcaaatgcagattggaagagtcaaaagaatacaagccattatggtatgtcccaatcaacaaaaccttgtgatgaacatggtctttgacaaagcaaacatcagaatgaaactcaaacaatacattattatctctagcaaatttggatacactaagcaggtttttagttagtgcaggaacatgaagaagattatttagtatgagaggataaaaaatagatgaattagagagaaaagagtgactaatatgcttgatggacaaaccagtaccatccccaacaaacaaccattcaggcccttcataagtggagcatgaagccaagttttgagcatcagaggtgcaatggttggtggcccctgagtctgggggtaccaattggtgtcattctagttcaaggtatgcatcagattggcttgaggagaaggtgcaacattatttggtgatacacttgtgaagcttttatcgaacctgtaaaagcagtcaacaactgtgtgccctattttgtgacaaagctgacaatgtggacaacctgaagaagaagcagccctgagtttcagtaggcgatttcacgaattgcagtaagcacctgctgtttccaaagtaaaaagttgtgatcgttaagtttaactgaaagactatgagaaaaatatacaggggcaaactcatctgtcgctcgattgcgatttctttgaggaacatggtatgaatttgctgaatttcccaggttcgattggtttaattgattttgagttccaacagtcgcgatgttagcactcaacgagggaaaatcaagctctgataccatattaggattgttaatccttctattcatagtgcaagaacaataacaataacaatggagtaaaaggaaagagaagaaagagaatagaaagatcagattgagagagaaaggaatctgttgtattattgtgtttgttacaatgttcatagtacaagaagtggtctatttatatcagcacaaaacaaagtagaaggagaacaacattaagaaagtcacacactaactaacttacaacaaccttttaaccactttatccaactctgaacatgatcccttaatactattcttaatttaattatatttatattgtacattctcaattaaaaaattgttggcgacttcataggtacttgctcagtttaattttacaatgtttacaacatatttttgggaaaggattgtcgaaaatcttcaaaatgagggaataggaatacaactaccaatatggaatatgaacaacatatcatgaaggcgttaattaatgagcttgttaagaaaatctcatttttgttctattttttgttttcttttaaatttctggaaggatttaatataaattagtatacactaaatccccattagaggaagaccctctataaagataaaagagctataaagagagagagctcactttttattttttatttattttttattttttttaacgcaatgccataaagttctatggatttaggtgaaaaataatgtaatgttctaggaagtgaaattattttatcagtactaattcaaagaaaattgtcacaggtcctattagggttgttggaaaaggaatggggattgttatatgaatatcatgatgatcaagacttttttcaaattcaatgagccaaaccgtccaatgccaatatatatacaaaaaggctaaagtattttattaagatgaaaaaaaacacgcaaactagacaatcatcaatgttaaaaaacatatctacatttctcttacgtatttaaacatgcaaaattcaaaatattgctaatataatataccaaaataaaaataaaataaaaaactttaccttgtttgactatactagcgcgttattgactaatttattcatccaaactcaaccttactttccgggaaattggcaactgatccataactgaacagccccaagtagagctctaaatatgactatttaaggcaaagccaaataaaaagctaattaaaccataaatcttgaattgatcgaagaagtattttagctctaatattaagtacgtagtagtagatcagttggaataagtttgtttaggcattttacaatgatgaagccagtggcaaccgcagcagcaccagcagcggctgaggcatatggtgttcccctggtgagcgttgtaggggattttttctgtgtcccttaccctgtggagctaatagtgaagaaaaaaagccacaatttgtttgattcaaaatacgaagctttagatgctaatggaaatctttacttccacgtcaatggttcgtctcataatttcgagaaaaagagggtcatgcgtgatgctgctggttttcctcttcttaacatgcgcgagaaggtatatattttattttaaccatacatgtgagaaatgttaagagaccttaagcggataagcacagtaaaaagtgtcgcattactattggtacaattttatatcgggtgtcataaactttgatttaataaataatataaaaaatcttttagttatgcatacatatatttatttaaataaataaatattaaacgagtcctatcaagacagggtgcccacccaatttcccatttaggtggggaaaactgttacccactttaggtggggaaaacgttagcctagttaggggcgaagtacctgcaaggccccgactattcacgagtcacattttcatttctaattgtgtaattgataaatgattatacaaatgagctacactcagagacggagccactttagctccaaaagcgccaatggcccctttcaaaattttggacaaaaaaaaatttataaagcaattttatgttaaaaattttatttttcaaaaa

SEQ ID NO: 295516 - DNA, 2283 bp, Cannabis indica
tctagaatatgttagaatttttacaatgttctaagaaatttataagagaaactaagaatactctataaagttttagaaaaaacttagaatcacttgaactaagattagatagttctagcgttatttagaaaatagtaaattgtaattaattagttagtaaattaaaaaaaattagaaatatttagatacattctttgtagcctataaatagaagtgagatgtgtgcttaggatgcaagtttgagcaagagagttcaagtgtgagaaaaatagtctaaagtgagtaaaagtgtaagagtgtcttagagtcattgtggccaaagtgttctaagtttgtactagtactcttcaatactaatagagtgttgtaattttcttactcaacagttcatccctatatcgcgatgataatggagttacgtttatttcgaacttttattatcgtaaaagcaaattatcttacaagagaactagagaaaaaatgactaagtctagcttcacctcacaatttttagagagaaaaacaatgaggagagagaagctctgaccttgtagagagaataaaaagtgtgaataatgagctaagggagctcccctattacaggcaaggaggtccaactaaattttgcatgaaatttgctggaaaaccccgcacttcgtggttgagcgcgcgatcaagggcattttggagtccaaaaactcaaaatcgtgatatgagtgggaagcaatcttatattattctcgaaaagagctttcaaatgccacttaaattgcgtcatttggataaaaaatgggtgtgttatagaaattttactaagcaatgtgtaatgctgaagaataaaaaaaaatcgcgaatgggcaataaagttgacttttgggcgccccggttgatgcacttgggcacccaaaacttagtttctagggcctaaggcatattttgagatgctcagatgatgcaaaagttttccttagttgattctttgactctagtgaagttattcattgtctatttggcaattttacatgatgcacgcgagagatgcctgtgtgatcactggtgacgatcggggtgatcactagtgcacatggttgtcgatggacttgtgcatgacacatgtacatgagatattgacttgcagaagcatctaaatcttattatggcggcaaaataagaccgatgccagagacgaaactaccgtttgatggatgaaacactgagccccaggctaaatgtcaacttgggcacacagtgtggtgcactgtggtgcctgaaggttgaaccactacttggttgatattttcttctggttccaagtctcattcttattttgggagaaaaataagaataatgcttgagacaaaattacaatcgaatcgacatcaccaagaatcgcgtagatacgtcaacctagatgtccagtgactgggaaggtgtcaccttgggcgcctggctttttatatgggcccttagtaacttcatttgcatcttgaaagcacttgtatcttcaccattgacgaaaatagggagtgtctgggagacttctgatgcgtgttgtaagccacaacaaatttactaatatttgtttccaatacctccaattattttagtataattgtaagtaatggtcgatcccacgaggactacgttcatttaattacttaaaaattagggacaaaagttagaaaaggggattttgaggtatagagtaaaatagcttaaataaaaaaataaaataaaattgagactacgatatgagaaactagttaaaaattattcgtcaccctcaacaatcgtttctaattcctattaatgaatgtaatttcaattttctatcaaactattaacctcgcagataaagctaaagcaatcaattatccaatctccctattgtatgtaatcaagacaaatcacttaataattaattcttttacctaagcagtaaatctacgaagcatgcaatttatttaacttaaataaagcttttaaatttatagagatagactaatataggcaacaaatcaatgaaacatataattcatttaacctatgttctattcttcatcacaattaaaattagggatattggcggctaaaccacttgaacattacggtttgtaacacttatccacaaaaactgaatttttggcggctaaactacctaaaccctggttctgttttgctttacacacctccgtccaaaaataaataaaaaaatttctgattttttaatttttttaaatatttataatttttttcaaaactaatattacgtggaccactaaa

SEQ ID NO: 295517 - DNA, 4303 bp, Cannabis indica
atttaaattgtatccagtgttgttttccattaatacaaaataaattacttaaaaagaagtttttgaagcttttaaagttctagcgtataataatgatatttagaaaacatggtgttatgctttatcaatgtgcgatatagctatttggcaattataagaaaaggagatccataaatagagagtgcatataaaactaaaaaaggaaattcagtaccaggaggtggagggcctacaataaaacttcgtatgaagctaccccacacaccaggctggctggtagacagattcagtctaaagttaaaaaaaaaaaaaaaaaaaaaaaaaaaaggaagaaatagaagcaattgtcatctaccagaaagtgagttctatttcgacataattaaagaagggccttaaatacaataccaataaggccttggaatgaggtaatagatatacaatacccctgatgactctaaccatatacacgagagcaccgtggacaatatatcagcctttattcaatgcataataaaacacgcaatgattaccactgaaatttggatgtcagatatgataccaaaacatcttcaacctgaccatcctctctgaggagaagcccctgaagggtgtacattcaaccgatccagcaccgaattgaaatcaatgggttgaccactctcctccatcctctgaatcacacttgaaacatgatcactcctgaaccccatgttcaacaatttatcaatcaactcgccacggggatggttccgcatgaactgttggttccggaccataagattagggcccgcattttgttgagtctgaagaggggcactcgctggaggatacccaccatgggtgaagtgagaaggttgaggttgataatgagctctgctgccttcactatcatacatcatatatgaacttccaggaggaagagcagggtgaggtccagatgctgcatatccgtctccaggttgtgttccataagctcccttaatttgctgaggtggaagcggctgctgtggagctgctctagcagcgccagaataaccaaaaggcacagcatcagagcgactggttcctggttgaggaataccagaatatgacacctgcatcgacatgccatttggattctctgggggtggaggttggtttccaggctgacttggtgcatagggagggtacacagttgatggcggcctaacctgactttgcattggaggctgttggtgcaattgcacttgctgaggcggcaactgttggggcaactgctgctgatactgagggaattgctggattggaggtgtctgatttacctgagactgtgcaggctgtggtgccactctagggtcttgcagttgggtgttccgatactgagaatcagaagtcacatattgactctgagggtgttgtgttggattcggtggatttggcatctgaggtggagttaaataatatgattgctgctgagagacgttctgagatggagcctgctggggaggtgccacaggctgctgtggttgcgctacttgatgaggcaaggcaagagccaattgttggttattagtatcagctgtgttctctgtctttttgggatctgcagtctgcggtgaagctctatcctcagtggattgggaatggttggacgaagaagattctttctgtgccagttgaagttttgctaattctttctgagtctcagccagctcttgtttgtctcttaggatttgtacagacctgtgaacctagaacatatattgtgaaataagttaatctagctttatttgcatgaagaagcaaagcaacgcgataatatcaacaagagatataaagggaggcatgctaaaacctatatggggtgtttggtataagagtttaatttggtgggttttagttgaggggttgagattaagggaatctcaaactcaagtatttaaagagcttgagattacctcactaataaacttgaaagtgggggctcacttaatcataagctggtttggtttggtttggttttacattgtcatcaccaagaacccaaacccccataccaaacaccccatattagtgatctaagtaaaatgcaacacctggctatagaaagcagaagacattccaaaaaaatgttgaactcataaaattggcaacatcatgaacgtggattagcaaatctacaaatgttattaatacttagtatatcatccatatatacagataaacatatacatcaagaggactcgttccgttcacccctcccatacacacacagccaacaacttgagctagcctcaagtggcatattgtttcctatggttaaccatgtatttctcgtttaaattataataaatccaagctatccctgaaatatgatttaataaagacatgtaatcttttagaaggcaccaaactttatattcctgcataaccataagcagtgctcagaaggtagagaaaataaaaatcacgcaaaataaaataaggctgcttcagtagtttaatgagagacaccagacaacttactccagcttgcataagaaattctctgatgcacaagaataaaagaactaaaattcaaacacaagtgccaaaaaaaatcatgaatgaacaaaagacaagttaaaataagatattcctaatttaaaaacttaagagtttcaactcacttcttgaaggtgtttctcaataaactttagttttgaatcagcctctccatgatcacgaactaaatcagatcgcatttccccaattgacttatcaaggttatagcaatacagttccaactgtgaaagccttgagctaatgccttcaagaaaacgcatgaggttgtcagcatttcttttcaagcttttttccacagcagaaaccagatcttggttgaaagaatcttctggctggctataagtagcacctggaaaaattgatgatcttccccttcgaccgttgtggaaatcctgatgcataaaaaaaatatgttgttcagaaacttgttacgggtacagcaagtcaaggacattatacagcctgcataaactttttttgaaataaaaattgaggtaatgttggcataaaacctcagagaaaacaaaacaaaggtgaaaatacgtttaaattcaaataacatctagtgatatgatatcttaactctaatagaacaactggtaactaagaacacatgaattttagtatcatgttttctaataattcacgatacccataatttccttctcgctttaatttagacttagactgggtttttaattgcccgctcattgggaagactcatttatttataaaaatagtcacaaaatatatctttattatcaatccatcggactcgaatcttgagctcttaaaatccaacagaaaggaaggaaaaagaaacaaacaattttttaaaagaagaaactccaacagatattaggttaaaggcacacgcctctattcaattttttcgaatcacaatttacaaaagtcaaaccgaagcaattgggtactttgctatatgtacaacgaatcagactcagaggcaaatgaattctaataacatcgaaaagatcagactattctcatccaccacatataaataaatggaaatggccttacatacacacacatacacatatatagaggtcttgctcaggagagcaacagatatacatcaattatcgatatgacccaaaaccctatctcgctcctaaaactaaattatataagaatccataacataacagcttaattaatatcaactccgggatttcaagcatcaaagtacctggccggagctagaagtgatcactggatccccatggctaccattggaggattcctggttactgtagtcttcatacgagcagagaatatcatctgtggcgaaatcgaatcccttggaaccggagttgggcctacccgaagatccagatgccatagttgctaagatcaggagtggagaagggtttcaaaatatggagaattagggttcgaatgagggaaattggaggaagaagacgtaaagagagtagagagagagttttctttatttcttttgtttttccgatgaatgagtatggaagtttcgtgataataaatgggaattcggggactcaaaacgaaaatataaatcttaattaataccaataaacaaataaaaaggtaaccccatatttatttaatgataaaaaaagaacaatacgggagggtttctttggagtcagaagtcagataaggattagatatgatgcaaccgagtcaccgaccttgctttttggcttcggatggagacttttattattactagtggagtctcacgtgcttcgca

SEQ ID NO: 295518 - DNA, 8665 bp, Cannabis indica
gtttgtactgacgaaactggagaaaaattaaaattttacaaacattcagtacttatgctgctaaaaataaatattgaatttataccgcttacaaacttaaaattttgagtacttatactgctatttatcttaaattttatgggaggtattttagttttttttatgcagtgtcaattactttcaaatattcttttaataaatttaaaatagaatttgtattgataaagctgaaagaaaattaaaattttataaatattaagtatttatgttgctaaaaataaatattaaatttataacatttataaatttacaactttaagtagctatttactttttatgggggtattttagttcttttaacatcacattacctaaccttaaccttatacatgagtaaaagtagagtactttgtactttagaaagttgaatttaaaccttgttacttatgtggctagtccttttaaaacacaatagttttatttttctttttgttttttcagggctaataaataatgcttaatatattatcaaactattttaagtgctcacgtgaactctaaacaaagaattcaaaggtaaaaaaaaaaatggtacccacctgaaacataaatgaacccaaaagaaccttctttttctttcaatgttaaatcaaatcaaatctagtgtagtaattgtgtttataattcaaaaaaataaaaaaaaaatctagtgttcttgtaaaataataaccaaatcttatgagggatatatttgtctttactgatgataaaattgacagttctgactttttcaaagtttcttaaataaactcatacttaactaacttgattttatagtaagaagcacaattatactctcattattagaagttgttaataataacaataattactattaagaatataaaagaagagaaaagatataaaaggttttttagggacaagacaaaaacttctctggtttttctgcaatggtgaccatccttttaccttagtttgactccttttttattaaccaacaagcacaagttttcatttttttcttcctttcatggtgaagaaaatgaaaaataatagctttaaactgtgtttaagttaaaaatgaaaaatttaacacatattattacccaaacacaagaagaacactctcttcttctctctctttctcgagcccctaccttcttacccacctatggttctacctggtctttagtcttttactctgtcatcttctctctctctctttctctctcatgtgtttaacaaaacagtgagatggtttagatagcaaaaaaaggaaatctttttatgtttctgctatagcaaagctctctttaatcagattaaatggggtttaggtccccacgagctatttttctggtgaaaaacctttcttacttcatactcaccaaaagagaagatgagatgagatgacacatattttgctctagtacttctcagatcagaaaaaccatttccacatttgggcagaaccccacctccttttttccagggaggaatatatagattcctctcataatcccattttttttttctttctttctccttaaataaaaaataaaaaagatcccaccttttcagttattctgtgaaaaaaagttagaaaaatcaaaactttagagatgggttgtgttgcttctaagctagaggaagaagaagaagtagtatccatttgtagagaaagaaaacagaagataaagttagctgtggataaaagacatgctcttgctcaagctcattggaggtatactcagtctctttatgcagtttcagcatctataaacctctttgtggcttgccattcttctccttctgcacctttcctcattaccttcccaccaccttgttcctcttcttcttcaccatgtgaaaaccagaatgttataaccaaccctatgttccttcaacaaatgccatctgagtcaacctgtcaaactgttgactgtggttcatgtgcttcctcaacatcttcttcagactctgaagagcaagaagaagaagaagatgaagatgaagaagaagaccaagaacaagaacaagagagagaagtgataagagaacaacatcatcagccatgtgggtacttctacatgcaaatgccaccaccttcaatgccatcaccacaaagagattttgggtgggatttctttaatccatttgacaatgtgaacagaccagaggttataaacggctaccgccataacttagatgatgaagttttgagagtggtgagggaagaggaagggattcctgaactggaggaggaagaaaacaaggttgctgtggctgctgctgctgctactgctgcagatgaagataatgaggaaaagagagttgagaatggaacaacaacagtagtcaatgaagttaccaagatagatgaaggtactaccaatttgaaccaggtggagccaaaggggttaactgtcattgacacaccagtagaaggaagggagcttttggaagctttgaaggatattgaggactattttcagaaggcttatcaatctctgatagatgtttctaggatgttagaggctaatgtggatcaaatgcagtctggtttggaagaaatcaaaggtgggtctttattttttcaaagattaatcacttggctgtgtttgagtattttattagttgcagaacaatttctaagctgaacttcattcagtgtggtgaagattttagatgggattttctatttatttccttaacttttaacatttccaaaaacaacttccagacttggtttaacctctagtcacatacacatacatacacaacaattccatgtttgaccaggttcttcataggcttcattacaaaagttcactttttattccacttgcaatttttctgtgtaatttctagctgagaaattttggccaatctcctgctttttgtcatgacaggtctgatattcacttcatatttattggttcatattatgcatttactttcaaatgtttcataactatattggtgtgcttaaaatgattcttgaattgttttattcaatacagaaaactcaacaaaactaattcagtctgcacgtcaccgatccatttcgtctaagccttcatcatgtaagagtctagtagtatcaacctccaaaagtagttcatcttggacagagtttaggaatgatcttttcgatgattatggaggaatggctgccggaagccattcacttacactaggaagaatatatgcttgggagaaaaagctctatgaagaagtgaaggtacattttgtcacttcctaaaactgtttcccttaagaccatttgtggtgtgttccttaaaactcatgtgatgtgctttttcgatgttcaataggctggtgatagcacaaggaaactgtatgagaaaaagtgttcgcgcttaagaaatctggatgttagaggagatgatgagctaactatggataaaactagagctacagtgaaagatttgtatgccaggatcttggttgctattaggagcgctgaatcaatctcgataaagatcgagaaactaagagatgaagaattgctgcctcagattgttgaactgttgaaagggtatggaaagtggaatgggataccaagaacagtcaagttattttaaagggtttgttgtttccttggtttaacattttgtgttatctttgtgcagattaactcgaacatggaaactattgttggaatcacatgaaacccagaataagattctgattgaagtgaaaactttcacttgttctgcatttgggaaattcagtaacgaatctcaccaggcagcaacggttcagctcaaggttgagcttaataactggcgtgcgtgctttgtggaatatgtttcggcccagaaagcatacgttgaagctcttcatggttggctaaccaagttcatagtccctgaagttgaattctactctagaagcaagggatcagcagtgtcctgcagggtcaatgggccgccattgctcatgatatgccatgactggttagcctccatagagaaattgccagataaatcagtggcctttgcattgaaaagctttgctaaagatgtgaaggctctttttgatcagcaatgtcaagaacagctacagaaaagaaaagttgatagtttagctaaagaacttgacagaagagttcttgcatttcagaagacagaggggaggtttctcgaattgaaacttaccgaaaacaatgaatcagatgctgaaaaccggaatgaatacttgaccgagaagaaagatcagctagacatgttgagaagaaggttagatgtagagaaggaaaaacaccacaatctcatgttggaaactcaaaggatgacattgaacgggtttcaaaccgggttttgtacagttttcgagtccttaatcgaattctccaaggcatctcagaacatgtacaatgatctagtgaatgacaatgaaaactctgagaagactgggaacatgtcatatatagaagacactactaaagttgagcaaaacagtagtcagatgaaatattagagagaatgaattgggttcttggattgtcttgttgatttgtatatacaaatgtgtcaaagcagctcgctgagacacattttattcaagctttgtaatcttttggagtgttgtaaccacgaattcctaactgttatttatttatttttttctttttaaacacaaagtcttatttttatgatgtaatcagaaaaagggcaaatggggtttggttctggtagataattataattaatgacttgatttaatattatctaaccacaaagattattatattctggccttgatagaagcagagcagaggggcaataattcctgacaagtgaaaaagaaatgactagtattgctgcagactactgtatgtaaagaaaatagaatacagacagtctttggtcatattcagctcctgatgggccattggatatcattctcacactgcaaagccatggtgtgaattgacaatactaacaaaaacaaaaatggcccagttacctttgaagcctctttttaagtgttgcatgtaatgtttcattgttcaatactgatttgagcaacattttcttaaagaagagcagatatcttacataccaaaagcaaaacagaatgttctagcttttacatgtctattattctgggagatatttccaaatgattctgttaacttaaaatttgcttttgtacaatatgcaatgatacacatcctaataggggagaaaaaaaaggccttgggtatgatcatggaaatgcataattacagatttcacaattgagttactatcactgtcttcttttagctctacctcaaatacagtgacactaagaattgagataaaagtataacttcgctcactacggcagcaggagaatgcagacccagaaaaggaacaatatctacctgcaaccaattttcaactgctgaacccaccactgcaccagcaacaagcccacctatggttattatagtagccttccctgcaaagacaatcagtatgagccatggttggttaattcaaataatcccaatggaaccctttacttgattcattcctattaatattcatacaaagtcaactactgtcaatggcactttctttcctcaaaagtttatatttttccattatcacactccagtcacccaagtaaaactgccctatgttttataactgagaaaaacaatttcaatggagaacacatgatgttaacagcaaactctcttcaaattacagtttagcatttcttttaatcatcttccattcctccctagcctctccttttcattacccataaaatatagaaaagaaacatcacaaatatggttaagacttcctttcctacaactgacaaaatagtgtgccttaacagcataacggtgtaaaggatggtccttatgatgtaaattaggttaggctagactcaatcccaaaattaatccaaaaagaaaataggcattacctaacttaacattcttttttgtcatgaagtacaaggaagctccaaagctacccgccaaaattaatccaggaacatcagcctcagaatatggcatgccagaggatgtggtggctccattaacataagttaagaccatcaaagctccataaacacctgcctttaggcctaactcactccttgatggagtctctaccgaaacaggcgatttcttcacagaagtctgcagccattgaggcattgatcccattcctgaagcacttacaggcttaacatcagcatagcgaatgttactacttacaacctttcccgctcgcctctgagttaagctcctcatgagcaacatgtcatatgcagcttccacctaaatggcatttcaacataaccatgtggaatcaataaaggtttccaaaacaataaaataaagaattccatcaaaataaaatatatattactagaacaattccgatccatattgatagatatacactcagatcgtaaataggctaagcaacaaaattagactaaaaaaatcatttttgttatccatggcaaattcattgcagggacattaatgctaagataataagacccaataaaataatgtttgcaaccatgtagattctgagataatatatatatatataaatataaatatatacaaacaaaacactattttttcacttttccaaagttatattttttttgattgatttttctgccctgtaaacaaattttcaagaagtgcctgtatcaaaaatttgaactttaactgactaaactaattatttccagttatttttcttaaattggaaaaaaagaaaacccattcaaacttcaaaacaataataatatttttcctgaaattgtgaagttaaatcctttttcaatcagcatcctcaaacaaatttctaaacccaacaacgaaataaacaaataaattaaagaaaagaagaaaacctgtgcaattgcgtccttgtcatccttacaagaggctacgatcgagttcttggcgcgaagtatatcatcgaacgaatcgccatcggagactccaaggagtttcaacgcgttctctaccgacatctcgaacggcgcagagtcatcggctctggagccggctcggactagcgtagacgttctggctaatgcacccccacgggtcgactcgattgagccgctccaaagctcgaatttgttggtcagtaactttcgaaggtaagccggtccggttcgtcttaccggtggccggttgtatggataaccgccagttatgcggttgggccggacggagagagtggctgccattatttccagagaccaaagaaacgtgaggctgatttttgagcaaacccaaagctccgaatctcactaccttttatataaattaaaaaataatttacgtttaaatttttaaatttattattattttttttttttgcaatgatttttaaatttaatttttaattatatataaatatataagtttaatttttttttataataataatatttaaattatagttttataatttttgtaattactaaaatgtcaaacacggttttcaatttgtttaaattattatttaaaaattaatttaaacatactaataaaaaaaattactatttaacacttattaattacgtacttagttatagaattatagtttagttattattatcgtaaaaatttatatttaagtatttatttataacatatagttcaatttaaatatttatactgtaaattatttaaaattaaattaaattaattttacttaataaactaaattttatatttttcatcatttttaattatttacttgatagaaaaagtaaaaaaataaaaaacggtaaagctaatgaatatttagaatttttatattattttatttttgttaataatgtttgttgatttgagccgtggagtactctaccttatttatccaccgttagatgaatggaaaaatgatggtaatcggtaagattagtgataattatttagagagatgttattggtgatatttaatattttattttatttattttattttaataaaaaatttaaaaaactattaactaattaaaaagagtcatttaaaaatgcacgcaaagccctaattagcggggagttcctctcatctctatccctgcttattccccaacgagaatagggtgaggacaaggtgagaatctcctaatataaaaataaaatttattttaaaaatttatatttatacaataataaattgcataaaaattaaaatattatatattgtttattattcaatatactaattaaaattttactaattattgtataaatcacaacttaaaaaatttataacactggtatatttaaaaactataaatacatattattaaatataaaatattattaaaaataattaaaatattaagcggatcctcgttggggcaggcaatgtcatctctattcatgtctcgtttaataattttagattaaaaagcaatcacaaattaattaagatgttattgtataaataaaagtaggcaatatctatataattatgaataatattattttgtaacatggaaaaaagggtaagttgaaaaataccacttttattaatcaattaatcaaatttacctctacttttatatttatttgaaaaatacctctttttatgtgtattgtacccaaaataccctgaca

SEQ ID NO: 295519 - DNA, 2548 bp, Cannabis indica
tttttcaaaattaatattaggtggaccactaaaaatttgccacgtgtacaagtgtgtacacgtggacagtccactgtggcacttaacgctgatttttggacggaggtgtgcagagcaaaacggaaccagagtttaggtagtttagccgccaaaaatttagttttggtggttaagtgttacaaaccgtaaagtttaggtggtttagccgccaatatcccttgatctaacaataaaataagtgacgtacttaaaaatctttatatgacttgcatgttacttcccaaaagcttattagccaccccttaagtacaaggccctgatgattagtaaaattttcatgtgggtggtttgctgtgctgtggctgtgacaattttaaattttaaagtttggagcccaattggtaagctagctagatgaaaagtcaaatgtacaaaaagctacttggtccataattatgagggaaacgaaaatagaagataactttggttacttttttgatatctttggcaaaaagttggaattacctattcacggctttggaaggagactgtgaattccaaatttccaattcacctctttatatgagtcatttgcctttaatggttaaaggtaataatattaataaggaccgaattggccattactattatgatctgcatgtcatgttgtatatatacatatatatatatatatatgatggtaatttgaagccattaaaattagagtcaccatgtgaaccccatgtgagagggagggtccattgcttcatttgtagaggaagtcacaatcaaaatctctcttgggtcttaaaaaatggttgctatgcatgactagaaatagttcccaagcaaaaaagaaaattgttaaagctcattaacaaatatcataattacctctaaaatcactaggtcttctcctattactttaccggcccctacaggggactgagacaacacaagttataattttgtgacaataatttcagcccaattcgaggcacgcgaccttgcttattaagttacacacatccttgatacatagtttgattatcattttacaattttacttatataaatatatattatatacatatgtactcatattcaaaagcgacatatatatatactcgcttctataatactaattaataataacatgcttatcgtaattataaagtattaatcgaggcttgggccagtatatgtagcttgctcaagatggtatgaaaatggttcaaaattaataattcatgaacaaaataaactttactatacataacatgggaaaaagaaagaaagtgctgatcctaattagttgtcaaaaacgaagtggactagctttatattagtgatcgatgatctcatatcctcatgaccaagaatattaataaagtggatatgaaagctcaaattcctccatggggggttgcttttcttacttctctttcaatacccttatccattctatcttctctccttctcatatccttgtcaggcttacgtagtacacatgcatggtcctttggacaagaagactcaaactccaaatattataattttgataataatattcctaatatgaatttcttaagtgatcaattacagatatattttcttttgatggaagattaatcattgacggagccactttgtaaggtgggggctgtatccctcccaacaaaaaaaaggttattatgtgtattttgtatatatttaattggtaaaaaaaattatacctaattatttataatttgcccctcccaaattatttttttcgtacatttgcccgtaatatatatttctccctccgccactgagatcaattacatatacatacatgtaaattaatgtataaatactaagatctgatccaaaataaaactggtaattcatatgtagtactgtagcaaaataaatacatttaatttacattactagttcattttgatccacgttttttttttttttcttaaatgttgtaggtctggatagaaagaaaaatctatgactacaagtaaatggggtcattttattagcaaggacatctataataaccggtccatttagctacgtatgggggcgccggtggctgtaaattggctgtgccaaatatatagctcacatgttaatttaaccgattaaacaaacgcactagcgcagtatctattgtctagagctactatagaaatcacgaaattttagcatatacactttgattatggcacacgtatgtaagcaacttatgtaatatttgtactgaaataaaattaataggaaaagtccgacccaattttatcatatatttattttcatatgccatcaaaatatttcaaccattaataattttataggcttttgagaattctctttgagtccttttggtacacaagattggactggattggactgaaaaggattggacaagattagattatgctgaaagtaattttgtgtttggtttaaggatggactggactattttaattatttccttttagaaaaaaaaaaacttaaattaaataaaaacatataataataaattaaaatt

SEQ ID NO: 295520 - DNA, 10039 bp, Cannabis indica
gaaatggagagagatatctgagaaagagagggctaggattgggaaattgtattgagcaacattgttgattatgttggctcgggttagtgttaatgtgtgttgagggattacactatggatgacttactgtgattatttccttgtagctcttgagattgatatatcttgttctcattatcaataaagattggtggtaaagctttcaaactggagtatgaccaagttcacatttaacttaggatcggaaccagtataaatctctgtgttattgtgtctaactgccatttagagtcatctgtgttatatttttttggtttttttgttcttgatttgtttgttgtgatttaacttttatttgtttaagtgtgatcttgaatttagaattacagaagttaattcctatgtatcagagctaaattttccacattaatatatttatattatatatattacagagtattttttaatggatatgcctagtatagtaaggcattaaagaatgaagaatcactttaaatctcttaggcctagaagaattttatggcctaagtatcagcaaaataaagaggaacatagatgaaggccaaatcatacctggtttctttttcttcattgtcatacccgcctgaaacatagatgaagttacatggtatatcgcggccaaatcatacctctgtaggaatagtgtttcgctttcattagtccaccgacttttagtgtgtgcacaaaggcactgttaccactgtgcacggccctcctttttttagattacactgtataaatggagaaatacaaatctaccaagtacgaatgaacgtaatcgcatttcattatttttttacaaagaaataacaattatatcattgccatcaacaaatttacaattttagaggaattaagcttttaataaattacgaattttaaggggaagttaggcaaactgattttagttatatatatatatatttttttatgggtaaaaaacttttattgaaagcaaagaaaactagtagccacatgagggggctacatcccttaagaggccagtggcctcggccttatgcactctcgcccaacgagcaagcatatcagccaacacattgttctctctttttacataacacacagaaacctcatcaaaagacttacataagttcaaacaatgagaaaacagaggaaaggtctcccagccataaggtaattgtgcattgttaaaggttgtggctgcagtcaaggaatcagtctcgattctaactgctgaagcatgattctcctttgccaaccgaagggccaaggcaatactcagtaattcgccctccaacactcccttgacctttgtccagctaagggaaaccagagaattcccaacatcattctcattgaccttgatcacagcacaacccgcttcatcatcacgaatggaggcatcaaccttacaactccagtccacatcccgttggttagagcttagcacactaggctctttaccttgagtttccgaattctgatcttcaaaatggtcaagctagggtgttttagagatgaactcttgagttcggaaagaaaaacgatcgaacaagcgctccaaatctacatcttgccctttaaagatacagtcatttcgccactaccaaattgactcacacagcacaacagccatcacctgcagattcaaatcatttaaactgcaccaccacataccaaactccatcaaactattccaattacaccccagggttcttacaccagccctgaaccagagagcccgagtaccagtacattaacaaaacaaatgcagggcagtttccagatcagcatgacagaattcacacatttttagctcagcctggagaaaaccaagtttgtttttggtggtaagaatttcactgaacaatctccagcagaagtgttttagtctagggtgcaactctatcttccaaagtttctcccagagcttatggggctctttgaagcgatttttctggcttagcaaataggcactctttacagaaaatttaccagaagtagaagccttccaaaaaagaatatcaccccccctcatccagagttctaatccgcaatatctcctctgtaatatccaccgagaaacagtccttaatcaccttctcattccagtttctagttccaggtatgaacagatccataacgcgccataaaggttggtttcgttggaattggaagttagctttgatgtcttctaagccttgccttggaatccaaggtctgtcccagatttcgcatgagccatcagcaatcagtatactagccccattgacgcatatctctctggcctctagaatactcttccaacacctagactcaatcccatttttctccactacccacacatcattgtgtttgcaatactttcctctgagtagtttcacccatggcttgtccttctcctccattaccatccaacaaagtttagccaataaggccaaattcatgtccttaagtcttcggaatccaagacctccgcatctctttggttgacataactcattccagcttcttagagcacagtaattctttttatccacacagccactccaccaaaactttgcaatcaccctatccagctcctcacacagagtactaggaactttcaccgttgacataaagtagtgggggatgctttggagtaccgaactgaccaaagtagtcctacccgcttgtgaaagatatttcgccttccagccttccaacttacccaggattttgtctttcaagaacagaaaatcattccttttcttagccgagaaaaagaaaggaatcccaaggtatttctccttcggatttaagtgattgaagcccaagatccctttgatttcttctcagcatgatttcttagtgttggagagaacactactccactcttagcattgctaacacgttgccccggccatctttcatacttaaggaggcattttagtaaagcgtccgcgttttttgcattagcactacaaaagaaaatggagtcatcagcataaaacaggtgagtaatcgggatagtgttcctagcaacacgaacccctttcaaatcaccgttcttttcagctcggcgaataagtttcgataaaacttcactgcagagtatgaacaggaatggtgaaagaggatctccttggcagaggccccgtttgggattgaggggagccaaaggtgcaccattgagcaaaatagaatatctaaccgtcgtgacacactccatcaatagagtacagactttgctgttgaagccattcgctttcaaaacccgcagaaggaatccccactcaagccggtcataagctttgttcatgtctgtcttcaccgccatgactcccactttacctctctttcctttcatggcatgaagaacttcctgagccacaatggaacactccgcaatccatcggccaggaatgaaggccgattggaaaggggagactagccgatccatacaacctttgagacgatccgtcatacgagaaataactttatacccaaaatttcatagacttataggtctaaattggtcaagagtattagcacttgcactcttgggtatcaaacatataaaagtctcattttttctctccatcatccgcccagttaagaaaaattgttgaaccattgagcagactgattcaccaacagtgtcccaatattttctgaagaagattccaggaaatccatctggccccggagctttgagggggtgcatcttgaataccacttctttgatctcaccatactcgggcaacctacagatagcttcattttcactagcagttactttctcagtgaacaatgtctccagctcatcttctatcaacggattggaagagagaaacatttcctgaaaatgatcttggaagtgcttccctatgttatccctgcctcgtatccattgtcccatgtcgcccatgatcttgaatttctgcttctttagaaaccatagtatgatcaataggcatcttttgaatattctccaattgggtccgaagttgtctcagttctttgtcacaaaaaccaaaaacattttggttccataccttcagctctcttttagtgatacttagcttacggggaagccccacatcccttcggttgtcacaacctttcttccaggcactttccacaactaaatcacaatctactctcgtagtccagacctcgagaaagcggaaaggatagttcagcttcacagtatccccccaagtgtccagtaatataggagcatgatctgatccaactatcgggtaattatgcacacgggcattagagaaagcagtacactaattcccatcagcaatgactctatcaagtcgttttcggattcgctttggagccaccctcgaattttgccaagtgaaaacaccaccatcacttcccaagtcaactccaccacagttaaacagaaagtttctcagaaattctccttccctagcatcaaattctcggcctccaatcttctccatgtgatcaataatagcattaagatctcccataagagcccacggctcagtaccctcagttactttttccgtgagccaatttcgaaattctcgtttagaagcaccatatggagtaccataaacacaatgaagcttccactctggacatcccataacagcttggaaagtcacaagaaatcctgtctcataagtctccaacacattacacagcacaccaattctccatgctatacaaaaacccccagctaaaccattggccgggatacaccaatgattcacaaaccccaaatgattcatcacttcaaccatggtctccacagcaactttagtttccgaaaggaaaataaagtccgcattagagtctcaaattaaacctcgagggtcctctctgccgtggatcgacgtaatcaacgaagttccaagctaagcacctcatgaggacggtgggggcatgcttccggccgcctcctcgtcgcttccaaaatttgggacattagcatattcaatactaaccttaatacagttgttgagtaattcattgaaattgtcattcccaatattgttctctgtcaccggtttccttcttcttccacttctggttttcactcccaaagtgcgtttggcagtgttgttagcagctttgctcttcaatttcctcccacgagtgttgccctttccagaagttgaagcatcatccccaaatccgatacaaaatttctcctttgatggcgtccatttgggtagttcaggctcctccgagactgagtttgagggagctaaagcctcggcaggataaggttcataccaggtatgcgcctttcgtttcctagtgtttcccaagaggaacaatatcatctcagataagtttggtgggttggagatcaaagtttgttgggccttgtaaaggtttatcacatcatctccatacaacttaaggaacatttcctgggcctctttgtccaaattgggccatcccagtggagtgggttcagggaatttatggggcttttggaataggcagattcactcatgtggaatctccaatgattgggcaattgtaggcccaatgttaggaataatatccctatcttcattttgggcaaagtctggatcaggtagttgaagaaatcgtggtctttctcccaaatcttccacgtgatgtatagcctcatccgccacgtctccagtacgatcggcactaattcttgccgcaccaccattactcgtactaccaatgtacgatatgtcctttacccctgctgaattctcttcctgacaaaaatgccctgccagagcaggggccttcttttgcgtcaccccaacctccacacctttgacagccaccatgttctccaccctcgacggtggtcatcttttccaggttccccttcgatgcttcccattcaagtcccactcgggtgcatcgccattgtcgactatcaacttggatacacccttgcccttcatagtaaaacagtttactcttcctgtttcagacttgatccgtgtaccagacatttggacagcctctccaaccttaggagtcaccatagctaacgggacaaaacattccttgttccagtgtgcaagcttcccacagttaaagcacaaatggggaagtttctcatatttgaattgaatccaagactccggttttccatcatcattgaggaaaaagcctgttggtatagggtgcttgagccaaacatccacataagcacaaaggtaccctcgatgcaccagcgcctccttagatttcccatccgttttcagaaatgaacccaccttcttccccataatggcagcattctcatccttcaggaatctcgtagggaggccatggaattgaacccaaaagctggccacttcaaattccgccaccctgacctccccctccaccgaccatggtttcaggttcagcaatacaccattcactatccatggtctcttctcaagtacaaaagcacaatcatcttcttcaacaaagaagaaccccattactccatcttcacatttttttcattctccatggacccaacctgcgccaaacaccagtaagaatcttcttgaccactgaggcaggcatatccttgcatccaacaactttcccaacgcagactttgttgagaactacatcctcaagtgttatatcttcaaataactctaacatttccatttcaagagcactatccctttacagaacttaattcatgctctcatcaatgacctctacttcgatatccttgcttttctcactagccttatccatgttacggagaactcagaaaacaaaacgcacagcagaacctaagcacagagtcgagaaaaatagagagaaaactcacagtcacttaataagactagactctataaggggagccattttttccttctcttagtgtacaatttagtcgtttaccttagttataaatatatatatatttatatatatatatatataaatttgagatattatgcttacatgattaccggtttttttttttttttttcactttaacagaaaaaagaaataaaacgttaaatcaacaatttcctttagaaagatacttttaatatataaagatacccaattaaatagtgcaactaagacctctaattacgtagtgaaataaacatgcaaaactgtgtaattacctttaataacacccaattccaattccatcttaaatttccaaactgtgtaatgaccttaaatcctttctattcagactaagctctagttttaatcaattattgttaagagtgtgaaattaccaagtttatgtaaagaaaattctagagtgaatgaaaattttcttccggcccttgattcaatttcccaagaaaaagatctaaacattttgaacaattctaacaacattttccatgtataactattaagaataaaaaggacactcaagaagattaagagcatcatttcattcataatttagatataagttaacataatatcatttcaagaacaccagaagttactcgagacaattcttaaatttaaacacaaggaactgcaaaggcatgagaagacgttatcaggcagaagctgcagctgcttcttccagcaactgtttcaccttagtgatgtagtcactcattgcttcgtccttggatttcgctgaaaatgatggtatgttttctttagacatactcccaaatactatcattggcaaacactacaagtttttaaaatttactgtataaaagtgttaccttcaacagccttccatgcgtcccacttagctttctccctcatgtataacattccgggacgagctgagattaaaattaaataaaaaaaaaagtaaaggcatgtaagaaagagctcttgattgttttcaatctaaaatcatgcaatcacaaaacagtaatgtagaaacaatcaaaagcagcgaaatgcacttgcagaaaagagcaagctactaacgggtgtcaactggtccaacagttgcttgtttgtacagcccatagagaatgagcttgttttcattggtggttgactcaggcagggtctttgctttctcagcatgctcctcaaactcctcctgcataaacatgaagagttttccgtggaagaaaatgatcagaacaaaaactaatcatggaaaataattcatcaatctgtaacatagagaccaaaatccatatgtttcatgaacaatatacaatgaataattgtaattaatgaaggtaagcacagatgaaaagaggctactttctagtaacctgcagataatgagatgactatgctcttcgtccaatatgataccaacaggtgttaaacccaataatgatttatttctctacagcaagtaatatgatggttgtgctacacaaacacaaccatggtcaaattgtacaaattttgctataaactttaacaaacataatcacattacaataaaagtcattcattttcagtttcaaacatgaaactccagtaaatctctactatattgtactcacaccattacacttatacttgctttttaaagctcaacaaagttgctttgtgaactaaagttaaaaactgaatccttttgttgaacgctataatcactgggatgcgcaaaacacgaaaaattcatgtaagtagctttactcaataatttcaatttcaaactttaacatatttccgaattcctcaacatctaaatctcctttttaagtaaaagcggaaaatttaccaaccttcagtacaacttttaaaagggactactcaatgaactagcagtgaagtgaaaaggtgaatgtggctaaacacttcattctacaagtttctatcgtcaaaagcaacttaaaaagttgaaaaaaaagaagcacccgcgacaaaagaaagcaaattcatattactggaaaatcctggtatcaaaaaaggggaaaaggtgcagcaataaactctacaataacaagaataaatatcgggaattttacaacgaaacaaggttcgctatcaaaatcagtaaaaaggaaagtacaaaaagatttgtattgaactaatgaataaataatgcattccgatcaaagttacttaacgaagatgtatgggaattgaatcgttgggttaaatgtttccttaatccttataagaggtggtcaaaactacaagaaaatgtgaaattagctctatgttacactctcaaactaagtccaaacaactcagaacttgacagtaatacaattcatagagtatacttctgtcaaattagtctctcataaaaagaagtcaaaatcactcgttcaattcatccaatagagacaaaaaaaaatctagtcaacgaacaaaaccagatctactattgaaatttcaaacatattagtcagtttttgccaatatatatgtgtctgttttgtttatacgaacaaaaaattcatcaaatgaaagatcacagatctggacaattttcttcatagcaatcgaaaaaaaataaaaaaaaaatattataaaaggaaagagaaagcggaccttcaaagccatggcgagtgataatcggaagcgggtttgatgatggccttcgcttgatgacgataatttagcgtcgatagtatcgatggtattgtgtgagtggcgatgggctttatttatagaattttaatgagtgagttgtaaatctcacgctcaaaactcaaccgtactttcagaataataatataaaaaagtgtattcgattcggatttatcatatttattatttatgataataaaagccaggtggataggaagttgagcgtctttgtgatggacgtctacaacatgggtctcctccactccacctatatctcataggcccaccattatttgagaaacgcatattgggggtgaaataactttaactttaccttttgtaacacttaattataaaaattaaaatttttgtggcaaaatctactaaactcccattaaatcgtactctgtactcttccgtctaaaatttatatttaaatgtcaaggtggactgtccacgtgtaaacacttgtacaggtaacaaattttgagtagcccacataatattaatttttaaaaatatttttaaaaaa

SEQ ID NO: 295521 - DNA, 3493 bp, Cannabis indica
agaaaaaaactaacataaaatttagtatacgtgtctcgcacgtaattttttgctagtatatatatatatatttttttttgttggtatttacagtatttttatcattctgctgttaaaaggcgccacggacaaactgaataacgatttttagcggggccagtataatcgaaattatctgaaaataaaaaacacaaatatttttattttttcttttgtcaaaatctagcaaggacgaaaaaaaagcaataacagagtagaagtgacaaatggctggtagtgctggtgcgatgattcaagccatacccatctccaatctctcttcttcttcttcttccttaactacactagtttttctcccaaataccaagcttattccaacttgggctcccttcaacggagttcgattaatcagaaagcagagaaccttcccacgtaggcctatgacagtctcattggctctagccgaatcagattccgccaagtccttggaacccgaccccaaatctcttcttcaacaactcgccgtaagcgtatataattaattatataactcataattgtaatctctttaatttggttatgtatcaattgcttaattataattcaatttctttgcagaatagttttgatctttcccaagattatttttcacagcttccacgcgatcttcgtctcgatgtaagcaaaattaaaaattctttcattaaagaaaactcactgacattttgggtggttttgagcttttggcatttcattaactcaaaaaacagccacagaaacaaacgacatgtcgtttagaatacttatttattgcatatttctatatcttaaatgttttgttatggtgaagctcaacgatgcagcttttgatctttcaaatggacctgtcattgatgaggtttgtttctctagattttgttcctatcattttccctgcttcaattttggaaagaaagaagtaaaatagaatgcaatcaacaattagtatgtaaatacaatacagtgcagtaccgtttaatgtcaaatcctttctatccaaaatttgtgattttcagtgtggtttagagctgggagagacattattaaatctctctagagcatgggaaaaagctgatacatccacttcacatagtttaattagcaagctccctaagttggaagagtctctaacaaataatgctagatcaggcaagtacaagaaatatcaaattttctcttctgaaacactcactcactttatataagtttaagcttattctgtctcttctggttttggttaagcctttggaaagcgtttggtttcggctggaagaaggttccaatccatggggcagtatggccaaggtgagctacaaaaggtatgtaacatatgtcttcatcactctgttctataatttgttgagtttttgttgattgggactgtgcttttttaagacttaactctcaatctaagtgatagcaaaatttaaccaatgtactatgccagaactaaaaacagttgggcattgcacacaataaattgtctatgtttagatttaatatgaaagaagttttgtatctctaagatggaagtattgttgaaaacttcaacaaatgtagattgcaaaactgatgatcacaactgggaaatgtctatctgatagttcactgtcaacagttattgtcgaacagccaaagaacgaaagcaggatgctaaaggttagttcataatagtgagtaatttgaatttaaagcaacttattagttttaacatgaactttataataacatgagttggttgagaaactgcagtttggagaactccaagtggagttgacagctagtaaagcgaatattggagctgccattagtttagttttcgggtaatagttgtctcatttgtttcctatgttattcacatcaaagattcattatgatgttctgtacttcaaaacacaaaatgtaggattctttcatgggaaatagctcagggcgtccaaaacataccagagagctcattgcagtatgcgaatgacaatgccttgatgttggctaaggtagcacttttaagtttaggatgagaaaactatgctgtagatttataaatcaccttgaaaagatctcgaaccttatgttcacttcgaactgttaccaagaaataatcatgtccttaattcacattctatattaccaataatcaaaaacatttttctgattactgcagtctcttaggggaactctgcttgcagtgttctattcatcaacggttttgtctggctttacctctgtgggacttgtcttactagcaagacaactcaactcaaaggaggagtaaaaatctgcaactatgttacaccatttttgtttgtagtttctttgtacaaagtatttgtatgcttcactaacaataacatggacgacttattcagtcaacattgttgtcaaaagagtaattacgtttaagtaaagtagacaaatttatttattcatatcctcttaagtaatttatgttttcttctagtgttcccgaaatttcagctggcttccattgcattggagttgatcttaaacgcctcaaatttgtatagcccttgatcaaatccaaagcaattgttatattatttataatttaaataatacaatattaagattaaagttgtgacatgtaatatattaataagagattattagtatatattctgtttgaaggtaatattatatgatatataatgtattaaaaacacaatttgtaacataagaaaggataagtttatagttgttaaaaattgatattctactcatttatttcattaaaataggcattggaacgtttgggaataaagtggctcaaagaagagttataaaactcaatacatgagtttgctcgaaacactacaggcgacatgtcacttgaaatctaaacaagaagggctttagggttttacaaaatttcatgcatgtttaatggtattgctccaggtgacatgtcgcctagagcctattttcatgaaaacattgtaaaacgttcacctatttaatgggggcgattccatacttcactctaatagatttttctttcattaatcctgtttacacgctttgtaacagtctatggggagtgtggaatttaaatttcaagtttggttctctaaatactatatataaaggacttgggttaacatatttgacacactacatttctatttattgaacactagccacaaattctaaataggtttctttattcccaaaaacatttctattaaaaccctatgtatttggtagtagggtgcaataagatttttggacaaaagtgtagaagccttattcaaactattggtaatcccctttcaacatttggaatgtttcttctcttcatcatcttcttcttctatattttattattattctcttcactataatattatatatattgaaataagaaaagaagatgaaattgaataactacattaattaataaaataaactcaatattaacaagttcccaaaaaga

SEQ ID NO: 295522 - DNA, 1966 bp, Cannabis indica
tcttaatttgattacttaatctctagcaagtattttacacttcatttaaaatactaaattgctatgttgatgacttagtctagaaagaacttacagtttcagactaagataatataaacctcgatacaaacctccatgttctttaccaagatgtgtttgaacatcttgttcaccaatttttgatatgttgctttggcattcttgagcccgaaggccatgacaatatagcaatatactcctttatctatttggaagctaatgtgttcttgatttgctacctgcattttgatttggttgtagctggagtacgcatccatgaaactcaataattcatattcggacatggcatccatcatctaatcaatctgagagagtggaaaataatcatttgggcaggctttgttgaggtttgtgaagtcgatacacattctcctggcttcatttggctttgggaccaatactgggttcactagccaaaatatagagctctggaggaactctatggaagttatttttttaattttcacctttattgcttctatcctaaccggatccaatggccttcttttttggcaaactaggaccacttcagattaatcacaatcatacctgaatggctccacgccaatatgtcttggttcttcttcactgtggatacaactttttctttaccgtcgaagatagatttcgtcccaccttaataaatttggtgtggtctgcttcattaatactgatttcctcaacatgctccaacatctcaattgttctttctatcttcaatcaagaatctaatttgtcttcctcctgaatcatcctttgacctagctaggaaagtgctctgagagcctcttcaatttcctctctaaccataaaaactgacctggcagagacgttgtaacatttccttgcgcttctctaatcgccccaaacaactataatgcttcggtcatcacataagaatctcatgcataggtgctgatggaagtaatttctacaaagtcaactaagatcgggcatcctaggatagtgtttaggcagtggggaagtccactaccacaaatatacaatgcttaaaattggaggcagtagtgcttctaatgatacactcattcaaagtatctaggagctaaatcttccccattggcagtagagaatctagattaaagccttgaagctcgatggggcatggaatctgatcgacttcggtcatcccaattgcttggaaggcaaacttgaatagtatgttgacagagcttctattgtccactaatactctggacaatctttcgttggcaacctgggcttcaattactaacgaatcattatgggggaagtgtacgtatcaggcatcttcttctgtgaaggtgatgggaagattcattgttcgtgaatggtgggctagagattgtactagtgcacacacttctccatgataatctagttctttcaaatatcttttttatgcattgcgagtgctttcggcaatgtgtggtcctttggagatagtatccacatagccatccatgagtggcagaaccaaccggggcagatatgagttccctggtctaagagcaaggaaaactaagttagcctgtgtattgggtatcccctgaggggcttgaatggtcagtaactatatcgtcggagctagtaaagttggaggtcatattccgggagcatgagggaaacctatgttgggattttatgccttaaataaaacccgttacaatctaatctgatttgttatcaataaaagattagaagtcatttatgattacatgttgtttttcatgtttatggtttaatatatatatatatacaaaatctgttaagtccagaacatagagtcattcacaattacaatgatgtcaacacagtggaatgtgattgtgattatatgcttcaaaagacaaagtccctgtttcatcagtgcattggatttacggatttacactgatgtgataat

SEQ ID NO: 295523 - DNA, 2311 bp, Cannabis indica
gggcataaaacccaacagttcatccctttgtttggattttcattgacagtatatatatatatatatgtgatcttgttattagtcttatcaaacttttattgactgactctcctgttcttttgctctctgttgtgtttgatgtttaagggcctttccttgggtcaagctgaacattagtgtcaagtttctagtgtatgtggtgtttcagtatttttaagttgaggattttccttctcacatggtattcataaaaatgtattctaccattgctacttttatcccatgtgtttcttgtattttgggcttgagtttatttttttttggatactgttaatgggcctttgtattctctcaaatgggccaaagggtatttctgtctttctactctatggttaatatagatctgtaattaccattgtgttttcattttacttctttcagtcaaacactcaactacttcgtggtactattcatcttctttgtgtgtttttctgtctcttgagtgggttccagagctttctgctatgggaaaaaaaggcatgtcaaaaggtcaaaacatcgtctctttctggtgatacttcctcgtcattaatgaaggttgtaagtcccagttcatcttcagctaggtctgagtcgtccctatgcacaccaaatacaggttaggtctattcttcttctagtttacccatgagtcttacacgttttatgtcgattccatttgctgcacctaaggtcaacctcagttcgcctgttgaaccgtccatcaaccttattgagttagtcccatctcagccttctaaccctaagtccaagactagaaggaaaacagtctcatccaaatcttctcacccttttgatcccaagaaagtcaaaacctctcaactagtttccccatctaaccctagtgtgtctgagctaaacaaattaacaacactgttttattcgaatgataaatttcttaggtttcaggataatgtctattactgcccattgtggcctgaatattgtgttaaactgaaatattttccaaaaatctgtgagttgattaaacatcgtgggtggtcattgtctatcagccatctacaaccaccaaatgagaacctggtacgggagttttatgctaatcttggataacatcttgaataagaaaagtaagttgttgtatcttgcttatattaagggcaataggtttcgtttttccccttccaccattagttgtgtcttaaaaatcaaaaccattccccatcaagttttcaatgatgattataaaccatcctttaaagaaatagggtctgaatcacaggcaactctgagtttatttagaatgggaagcagtaacctgtcaccgttctctctgagttttaccgtgcacttcacaaaattgcattgtcaaactggtgggccaattcacacatctccacaatcaactataatacaaccatatttctctttgcattgggtactggtgttagtattgatcttccatcactcatgtatgattagatagtgaattctgccactacgaaaggggtcaaacatacactgccttatccaagcttgattaatcgtgcggtaaaaagaggttctcttattatcaatgagcaagataagatcttgcatgttcctactcttgggaaatcgttcactcatgtgcatggtaagtctcttccattatcagtcatggatgctctactatgggtgatgccctggtatctgatgccccctcttccttgactgctccttcagctcctctagaaggtttcagtcctgcatcttggaaaaatcaattgttctcaaaggttaatgagtttgctgacacttatgctcgtgaccactcaggcagcattgatttgataaagtagttattgatgtattgtctgctatgactgaagtgttaaaatcttctgaagcctgtcttgatttacctacccatgatgacttctccagttccttagatgatgttggtgccttttctgtgcattctctagtgatttctccatcaaatatgggtacatatccatctggtactgttggcaatgattccttcgtgcttaaatctacccttcagccatcatttgtgggtgatgatcatgatccttcaagtggtgctattgtccaagaaaagacagtctctgctgatatccaatgggagaatattgttacggatgtccagggggagcaagatgttgctcatggtcaaactgaatccactgctgctaatatccagtgggagaaagttagtgtacgtgatcgaaatgattccacaacagctggtgtaacaccctaactagcataggcgtattacgtgatt

SEQ ID NO: 295524 - DNA, 3295 bp, Cannabis indica
tctgttttgcttgaagtatttttctagtatttttcgagaaaattagccaagcttgctttgccaataaagcttggttaaagtgaacaaaacttttaaaacccattcctccttgaactttcgactgggttagagccttccatgttttccaattaatacccgatgacgaggagttagaaccccaccagaatttgttgcacatggtttcaatttggttgatgagagttttagagagtttaaatcaactcatggcataggttgaaatggattgtgcaacgactttgagtaagacttctttgccaccaactgaaaaaagattttcttgccaagcggatagaaggttccataacttatccttgatttctccaaagaggatttttttgtatctgcctgaatatgaaggtaatctcaagtatctttcatgacatggtttgatatccatttgcagaatttgttgaacattcaaatggaatactggaagtgtattcagagagaatgaatgcacagacttatccacactaaggctttgacctgaagctctgcagtcttaatcaagtgatcgcttgatggccatggctgattttttattagcacggcagagaacgaggctatcgtcagcaaaaaatagatgagagacacttggagcacctctggcaatacgaagaccgttaagattacctcgttgttcttcaaactgaaaaagccttaagagaccctcgacacatatgataaaaaggaaaggagacaatggatcaccttgtcgtattccacgagttggatttaggtgaccttgaatggagccattgacagaaaaaagagtatgtaacattgttgatacagcgataattgagatccactacagctggatcgagccccactttaatcatcatgttgtaaacaaagtgccattccaccctatcaaaggctttgctcatgtcgagcttgatggcggcgtagccttctctgcctatctttaagtgttttaatgagtgcaaaagttcaaaagcaaccaacatgttatctgtaataagcctcgattgaagaaagcactttgagattcggaaataaccattgaaaggaaaggtttaattcgaatcacaattgccttagagaccaacttgtataacacattgcagaggttgatggggcgaagttgagacatagcattcggtttcttgaccttaggaatcaaagttattaaagtttgattaaagcaggagggatccgcaccattattcagaacctcaaggactgttttggacaccaaatcaccaacaatatgcgaataatttgtgtaaaacatgacggacatgccatctaaaccagggttgctatcgtctcccatggaggacaaggcattaaacacatcttcacgcgtgtaaggcaatagcagggagtgatttatgtcagctaaaatggtgcacggaatagtgtgaaggacatgttgaatggcttctgcatcaaacccagcagtggagaagatgctctgaaagtaactttcaatgataaccccaatttatttttttgatgatcttaaaacacattggtcatcgaagagttctttgatagtattattgttgagtctggtattggctttttggtggaagaactttgtgttggagtctcccgatttaagccatgaagttctagcacgttgttgccaatagtcttcctcttgagcaagtaattcatcaaggatattttcgcttgatttaagctcttcaaagtgggatctgctagtgtccgaagagttgtgaagggcagccaccttttcttgagagattttgattttttttaagcaagtctccaaatttggctctatgccaagattgcaattgaagagagcaatctgcaagatttttccaagatttgggtagatggatttgccgtggttgatttccaattctttaagattatggaggtacaatcttcctcatggagccaaagcttttcaaatctgaatctggatttaaatttttgggctggtgtaatagaatgaggttgtatagtaacctttaataccctatgatccgattgaaaaaagtcaagatgtgaaatggttggaacttgaaattcattcatccaggaggaattgatgaaaccatagtccaaacgttctttcacattagagccgcaaatgttgttgttatgcaaagtaaatctctcaccatcaaagataagttcatgaagtcctcttgcatcaatggtggttctgaaatcatcaatttaagagtcattttttaaagggcccccaaggcattaacggagctgagtctttaagcttcttgaagagttcccaagtaaattttctttgagaaacaacaggggatccataaaaaccagagaagtgacaagaggggccatcaaagcgggccatgtaacaatcaacaaatttccttccataattaataatagttacatttacattcaaattccaaagaaatagcaaaccaccacttagacctactctagggacctctataccattctgaaatttaaaagcattacaaaatttagaaatagatcctaaactaagctttgtttccataatgaaaattacatcaggtttattttgagagatgagcaaacgcagttgtcagaatgcctttggattgctcaaaccttgagcattccaagagatgatattcatggcgattggcgaggctgtacaacagccttcgccgagggagcaccattaccatcagccaacagtgaaatatctgtgatttcagaggaaggatcaggttgttggtgagtagaagtgttggtggagtctgctaggggagtcattctcgttcgacatcgcttcaaaacattacgcacattaccacttgtggaaacatactgtcttttggtaaaaatagaggacattctattttcaatatgtggagttggtgttgagtcaatagcagcagtggagatggtaacagtcgagaagtcaagtggaagagttgtgactatggtggagtttgtggttactggtgcagcagcaattgaaggatgatggttgctatgtattggtggtacatgcacatatgctggaggtgtagcaattgaaagcattacagatgttgttgctgagatcgaagccgaaggggtagtgttgtgaagaagagagtgatgttcagattttttaatagtcgatcgaggagaagaagttgtagcagtcaatttagatgttggcgatatgatccgtttgtcattggaaagtttgtccaagttaatggatgtggaaatgcaagcattggatgaacttccagcaaaattggatggtgtgtactgttggaaattattttac

SEQ ID NO: 295525 - DNA, 4625 bp, Cannabis indica
atccaatacaacatttttttcctcatccgatccaatccagtccaattactaattggattggatcggttttttaattggatatccaattacacacctaaatttcaatattagcttcaaaatataaagaaaaatacgtaaaaaattaagtatcgctttttatttaagtttaatacttcataaatatactattcttacaagtgtattgtagctaaaaattttaaataattaaaacaataacatttctaattaataaaatataacaaaatatcatgaaaataaatacactaaacaatcaagtgttataaattcaacatacaaaaaaaatctaataaacatttattatattttttattatataataattttttaatatatataaatataattggattggatcggtttttaattagattttgagattgacatccaataaccgatccaatccaattagaatccaacttttagcatccaatctaatccaattgtaattggatatttaactttttgtaattgaattggattgaatcggttcgattcaattggatttgattggatatacttatagactaggctaaatataaatgcaaaaattgtgttgcaaacaaattaatatatagagtaaaaatttctaaattatattaattaggtaattgaatcaatagctataacaaaattactagagtaggcaaaatctgtcgcgtacatggtcaatccttacttttctattccatcttgattttggatttgatctctcttcaggtcaacggaagatcatacaagaggaaactggctttacaatatcaaagacaaggctatgaaaatagtggtcaccggcgcgtcaggttacctaggaggtcggttgtgccacgcgctactgcgtcagggtcactccgttcgggccttggtaaggccgaccagcgacctctccttcctgccgccgcacacggatgccgacttagagatcgtctacggtgatgttaccgattactcttcgctcctggcagcattctctgcctgccacgtcgtcttccacgccgccgccatggtcgagccctggcttcccgatccttctaaattcttctcggtgagcacacttccttgttctgattccgataaaatgtaatctacttctgtaactttgttttgaaatttatcttacattgatttaggtcaatataggtggattagagaacgtgttgcgagctgttagagagacgaagacggtggagaaggttgtatatacgtcgtcgtttttcgccctgggaccaaccgatggctatgtagccgacgagaatcaagtacagttacttcagtcatgcatatatagtgtttttatttatttagttatgctttctcttatcaagaactgtgacgatatcaggttcatccagaaaagattttttgcactgagtatgagaaatccaaagctgctgctgataagattgcattacgagctgccttagaggggttcccaatcatagtcgtttatcccggagttctttatggacccggaaaggtcacagctgggaatatagtggctcgcctggtattaatctttgcttcttctttgttttgttttgttttgtgcatattgataaagtgattttgaatttgaattttgaagaattgggaaactgattaagtgtaagatttttactgattaagtacttcacttctgtggaagtggaacaatgtcatgaaattcaccatactgcaacgaaacatgaatgtatattattgattctggtgacttggtttagatggctcttataatgagattaggatttactcatataaggtaggttgatatagttggagttgatattatctgtaccttgaaatgaggaaataaggctcattaaagccctttgaaaattttcaaactcccaacaaacaagaatatgtttgaggtggtacaatagcctttaaaagttatagtcataaccatcaaggaagttatctaaggggtcatcagtgatgtgtgtccaagggagaaaggtatattatgtttgggatgagattaatctcccagaaattgttttctctgggaaaatgtttttgttagaccccaggaattgtaggataatgtgttacagtatcgtcaactaaagtaggtatttgagtcattattgagggtagttattgagtggggaattggtagtgtgtgggtatgcttgaattgagtattcattcactgcatcataggtccgaaaagagcaatattttgttcatttccatttattgtttcatacaatacccgactcttggcttgcttggctaattttcactgttctatcgtctactgttatgagtacagagttcatgagttttactattgttgcacctattagtacattactaaattagaggaaattgtttttgcaacagataatcgaacgttttaatgggcggctacctggttatataggcagtggatttgataaatattccttctcccatatagatgatgtagtagaggggcatatcgcagccatgaacaaaggtcggcttggtgagagatatctactaaccggtgaaaatgcatcattcaagcatgtttttgatatagcagctatcatcactgcaacatcgaggcctaaatttaacattcccctatggctgattgaggcctatggatgggtatcagttcttttctctcggatagtgggaactctaccgctaatcagtcccccggtatgaattatttttattgcaattcccctctgctattttatgatgctgggcattttatgtactgcttgctctgtagctagaaaagaagattacatgttctattatatctaattatgttcgttttttggtcaatattggagacagacagttaatgttttaaggcatcagtgggcatattcctgtgagaaggccaaggtagagttggattacaaccccagaagcttgaaagaagggttggaagaggttctgccatggctgaagaacttaggcttgattaaatactaaaatgagaaaagccatgttttttgtttcctccttgtatattaatgcttataaatgtataataatgcgtaatcatcaagtaacttttcatgtgcatatcatattctgatagtccacaaatttatcccaatcttaattttacttgtaaaagttgtggaaagatttgaagcaagtcctggttttggtgggggagaagtagactcttttcaaaattaatggcacgtgatgatgagaatgcttagagacaacatgtgctggacacttgagaatctgattgtagtagagtgtggttacatttacacttaccacgaaccacgaatgcttcatttatagcaatgcattcgacaaatttgaaggtgggttggaacacatggatttgggggatttacaagtgactacgtgagcaacaaatgcaagcattgacaaattgtaaaagataaaaaacttgaacaaagtaatgtgtaatgaaatttgttggcaagagtatcagcccctagggagcgtactaatcatgaattaggaagtgggtctcttaaggtggtgactattaaagctttctctaagaatgtgttagattgtgctgacccagtgatttgtatggttcacggtgtggagaattctcatttgactgatttgagtccccgttgttgttgaggatgctggttctcgagtgtcttctctttaatgtattcttgtgaaggaagatagttcatttcctccacaggagccatgagaggtgtggcgtggaactgtagagggttgggacaaatctctacagttcttgaactaaagtccctagttcggtcgtgtttacctgacttcatctttttgacagaattaaaagtcgatgtaactccactggtatgtactcttagacaccttcacttttatttcaatatttctattctggctgtggggaatgtggggggtattattttagcctgaaaaaattgtttgtatttgaaagtatcaatatttctcgtaaccaaattcctggtattgtttactctgacccgacctctcacccttgacttctctcttgtgtttatggatccccgtatctccatgcgaaaaagaaattttggacaaaccttatgaaggcaggggatagatttggtggcccttggttgattttgggggatgctaactttgccctcaatgagtctgaacgagaaggatccaaaggaagagacccttttatccccatgatttcggagctggtgaattctcgggctctcataaatttgccaatctaaggagataagttaacttgggacaaccatcgtaatggaagggatcatgtcaaatcaactcttgacaagggcttagttaatggtagttggctcaatctttttttgaaggctgccttgtgctcttttcagactagtaattttgatcactgcccgttgtgtctgtattttggtggtttgggttcaaaatcaaagaggtgttttaaatttttagaaatagacattagagttataatttcttaatttcagagattttattaaactctaagaatattatttaagctaaatatgaattatgtaatttttatgatttttgctcggcaacgacggaaaatgcgacggatggccgtgtcacatgagtaagtattgttagcccaagttatgtttccaagagggggg

SEQ ID NO: 295526 - DNA, 2021 bp, Cannabis indica
aggaatccaggggtcctcccagacattatacccttttgaggtataacacatatataatcagcaataagcaataatccaaatgctacacaaattacatacattcgttatatatcaaacctatgaataaacaattatagcataactaatacttacttttcacattttatgaatcaattatatggaagatgggcaatcaatcatatggaaagaaaaattcaaaactcaattgtatgatcaaacttgatcttaagaagacttctgacacagttaaatgggactttattgaagcaatgttaactgtttttagtttccaagaaagtttgatcagactaattatagtttgtattagaattccacggttttcacttatgtttaatggcacgactcaagattactttgaatgtaagaggggtctaagatagggagatccaatgtcaccattattttttgtcttaggtattgttgacggttggaactcgtcaacgaacttgttggttggaaaatcaaactttacttcaaactcaaaactaagatgaagaaaaagataaaatataaattcaaatatctttctcaaagtagagagaaaatgtaaactttctattactctcaatatggtggctacaagaatgattttccaaccccctctcaaacttgagaatggggtatttataggctctaatggcctgagttacatggtggtcccaaatagacaagttgttgcattcgggctccaaaccacaggtgtaagaggttgtcttgcgcctcgtacctttatatgatgtcaagttgtcccaggtcgcagaggtggtggctactgtgtacccttgaccaggtcgtcagaccttgcaagtgtgctgcttccactacccgtacctccttgttgctctcagagcgtgtaggaggcggggttgttcccttttttccatgcatgccttgtcctttcattcctcctccaattgcattccattcaatgcgtacttgcatttctccttacacatacaacacaacacacacacatgcttgcatgtgagccgccattcatcatgggcttgcacgtgagcccttacacacacacacccacgacacacactcgcacatcacgactcgcatgcgagccccacctaaacaaacacgcacgttacacacacacacacaacgaattacatgcaaaccccccacataggctcgcatgcgagacaccaaccgacgcatgcgcacacgacactcgcacgcacacaacagacacgcacatgcatgcacaactcgcatgcaagccccctacatgagctcgcacacgagcccccaatgcacacacacacacatgcatgcataccacggctcgcatgcgagccccccacatatggttacgtgcgagcccccacacacgcacatacaatgatgcatgcacttacacatgcatctgtgacttggtccctatttgtgacttcacttatttatgccctcactcttttccattctcttatttgtgaatcaccaggcagttggtccttgagtcgcttcgacgcatcccgagaatcatatgtattgatggtgactttaagaaatgcatgccaattgagcttgtcaaatgcgctattgtaagtccattggttattaataaactaacctcgagaattagctgtgctaatttttggggttaacacttaccccacaatctacaagaattcttttaagtgttcttgtcgactgaataagttggggaatttaatttgctgaagtgtgagtcttatgttccttgcgttctttgaggatgttcctgttgggttttacgccctaaataaaactctttacaatctgattagtaatcaatataagaaatttgaagtgattaatgtttgcatgaattttacatgctaatggtttaatatgtttactacattcacacacacaaaatcagttaaatccagatcatatatttattcacaattacagtatcgtcaacacagtagaatgtgattgtgatcatatgaatcaaaaggctaagtccctgtttcatcagt

SEQ ID NO: 295527 - DNA, 5985 bp, Cannabis indica
aaaaaaaaaaaatacaaataaaagcctttgacttcactaaaataactacacataaatgtaaccgtttctagaattttatttttaaattattgttaatttataaaagattccttaatttctaattaaattttagaagatcttcttaattattatttttaaatattttgtttacatttttataattaatatttcaaaattataaaagacaacgtggaagcaaaaattacccctttcctaaaaaaaattaaataccttacatggttattgaatatcaacaaatcttttttttgtttcctttttattttaaaataaaaaaataatatcttttatttataaaaaagtaataatatcttattttaaaattataaaattcaaactctaatcccattagaattataagtatttaattaaatgttaacataactatatatacactcttcctcttcctaagatctattattctacagtacattacacacttaccgtttatataaatttagtaacttaattaataataaagcaaaaaatatcctctttctgaaaatacccaatttcacaaacaaaaaatctctctgaaaaccctagattgaagctctgtagacgaagaagtcgattcaacagctattatggaggctgggatgttgtccgctactgatcaacagagtatggtctcttcgtttttggagatcgccgttggacaatccgccgagactgccaggcaattcttgcaggtttctcttttaatttgtatttatctccattggtcttctgatttatgtaattttggggtttggaagctaatttatggagtttttgattggggaataggctacaagttggaaacttgaggaggctattcagttgttctatataggtaacgaaggtggtggcactgttgggggatcgtcttctcaaattccagctgcggaaaatattgaagctttggctgaacagacttctcggtgtgttagatgcgtcgattttttttttttaatttgtttttatttatgtaattatttatctttgttttatgtatttcgttgtacattattgtttacgctggtttagaatgattcgactcagtgaagccgaaaggaatgtggttgatgaagatgaagttcgcgcccctatacctgtgatcaggggaactctttatgatgatgccttactgtatgggtataaagtttatatctttttcccttttgatttattgtttcatagtaaatatcagaagctcttctttcagttgaactaaattagtttttaattgagatgcaattgcttataaatttttgttttacacgaggcattgttgaaatttgaaggaatctatagttggctaatacattaaacgatcaccttagcacttttacttgtctctaatgtgtagtgtttatagatatactttttttatctcatgttttagcagggacacttgtgtttcatgccaaattttagctgctattttttagagtttgacgagtcttttaatttgattatgcattgtacatttggcattgctcattttatgcaccacttcatttcaactacttatggaatgtgtccttttgatttagggcatcaagaatgagacatcctgaatcaagttcagtacctggtttacgtaattttgatgaggaaatcaaacgccctggggtttgggaaccagagcaaggagttgcatcaacagctgaaaattctcgggataatcttgcctccttgtatcgccctccatatcatataatgtttcagggatcatttgagaaggtaattaattatttttgttggccttattggttcatgatgtaattgtttttggcagttggtttgttgaatgacactaagaatagaggaagttgtattggaatagtcttagtattcttgctaaccttaacttgcagaaaagttcttttgatcttagagaattagtgctttgtctctgttttttgatggatgattttgatgatttccttttaactatcttttaaaaactgctgttggtttatatcacaatgtgtctttatttgggtgcctgagcttttaaatatgtaataatacagttttgctctttgcaatcccttttatattccaagtaatgtataaattacattgtataagtacagtaatattttcaactaaaagggagagtcctcctcatgcatatcgtcttgtttttggtatataaacaaatgaagaaattataggtttcatattctcaatggggaaagatgtctttgaattcttgagcttatgttacacttcgttgaatgaaactagtataccaagggttatctttttaatctgcaattcttatcttattaggagacttatcctttatatgagtgattgaagcctatattaagttaaggattttgagaaagtgagatctttgcattctctttaggctctatggttgaatggtttatgagattatttaaagtctgatcccggctccttataatagttttgtatggtacacatttagttttgggtttcttgttacagtattaccctcaccagccacgagttggtgggacttttatgcatttggagaatttttagtactctttatccctttattttttctttttaattttactgtatttttctttttcttataaactatatattttaaatctagctggaaatggtgctgttgttagttatagagaacaatcatgttaagtgattatgttgtgtttcttaacgtgaaactctgtttgtgctactacaggcaaagggtactgcctcttctcaagacaaatggctcttggtaaacttgcagtctaatacggagttcagctcacataaggtaggtagcgtgtttaactgcactgttttaaattgtctgaaatttctgttcgtttaacacagagactaaatgggatgttcatttgtattttgaagcttaatcgcgatacatggtctaatgaagctgtctctcaaaccatcagtacaaactttgtcttttggcaggtatgtattccatttttggggtttcacgctaaattataaaatattctcgggtgtttggcaaaatagcctttttatttattaaagccactttgcaaaatgactatctattactaattttcatttttgctctgctatgaggatccctcacttctagcagtaagcgttgtgtgtgtgtgtgtgcatcagtagatgcatggtcattgttggactagaattttaaattaacataatacacatatacaagttcgggggcagggatctttatatatttgggttttaagcttttttttttttattgtaatgtggttcatttcaacaatttgacaatggttggtgaacttaggtttacgatgaaacaactgaaggccagaaagtttgcacttattacaagctgaatattatgcctgttatactcgttattgatcctatcactgggcagaaaatgcgctcatgggttggaatggtcgaacctgaacgattgttggaggtaagtggagtttttgctttagttgatcaaacattaatttttatgaaagccctggatttattctacattttaagactttcgcatttgctagaacgtgatgtaatctcttgctgacttgagaaaattctgttcaactataggatttattaacattcatggatagtggtccaaaggaccatcacgtcactttgtcacacaaacgacccagagaaagttcttcggcccagccacaaaaaactaaaggtatgtgatgattaatttacagacaaacctcttatttgcagatattcagttttaagttgaatgataaaactaaagttcttttatcgctagtagttgcagacaaaagtaatgaatacgaagaagtggcgcgagcattggccgcttccatggaaagtataaaggagaccagtgaagtgattcccaaggataaacatgtgaatctcactgaagaagatgagaagacatgcttggaaaacaagcctgattatccacctttgccagaagaacccaagggcgataaaagccttctatgtacggttggatttcgtcttccagatgggcgcagggtgcggcggagtttccttcgtacagacccagttcaggtgagaatactttttgcgctaaattatcgctctcttctactgtaaatatttaaattttgctttatagaatgaatggattctcactattgccatatatacatctatctgtgttgcagctgctatggtcattctgttgttctcaactaaaggaagccgaaacaaggccatttcgattggcacagccgataccgggagcttccaagagtttggattatgacacagagatgacatttggagagtctgggcttgccagctctatgatatctgttacatgggaatagattatcgacatatttaagtataagttgttctggctgttttgggtgcgacaagaattttgtattgtcgtttctttttaccaatattttcatcacttaagtgtttgtctttttatttataccggttagttatgtacatactcaaacggcagattcttcaattatctatcttcatttattactctttttatttctgttaaatatttaagttgtttgatcaccttggttttgcctataactggttttgctttgtttttttttattgaacaaaaaagtcaagcactgagtgaacaatatcaccatttttattaataagatactaaagtggatgattgactcattcgctgaaactattttatagaagctcattgatatttttgaaataaataaaatgacataataattatatttaaataataaatattattttagaattactataaatgtgatgcataaacacagataggtaaaatatataaaatcttgtttaagttatttcacgataaaattctgacaattgattgtcgcttaagagtcggtatcgagtcaatttcattgagtctatgagacaattctcatctttattattttgaaatctaaatatctcatattttcttttcaaaatatagttaacaactaaccactatgaagcaaaatattatttatccaattactaaaatcctattatgtggtcatgacttggtagctactacatgtaatataaattttacaaatcactcacacatgagcaatgggataaatacatacacacaacaagtttcttttttattagtgttaagttaactcagaattttattagcataaatgaaacttgataattaatacttagagtaaaataattaaagtaaataaagataagagtttttatgtagttcgatagttaaaatttatttagtccaagagttagttttatttcagagtatttctgtgtaagagttttgataggaattcagtatacaaagtttgtcgtctcttccatattattttcaccactattgatcgaagtaagacaacagttagtagttactcaatcttatctaagtagtagttacacatcgttggcttcatccgtacattctgtctattaacatatatgcgagaaatataaataattgtttgtgttttaaaaatacaaataaactgttgtttgacttagttaatacatgttgaaatcgagcaaaaattcttcatcttcttctaagacaacttatcgaaagaattataaatcgagtcgagcttttcaagaatagacttgacaaccgaatcaggattagtcattctcgacctaagcaagacatatggttactcttttccttgaaaaaggcgtctcgagcatagtatgatttccaaaactttttttaataaagaaaagttctcggcggaaaaaagatttctttgtggaagacaatcttaagcaaccctttatcttgattttctttgttagttgatcaaattctgactaattataattttactaatattttttaaagtgttctttaaaggttattatatgacttagttttttgttatgcatgagataagttttacttatttgttatttattattttatatgaaaaaccgtgtttttgcaaatgtcagttgtatataagaaaatat

SEQ ID NO: 295528 - DNA, 3888 bp, Cannabis indica
ccatattttgaaaatagcccaaataaaaatgctttctagtttgggctatagacacccaggccagtaggccactcatcaggccccaaacctaactaacagctaacaacactcagcctcactcacatcctcacctcacgccgcttgctcctccctagtctctctcactctaccaatgagctcacgcctgaaagtaaaactgtaaaaaccagcgattgatagtttgaactttgaaccgtgactggctggcagtggctcccaggcggaacctccactctctctgccacaggcggacgctcgcgggttctctggttcgccggaggtacctccttgcttttcctctctctcatctttactgttgctgttcgcatttctgaaattttgtgaaccacgaacttgtctcagttggtctcttgagtctcacttttttttttttcctttgctgctggacgattcccaggcaaggccggaggcgcgcaccactttgtagtttgttatcattaagaacaattttaatagtataagactcttatttttagacattggatgactttgcttaatacgtttgaatttgattatgtcttcaacacacacaaaggctcttttatacgattttgacattatcatctatctccaggctgggttaggtttgtcctttcaaattttaagttttccagatagcgagtcggcatacttcatagtacacatatatttgtaaaaagtttgatggtaaaaagaaattgaggtttggccatgtttctgggttgtggggtttgtttgcttaaattgtctagaatctaactaaattaaaccatattattaattgcatatttccaatttattacgtttgaaggtttaggtatttggattgtggcaacttggtgagggaacatgaagacaatgtcagcgattacccaatcccagctcctccaaactataacaactatcctcacctccagcaacactccacggttccatgcccttaacgcgtacattccccatcttacagagagcctgctgatctcaatcttctcatccaaatctctgaattcccaaccaaccaccctcctttccttttttcagtggtcacaaactcacactccctccctcactcaatctccagccctactcctcactcttgttccatctctccttcgccacaataagttctctgatgtgaagtcccttcttgtctcgtttattgcctctgataggcaaaacaagctccaccaagccctcctccatcctgatcacacccttcctagaccttctagagcacttcttgatacttctattggtgcatatattgagtccgggaaacctcacctcgctgttcaaattttcaacaagatgaagcgacaccaatttcgtcccaatttgcttacttgtaacacacttctcaatgcgctggtaagattcccttctacacatacgatttcgatgtctcagggaatttttaaggatatgattaagttaggggttagccctaatgtgaatacttttaatattttgatgcgcggttattgttttgagaacaagttcaaggatgcttttgagctgttgagtaaaatgagtgagtttaattgtttgcctgataatgttagttacaatacattattggatgcactgtgtaagaagggacaattgacagaggctcgaaacttgttgttggacatgaaaaatagaagactaatgccgaataggaacacatataatgtcttagtttgtgggtattgtaagttgggttggttaaaagaggcagcaaagatcattgagttgatgacacaaaataatttgttgcctgatatctggacttacaatatgttgattagtgggttttgtaaggaaggcagaattgaagaggcttttaggcttcgtgatgagatggaacggttgaaattgttgcctgatgtgatcacttataacacattgatcaatgggtgttttgacattgggaatagtacagaggcatttaagttgattgatgaaatgaatgaaaagggactgaaacaaaatgaagtcactcacaatatattggtgaagtggttttgcaaggaaggcaatatggatgaagcgtgtgatactgtacagaaaatggaagaaagtggaacttctcctgattgtgttacttacaatactttaattaacgggttttgcaaagcagggaaaatagatgaagcatttaggatgatgggtgagatgaataggaaaggtctcaagatggacacttttactctcaatactgttctacgtatgctgtgtgtcgaaaataagcttgatgaggcatataagttgcttaacagtgcgagtaggcgaggttatattgtcgatgaggtcagttttggaacattgatgatgggttacatcaagaatgaaaaagtggacagagctttggagctttgggatgaaatgaaggagaagcaggctatccccagtattatcacctataacagtattataggaggtctatgccagtctagaaaaactgataaagcaatagataagttaaatgaattcttagagagtggtctagttccggatgaaacaacatacaacactatcattcatggttactgccaggagggcgaagtggagaaagcatttcaattccacaacaagatggttgagaaatcattcaaacctgatgtgtttacatgtaatattcttcttaatggactttgtagagagggtatgcttgaaaaggctttgaggcttttcaacacgtggatttcaaaaggaaaacatattgatgttgttacttacaatacattgatagcgagtttgtgtaaggaaggtagatttagcgatgcatttgatcttcttgtagacatggaaaagaagaaattagtgcctgatcattatacttacaatgcaattctcagtggacttactgatgccgatagaattaaggaggctgaagagtatttgtccaaaatgatagagagtggaaaattacctgagcatttcttacaaatgactaaggaacaagacattgtgacccaagaattatctgtggagtctgattcaatatctgttggttatacggaaaagatcaaccaactttgttctgaagggaaatacaaggatgccatgcacgcctttgatgaatctaaaaagaaaggagttgctctaaataaatcggtttatatgaacctgatcaatgggctaatcaagaggcgtaaaagcttatctcggtctgtcatgttgtagtagaccatgatcgttttttgcagtgtcatccactttgttctactcaaaattgtcagatggaccataataaacatttggtgtacttaaaagtggcatctcgaccatactcaacaattctaggtacaatctttatttatttaaaagaaaaaggaatttgaattgtaacatatggttcggtggttgtaacctgattgttttttttttccttcaaagaattgttatggcactcgaggcaaatcaacctataatattttctttttttttcctttttttgtaaaaattcatgtgtttagaatctatactggtaagctctttgtaagttgactgtttttttttttttttttttttgtactatattgatgccaacttctgtttacttccgtgacaactttgtttttgtgactatgaaagtaattaaagatatatttcttgcagagaagattagattactgatgtttgtggcaacgttatatctcataacaaagtgtcacacttttcattcatctcatcacttatagtattaacttttaaactttaactcctagaatatttggggactttgcaggtaattggtagctaatatcacagtaatatcagtccattacaggatctccattttacctaacttcgggtatgagtcgatttaaatgtctgaatctctttcatccaaattttatttag

SEQ ID NO: 295529 - DNA, 4054 bp, Cannabis indica
taattatttggaaactaaaaaaactagagtattgtatcaaatatcatacaatttaagaacaaaaattttcttagttaaatagataatgtaaattaaacttttataaatttactcaaattatttgtgctactagtatggtaatgagttatattaagaaactcgtattacgttatgaacaaaaagaagacgatacaaaaataaagctactttgtcaaatttcccgcctctaaaagctttgaccggatcattttcgtatttgtacataccaagagactcgaacctcagggatcttgtgagagcaaaccacatgttattaaacgagagcttaagcaccgctactcgagcaatggtaccttagagttcaagaaacacactatttattgtcttgagcaattccatttcttccaatgtagcaactccaggttcaacatagcacaactgaaaaaagaaaacaataatcacatcaacaatagtcctaacaaaatataataaaccattcagaagtagtgtctgatcaatcataaacctgatactgtggtttctttagtgtatgaacccctctttttataagtctctgccatccaacttttcgtttaagagatttttccaaggctgctgttctctgtaataatgtagcagaagaatcgaaacaaggttaaaaaccgcaatgtcaaacacaggtcgaaaaaacacctcttaaatccatctataaaatatttacaagttgacatttcaagttgcatgaataggtgacaatgacattacatgagctgggtccaagatcaagagattgtgctgcttgactccgttgcgttgatgtttgatttgaattccaacaatggttcttgaatgcccatcatgttgaaaatacaagggcctgttcataaaaatcgttctcaaaatgttagaacacaatcaaataatagcgcgaaattcagaagctgtggtttaagctgctcaaagagcttgacattcaatggtgtatgcctcgattttgtactcagttgttcgagtgtaaattgaaggaaggtaggaggacatcaacattgtggatagcagccattcttgctatcttttccggtgatatggcttgaaaggaacaacagtaagaaaggctatgagagaaggttaaatttcgggcgatatactttctagaccttagcaattccattactcggggagtttaccaaattttttgaataactctaataaactagctttcatagttctttcaaggactgaattgtgctatatggcttgaaaggaacggctgtaagaaaggatatgaatgaagattaaatttcgggttgcaaattgggtaaatgaaaagtcaagtgttttgagggactatactttctagaccttagtagagaatggttaaattgtttgttttttggctttggagatgctctgagatcaattctgatctctattcatttgtatatttcacatattaacacaaagttgtttcttttaaaaagaacataacaatgcaaaattcaagaaaactaatgaaaacactgacaaacacaatcaaaaagataaagacttacgctttctcactaacaattacacgaccattaccgggtttattcgagtcagaaaagtaattccagatccaatcaacaagaacctgctgaccctcatttttattagtaatatcactagaagaacaagacttctcctgcacattagaatctgcttgagaagaagaacagtgattctttttcactacaaatctatccattggtccataaacttgaatccctctcctcttaactccattaccttcactcttcccttctaccccggtacttgaacccggtacacttagataaagagactcaagctccttaggaccgaaatccacaatcattgctctaagtccaaaagatcttaaaagggtagcacattcagtagttccaatccatttttccaaaccataaatcttcccattaaaatgttctgatccaggctgatcaaaacccttttcccaagcaatctcaagccatctttggagtgatgggatatcaggaatgaaccctttcccaccaaacaaaacaccctttacttcttcttgtctttgatgaaacaaatgagaactcaacatctgaatatttcgccacccgcatccccaaccaacatcctcacactcaaggctctcaaaatgatcaacataaccagataaaacacttatagtattatcggattctgattccaaacactttctcaacaatgccattaaaccaccaccttcaaccttatgaaatatgcttctggattgcaaattaatcaagcaatttaccttttcatcaaaacccagttcaattggaaggtcacttatcacttgggatttctacaaacagtatcaaaacacaaaaaaatatgaccaacagaaagattgatctaaagacatgaaacatagaaaataaaaattcaagctttgatttttgagattaaagcttctggattgagaattaatcaagcaattgatcaaaaccaattgaaatggaaggtcactggttacttggctattctacaaacagtatcaaaacacaaaatatgaacaacagaaagattgaactgaagacatgaagaaaaaaaataaaaaattcaagctttgacttttgagattaaagcttttggattgaaaattgatcaagcaattcactttttcatcaaaacccagttcaaatggaaggtcactgattcttggcatttctacaaacagtatcaaaacaccaaaatatgaacaacagaaagattgaaataaagaaataaagaatataaaaataaaaattcaagctttgatttttatgattaaagctttaggattgaaaattaatcaagcaattcacttatcaaaacccagttcaataggaaggtcactgattacttggcatttctacaaacagtatcaaaacaaaaaataaataaatatgaacaactgaaagattgaactgaagacatggaaaatataaaataaaaaatcaagctttttgattttttgagattaccagaggaagaggtgaaggaggggccaaagcaatttgttgggccaactccaaatcattttccaatcgttgctgttcatggtcatcaagaaaatgattgttggcatgcctgaaaatgcatatgtacaaccaccattacatgcataatatataaaaggaattttactttaatatatataaatatatacataaataccgttcgagttctgaagatggaaaacgaagatggcagaaagggcatgggaggagatccattgcttcttcttttacagcttcatcgcatttattgttatacaatttcagttaaagattgaaccttttgattatgatgatgaagatgaagatgactgttgagaatcaaatattcagacacagcgcttcaaaaaaaaaaaaaaaaaaaataacgtttgctttagaagaagatataaaacgacataatatgataaaaacgacataatccgagaaaaacgacaagatctgataaaaacgacatgaatcgagaaaatcgacaatactttctgaaaatgaaatgctagaacagaaagaacgaacaaacgacaaatatgacataacgacgacactaaattagtaaaacgacaataaaaaacagtaaacgacatgtatataagatggtttttttttgagataatatataagatggtttgaaagaaaagaaaaatgttgaactgatgaagaacaacaaaacgattacaaataagaatgaaacttttggggtaggttagatctacaaccgatatggaaaccaagcatttcgcgatttaaaaatgtagaatctcatctatatacagataatgaagaactataaagctatgctatcaaagtcacttattaatttagtataatttttcaaacaaattttcaaaattagcacactcttgcaagatctcaaccctttaagccattgtagcacgttgcccaaaacataatggttaggtttggaaaaattgtctttttaattattaataaataattatacataaaaaaccaaaaggttaaattggaggcgtttggttgggagg

SEQ ID NO: 295530 - DNA, 3645 bp, Cannabis indica
atgtgtgatctggatcaccgcgtcaaaaaaaaaaataattcagtatttagaatatttctattttttttaacaaatattgtatctatatttaatttaacaactttatttggtaggtacacaattcttcttaatatgcaatctgccccagctacccgtagacggtctcggtttagatttgagaaaatgtggcttcatgatcaagacagtgttgatattatctctaattgttggtctcagaattctaggggagatgttatctcagattttttgggtaaattgaagacttgtgcggatcaactacagacctggcatgttcataaatatggtaaattgaagactgatatttcccaagcccaaaagaaggttcataatcttcattcgccccctgctagacagcagtctcttcaccattctgatatgaatctgcagcacagtccacaaaataatattcaacaggccgaaaatattttggatgatcttcttgctaaggaggagctttattggcaacaacgttcttggattgactggttaaaagagggagatcgcaataccaaatttttccatgctaaagccaaagcgcggaatgttaataataatattacttcgttggtggatgatcatggtcacactgtcacttctagggagggtattgctgatatcatttatacttatttcactaccatttttactgctcaagaggaggatcactgggctctctctcatgtcctctcaactatccccactactgttcaggattctcataatgaatatttgtcaaaggagttcactgaggctgatgttctttcggctttaaaaacaatgggatcggatagaagccctgggatagatggcatgtcagctatattttaccaacaccattggcatatcgtgggtgaatctgtgtcgaaagtggttctacatgttcttaacgaaggaggtaacccagctgcttttaataagacattattaacgctcattcctaaggtcaaaaaaccaagatcgatgaaagactttcggcctatcagcctatgtaatgttatctataaactcatctctaagatgcttgcccttcggcttaaggatatccttccagtggttatctctgaaactcaaagtgccttccttcctggtcggttgatcactgacaatgtcctcgttgcttttgaaatgattcatggtattaaacatcggaagaaaggtagaaaagggtatgctgctctgaagttagatatgagtaaggcctttgatagagtggaatggtcgtttcttgctgcttttatgggtaagatgggctttaatattcgccggatttctctcattatgacatgtctccacacgaacaccttcagttttcttcttaatgggactgttatggggtctatatctccacaacgaggcttgcgacaaggggatcccttatcaccttactttttttttaatttgttctgagggtctctcaaggctgctacaatatgaagaaagcatagggaggttaaagggatttgctgtggctcgccgagctccttctattactcatttttttttgctgatgatagtctcctattttgccaagcggatgttcggtcatgtggagctattaagagagctttggatatttatcatcgagcctcgggaaaacaacttaatttagacaaatctatattgtctttctcccctaatacccctgctgccgtcaaggactctttccaacatattcttgggattccgattagtgaatgccatgagaaatatttggggctgcctgcttattcggaaagagataagaaacaaatgtttagcgagattaaggaacgtatttggaagcttatgaaaggttggaatgataaacttttctccattggaggtaaggaagttcttctcaaagcggttgtccaatctatccccacatatgttatgagttgctttaagcttccttctactttctgcaatcaacttgaacaaatgatggctcagttttggtggggttctactacagataaaaagaagactcattggaggaaatggcgctttctttgtaagtcgaaaactcaaggtggcatgggttttcgttcttttgtgcattttaatcaagctttattggcaaaataagcttggcgattgcttgaattccccaattctttgcttagccatgttctaaagggaagatatttttctcataatgactttttgagtgcgaggaaagggggtttgtcttctcttacttggcaaggcatttgttggggctgtgagcttctttcgaaaggattgagaatgaaagtgggggatggctctgatattcgctgtgctgttgacccttggatacctcgtaatgctgattttgctcctctacatttgtcgagttgtgaggatacctgtgtttccacttatattactcctcacaggacttggaatatccctctgttgcagcaacatttatctcctgctgatattgattatatacttactattcctctttctttttccaatttaaaagataggtggatttggcattacaccagttcgggagaatatcttgttcaatcggggtatcacttggcaagttctctggaagatcaacatcaaccttgtagttcttccaatcaagcatcatggtggaagtttttatggaacttaaaacttccctctaaagtgaaattttttgcttggagactgtgtcagaatgctcttcctgtggcttcggcactgtttcagcgaaagattattgattcggcggcttgtagtaaatgttcccatgcttgggagtcggtggggcatgcactttttagttgcaaatctgccaaatctgtttggaaggaggctaaattttgtattgattttcaggctgctgaccggcttaataaaggtgattatcttgctcatctttctgctaacacctctcattctgagtttgaacagattctttgtacgctgtggttcacttggaatgatcgtaacaatgttatccatggaaaaaatgctcagaagccgactgaaatatgggctaaggctgctgcctactgctgcaatttccagcagcaccttgctcgacaaaactcatctgtcatggctgccccgactgttgcctctcctacccgttggcagcccccaccattgcagactactaaattaaatattgatgctgcctatgatgctttgaaccataagattggtgttggtactattgtaaggaattctcagggtcaagttcttgttgcgctttctatgccccttatgggaaagtttcggccccaagagatggaagctaaagccttgattttcggactacgatgggctcataatcataacattgccttgaatttcattgaaacagattcgttaattttggcaaatgctattaattgtccttcaccatctttatctccttttcatgattggcgattgacattaacaatcttatatcctctctcccttctgtttgcgtgtctcatgttcgtagagatgcgaaccaagctgctcatggcttggctaagcaagcattagtgttggatagtgattgtatgtggtttgaagagatcccttcaactattttttctactgttgtaaatgactttctctaatttataatagtggatccttttctcaaaaaaaaaaaaagtaagtattaatttatatttattattttaa

SEQ ID NO: 295531 - DNA, 2827 bp, Cannabis indica
aaaaaaaaaaaaaattataagcttgatctaattatcgtaaaataaaaatatatatacacacagaaataattaaaaaaaaaaactattttcaaggcaaccaagtatattaatctaaaatatgtagacttgtaccttggcatgacctatatgcaaatagccatttggttcaggaggaaagcgagtcaaaactttccctcctgtcactttcaagtgtttttcaagcagctccttggtattgcaacatctgagaatggagccatcactaaagaaaacttcagtgtgcacctgataatgacagcaaaattgtacacatgttggaaagaagaacaaattgttcagcaaagaaacagataaaatatccataactactttcatgccaaaaaattacattcatagacaagatgaaggcatcagttaaagctaatttcaaatatgtcaacaaaaactcagaatatcatgtgcatgaatatgttctaaactagaaaaaaacgaaactagcattgatgtgaaataggaaaaccgaatcaaaaatgcagatccaaatgtaagtcaatctaataagaccctgctgctaatctctcaaaccagtaaccaatataataacaagaaccagcaatagtagcaatagaacagtagcaaattggtaggcgaacagtaggaaaattatattgaatataagagagaaccaattacaaactatgggagcccttaggcccctttgatgcaaatagagattcactcaatacattgcatacccattctattctcttactcacctatatatagcaatttcttactcaaaactaccctccccaaataaagactcaaataccctttttttatttaccatatgctagtacaccctaccaattctaaggcctaacacaatcaaattttaatcatctaaatagacggaaactaggctgcaaattttcaaacaaatatccacctgtgtcaagttttgttgaccatgaacattctagtctgaaatatcgaattcaacatagattttctacagaatattctataaattttctatagaattcaacataaaaaaatgactatcttcttaaaagaaagactgtaaaacataccttaaagttttcctctggttgaggaaaaatcaaaaatggattactgtcttcttcagatggttctggcgtagaaacaataatctttttctcctagacatgtgtatacaaagagagcaattaataaaatcacaaaaggtagttgagataaagaaaaaaggaaacatatataattaattagcacacctctgcttttaggatttttttctttcttctttttaggaaccttttcatcatctgcagcagtcctttcaccaagtaattcatatagttttgcatcaatgagtttctatgacaaaaagaaaagcataaaaaacacttttaataaaaaaaaaatatgtaacattttaataggatttgtatataagcaaaataaaatatcaccttcacaatttttggatcagcccatggctgcctcttccgaacatttgcgaataaatcacccactatagaaagcaacagatgtgaaaatttgatacaatacaatgtatacaattataacatgaaaaatagaccaaataggaaaattaccgtttgttcgatacctttgctccaaaatgacacccttactctcttcaaacacctcatttacggttctttcaatttcttcagctgaaacctcgacacctaattgaacacaaaaaagctccagccacatgagaaacacagacgaaacacatgatacaattacacaatataaaaatgcaatccaatgttttatacctacaccacatgccacttcaaaatcttccaacttaaaatcttcagagccaatgtttgtaagaaataaaaatgcagcttctaattgagctggagttttaatctgcgtttaccaacaaagtaaaaataaacaaaatgaaaagctcacaatcagacgatttaatgtagtttctatgtgtgaacccacctttgatgaaacaacatattttaaaaatgtcgggcgatgaacaagagcattggcagggtacttggtggaaacctgttacaaattcttatgattatcaaataacatcctacttcataaataaattcaaagtgaacttgacaagatattaagtgctttacaacttgcttgaatacacttttgttttctgcttttcaatcttaaatgaaataaatcagacatgtccctaataacatcataactgtttcagtttacaataaaaaaacaaatgtaataaagctaatgtagttataaacaagtgttaccgtgtacaaagaaattgccaatagtccgatcacatccctcagttacatcaaatccacaaaaataattaaacaaaaaaaaagaaaacggaaacttgagaagtgaaagtatgaagttatctatataccatacacataactatagatttacatatataaataaagacctcgtgaatgacagtaacaagactggtagtgacttttgcattagcaagggtgttttttgcagtcctttcatccaattgaatacgcagaaagaggtccaaaatcttctccttgtccaaagaagagctatctttagtcgttggcggcatctcttacaacatacatgaatttaatggttattattattttacagaaattcatagaactttaattaatttttttaaaaaaaattacaaacacaacaatttgtatagctaaaaacctagaatcggcagtgggggctgtgaagcagcaatggcaattggacaaagaaagatgagtaagagaaagagaaagagaaaactagtaaaatcagactaaagaaa

SEQ ID NO: 295532 - DNA, 2945 bp, Cannabis indica
tagtcttctcagatatataaacctcgatttcatgcaaatttttttactctcgtgataaattaaacatgtacaaggtttttgactgattaccaaatacatttttatcatagcttttttaaaaaatagcttttacttagagatgattctcactgctttccttacagatgtagatggagatgaaacatggatcaaacgggctgctaataccttgaaaattaatgttgatgttgctatttttttgagaatggaacttatagcttcgcgggggtagttagtgacgaaactggtgcgttggtggaggcgtttagctgctgtcgttcaggactgctgcagcccgaaatggtggaggccttgggtgttaaggaggcgctgagttggattaaggcaaagaagtggaatgaggttgtcattgaaactgatagtcttacagtggtgcaagcgttacatagttctcttcctatggtttcatactctggaagtgttatttcagattgtaaaataatgttaaatgatttgagagatgtttgtgtcaattttattagacgttctgcaaatagtgttgctcacttcttagctcgagcatcctatttagttgttaatcgtgttattaggagtagtgatattactccaaattttaatcatgtaatcactatggattgcaattaataaaaatgataattttttttttaaaaaataacgtttagtttttctaaaagctgtgtcaaacgggccagtcccctactaaaacttcatcatgccaagggtattattggaaagataaaagcatatataatagtcaaaatttccaagccataaaagccctaacttaagaagagcggcgacgagaaaaagacagggacaaacaatgggagtagagaaggaaattcttaggcctggaactggacccaagcccgtacctggtcgcaaggtcactgttcactgcactggttatggttagcccctaatttctttcatatccattacttcattaattgatcgatgttatgcttatggggcttgatatgcatttttcattttctttaggcaaaaatggtgatctctcccagaagttttggaggtaagaagtggttttgttttggatgtttattatttttttggggaaaattgaactaattttagttttaattggttttcttagcactaaagatcctgggcaggagccttttgcatttacaattggccaaggttctgttataaaaggtaaacaaataattaataaataaattagtttacttgttttggctatggtatactcagtgttacaagaatgaaaaatgatattgtgtgtttgctataatttttagtactggaaaatggaaatggattagttttgaaaatcattatgtcgtttgatattcttaagttggtttggtaaatcttggatttttgaattggtttttttctgtctaggatttttttgtggatgtgaaaagtttagatatccttcccttttattctaattctcttctttgctgacaattgcaggatgggatgaaggtgttcttggaatgcaagtgggagaagttgctcgcctgcgggtaatatatcaatttttatgataactgtatctatgttttatgatgtgctaagcacaaaataatatagattagaagtgattttaagtgaaatagttgtgccagaaagtagatggatattggagtgttttgataaataaaaaagaattagtaaaataggaaatcttttgggaggaaatatgtttcgagttttgacagacttaaacaattttcttggtttcagaaaatatgattccacattttctattcagtagataaagtggcccatggaaatagtttctaatcatgcagctgacttgtgtggtctgcactgcattagcaggagtctaggagatcttgcaatctcttagtaaagaacacatccgtagaagtcacgtactcaattttttatgttttgtacatgtcttgttacacttgtatatgtttctaaatttggttaagtgtatctagcatatccctgcttttgcttcttgactcgaatatattcatgaaattagcagaactcaattccctctagtgctccacaaagcatgatcgattttgattttgattttagttttgattcattcctctttctgcttccatatttcaagtttgtaaggatgtacaaagtgctgccattaaaccccccttagctttgctttttcttcaatttgattttgcattgaaaattcattattgtaagaatgagctttcttgcatcttatgttttctttgatgggattgcagtgcactccggattatgcttatggtccaagtggatttcctgcatggggaatacaaccaaattcttctttggttttcgagatcgaagtcctcaaggtggagtgaaatttggacagtaaaaagctatgcagaacaacttattgtgttcttgccaaacgtatctaaattattattatgtgatacgaataataatatatttggaggcttgcttgatgagtacttataagtcaacccttctcctttgagtaaatgtattctcactattttctcatctttactgcagactgaatttgttccttaaaagcagtcttattgtgtggtgttgtagttgggatacatgatttgattgaggaaactatgcttacttgacacccaaatatctaaactctatgcttctattgtacaacacatgttttctatatttttggaatttagaatgataaaaacatctcaaaaattaaagaaatatatgagttcctaaaatattgcacacttcaaagaaatgtattttttttttcttctaaataatgattggcttaaaagtaaaggtggggtcgagcagtggtgttctagaacaaactaaaaccaagtttttggatgtttaggagtaagcaaaatcatagattgctcgaagaaaatggaaaacacataaattatgtttgg

SEQ ID NO: 295533 - DNA, 4926 bp, Cannabis indica
gtatttggagtgagtgttgtaatctattgtatctatttttgtatagcttagcttagctaagtacttatacgtactttacttactttaactaaaagttaggtaagtaagaaaaaacaaaacataacccatgacccatcaatctactttaatactatctttgtatattgtcgttttttttttcgaggggtggagccttgtgtgggttttccttctttctttttcttttcactttgtaaaattaagttaagggcactagtgctaattattccttctctgcattttttctgtttactggttcccctgatgcttgacaccagagttcacactcaatcatttttgggcactcgtggccttaaaatttactagataaaaagatggggttttcaagagatggaaatgggaagtagggggtagtaactcagttgtcggcaagttctcttctttctcttcttttttagctgtttttggttttggattatttgggttgtgtagtgttaattttttttcttttttctttttaactctttgttaattggtttttgtttgtctctgagtttatctctagtttagattgatggaatagtatcttttgtttgtgctttttgcattgctttttcagttgaagcaaagttgagatttttagctggtataatatgagttgttgtgggcatttcttgttttaaaggattgaactttttgagtttatggtacacaggatcagtctcaaaagcacacttagtttttccctttattatttcattaaggatatataataagattggtggaaggtgaggttcagctttagttgcagctttgccctaaattttcttattcttattctaattcttcttctgttatacctagagagaagagaagtttagtattctcaaaagggtcagactggttttcttttattgttctaaatgttggatcttgtttgaagaaagttatagcctttagttaaaaaaatggctgaaattaggcttacaagggtagaacaaggtcatactaagattagaaatgtcccaattgcagtaaccccagaaggtttctggtgttgcccttctcctgttgtgtttcaaaagactatcaaaactcaaaataccttaaacaaacccaaaccctcttcacctcctcacaagatcaatccccatagaaaacaaaacccaatgtctgaaagaaaaataccctttacaccatcaaggtcagcagctatttctgatggtcaaagaattctcaaccctgagatagtaactgagggacctgttcttacttcatctgttgttacagagagaccccctaaaccaaaagttgatactttgccaaggaaggtagctattgagtttggtgaggctggaactagtgatatgaaggtggttttattgggaaagcaaggattttgtgtgaagttgagtgttcacaaaaatgttcttgtggagtttagtactttctttgctgataaactctctgaagaacaatccagtttgtcaagtcttgagattaatgattgtgaagatattgaaatctatgttgagactgttgggctgatgtattgtaaagaaatgaagcaacggttgatcaagcaaagtgtctctcgtgtacttcgtattctcaaggtataatcaatttcattgttatttttcagtactctaattttgttaatatcttgctagaaatcttataagaagtttaatgaacttattcaacattacaaatgtctgaattgcttgaacttatattatatggatcattatttactatgtaaggcattgttggtcatagataattatgttgctattagtcatcatcaagtgcagaatatgttactatttgatatttgtaccaatcaagttttctttgcaatgctttatagtcaataggtgactttttattgaagcaaaattgtatgaccaccttactttactcttctattagccttgtcacaactgattggtattcattggtgatgattccacttttctttttggttttctttatgattattactaaccatcattgcttgctcactcaatgaaattgaatatttcaactacatttttctttatcccgggttaagctttgtcgattagattagtatgttaatacaaccgatctaacccgagatgcaataatttcaggttgcagaacaacttgggttcaactcatgcatccattcatgtttagagtacttagaagcagtgccatgggttggggaagaagaagaagagaaagttgtctcgtcggttctaagactccaaggtgagggtataggggtatccccagtgttgaaaagagtctcttctgaaatttcaaagccctcaaaagacacacttgttcaaatcattgaacttgttctcaaaagcaacgatgagagaagccggcgtgaaatgaagtctgtagtcctgaaactcctcaaggaaaatagtgggctcccaagctatgcaggctctgctgacatttgcaatgaaacaatttatggttcatgccaaagttgctttgattcactactgtctctgttcaagcaggctgcagaccccgagttttctgataagcaaatggaaactagagaacccgtggtgaagcaaatagctttagaatctgataatctgtcatggttacttgagatcttagccgataggcaagcagcagatgaatttgcagtaatatgggcaagtcagcaagaattggcaaccttacacgaaaagctccctattgtgtctcgctaccatgccagctgcattacagcgagactatttgttggcattggaagaggagagctactaccatcaaaagatactcgccaattgttgttgcagacatggttgcagccgttgatcaacgactacagctggttgcaacacgggtgcaggtcatttgatcggaaggttgtggaagaaggaattggtaggacaatcttgactttaccattagaggaacagcaaagtattatgctttcatggttaagtagtttccttaaagctggtgataactgtcctaatcttcaaagggccttcgaagtttggtggcgaaggacattcgttagaccctatgtcgaaacacaagatagtagtaactcgtttcaaacagataactaaaagaagttaatctaaatgagtttgagagtgatgaaataattatgttttgtaaatctaatgttggctggctactcaaattatcagggtgaaaaggacatattatacatatatggtggcttgagttgaagataaaacactcttgtgttcattgggaaaaagctcatttgggttgattgatttgatttgttggtttatgtaaaattagtgaaaaagagtaatctttatggttttgttttctcattgggtatgaatgtgtcattgtggataatatatataaatgctttggataatgtatttgtgtacttatctatacttatgactatatcaggagtctattatgttctgcaaatattacatttttcatttggaaacatgatgaacaagaagaaagtagcaaaattgggcttgaagctttcctaaaagccattatttcatcattggaatttagatttttagaggggaaagaaataaaggagaggattaataaatcttacagcatttatcccacaatatatatcttctaaaaataaaaataaattaatgagttatgaaatatcaagaaaaatttgtttcatagaatttgagttccaaacaaaatctaatctaaatattgaatgtttatgtgatgaagatattttaattagtttacttttggaataatgatatttttgggcaatttattttacatatcactttatatatgtgtaacaaaatatgcacaaaacaacatttttcaatcaagagcacttaatttagctcagtgaaggtgagagatggttttttttttttgctaaatgaatatggtatgatatttttgcaagatgaatattcatttacaaaatttatgattcaatttgcactaaatgaatatggtattggtatggtatatttgcactctattaagatccaatatctctcaacttgacttagcttatctaaaagatgtttttttttttttttagtttgcttgaaaatttatggtatttttaaaattcatttagcaaataattgataactttccaaaaaccttagtgttgcatatataagtaaatcaccaaattaaccagtgtaattataattaactcataaaattaaagctaagctaagtaaagttgaaagatattggatattttatgtgaaattaagtaagtcctgaatatattaatactagcttttggacaagcaatgggtagcactcagaagtacgcaaaattggacagatttgttgataaaacgaaatgtgaagaattagcttgaaatttagaggccataaatgactaccaaactagtcaattaatatagatatatttggttacaaatatgtaataggaaacctagtttacatacatatggttggtaagtaaatttaataaaacaaaatatagtatttaaaattaaaaaatttaacatatatggaatatgttatttatgataccatagaaaatattaaaattctaatattttatttttaaaataaaacaaatgaaattacaacgattgctggagttgttactagtgctagaaaagtcgccaaagtttgctgtcggtgctaaaaatcaccggagttgtcaatggtgtcaaaatagtcactggagtttgctgtcggtgttggtaaagtcaccgaagttgatttcagtactgaaaaagttatcgaaattagtattgtcactagaaaaattactgaaaaaaattactaaaaaattcgtcggagttgtcaccgtcattcgagtttgatgccggagttgtcagcggagatagacgttagaatctgactaataaaaatcagttacgtttatctgctagtaaaaaatataaacaatgaaaccaattt

SEQ ID NO: 295534 - DNA, 2859 bp, Cannabis indica
aaaacataaaaataaaaaaaatacatattgaagtatttttgtataattttttttgaaaaatttgatcaattatataaaattttcaaataataataaagaaaaacttgaacatgagaagtatacaaaaagatcaaataaaccaccaatctagtgttggataattccattgttttgcctatgattacattacaattattagcctatttcaatgtaatttctatttcaattatagaaatttactcatcccctttagtttttgttttgttctgattaacacttgaatccttttccgaaactattacctcattattaggatcgaaatcttcctcgagttcaccttgcatattgtcaaaatccttgtccaaaactattacctcattatgaggatcgaaatcttcctcgagtttaccctgttccatatcgtcgggatttcgagagggttgaccaagagcttcatcaccttttgacacaatcgatggtagccgattaatatcccaaccgagtatctgacaaacaactcggccataagccctatgagcaagctttttctttgtctttgatatagcggtcgagtgttgcacaagtgcaacacaatccttatacctcttccctaccttcttccctattccaccacaaactatacaaaaaaactccccggcttcccagttcttgatgtaaaaatctctcaactttccatcctcctccttaaataaattcaaaaagaaagtgaacaatttagactccttggatgcatcttgttcctcaacctcggttgaatcttcgtcctcactttcatcctcatcttcactgcagtctgaattagattttctttcgaaataattttggcaggcttttatagcaacatgttgtgaccgaaatacagttaatcttgcctggtcttcagctgaaaccgagtttgctgcagaaaccgactttgtagaagctaaagaagactcaaaaggacgccattccagcgctgatgaagaagaattatcgacaggcttttcacatggccatttggaagtagatacctgtattataagccatgttaatacacgaaaagaatcacacactaagctgaaaagattctaactttcactggcagagtatgcaaaattttaagctcatttcgattttgtagacaagttatacttgagcaatgtctctaaagtaaaaataccattccctaaaggtgatgatcatgatcaagaattgggtttctaagctatgaaataaaaaacgcaaacttatatcctaacaagaaagattcaatctgccttgttgccatcgatttaagcctatgctcggtattctgcaaagctaaaaaaacatcatcacagaatatagagagtacctaaggttgttattttctttctggttcaatgaaaactcagttatagttcttttaaccagtgcatcatatcgaaaacaatattcaaagcagcaaagactataagaccatttacagctattcgatatccacataaaagaaaacatctcaccacattgaattctaccatcattttcatctaaatcagggctataacatttccttaagcatcaacacaagaacaaacatatgccttaatttcacccttaaataatcaaaacccagaattcaaaatcacccatttactaacttcaaacacaaaacccataagagatgaactcaagattgttttgtagaaatagtctttaccgaaatttgtcttagcaaaataaccacgtttgatcacacaagcgaccaaaaactatactttggatcataatactatataatacaatacggtataataggatgaatcaactagaggtttcaataatcaaaatccagaattcaaaatcactcatttagattagtaactaataaccataaaagatgaactcaaacaaagtacctgaatttctccattgttgattacatctttgccaagtggttctcctttcaatacaacaaccggaagcttatcaaaatcccatcccaaaaccctgcaaatagccatagccaaagctctatgggaatcacaactctcatttttcgaaacagcaatcaaatgctgaacaaaccctaaacaggtcttaaacttcctcccacaattcttcttccctaacccataacaaaccaagcaacaaaactcacccttctcacaattttcttggtaatattttctcaattcacgatcttccaacaaaaccctcaaaaaaaattgatacttttcgtctccatttccaacccaatagtcttcttcttcttccttagaatcattatcgccagacttgtccaagaattccttgaaagcattggccgcattgtgctgaagtttcagggtaaagtccgtacctttatcctctgccgtgtccgaccgggtcgagattccggcaccggagttggttttgggcaaatgggcatccgaatttgaaggtgggttgggctttaagagtttgtttgggggattcggaggttgttgtggaagctttcttttgggtccagaaatgggtttagtaaaaggaggaccttggtgccaaagagagtggaggtagatgacctcgtctctgagtctctgttcttcataaggatccataggaggctttcccggcgccggcgcggttactgttaatcgctctgtaataagtacttctgagaaatgtgatggttttggtttgatttggggtgtagtttgaaattttttgtttttgcaaaatggtccttaaacaaaaataaaatatcaagaggggcttaaggtaaaaaaaaaaaatcgactaattaataaaagtgcgtttgttaatatatttttaatcaatttttttattttttttaatttaaaaagtgaaaatattttcaaaaaatatgttctataa

SEQ ID NO: 295535 - DNA, 1642 bp, Cannabis indica
ggcaaaaatcctaattagacaatacttacttaaagaaaaaaaaaaaaaattagttgctttctctcttgcttttctaattaggttattctgattttacaagtattaaaatttaatgaataaagttcttcttattaaaaataaaaaattattgaaggtgtaatactgtaagcattaatttgtacttattattagtgttctaatgaaaggaaaatgatggtggttcccacgactttacagacacgtgtaactacaatcacctgttgcgcggtctatatatttacaccttatcttatcacaacactacaattatatatttgttataaaaaataacactacaatttaatataacaaaaaaaaacgtacttaataaaaaaatgtctaacataattaaaatttatactttttattttaaaaaataacttattctatcccttcaattaagaattattttctctttttcaaagctcgctctctctaccatctatactagctacggttgcgccaccaccattgttgtcttgccattgatgtcgccatctccaattaacatttaaacacgaattcgttatttttttcttatgttttaatgattaaaaatcaaatccaaaactaactttaaaaatattcacttaaaacattgatttaaggtttgaaactcgattgtatatatgatttaacatttaacgatgtttgacgatgttgttgcgatagtggcaattaaaatgttttttagtatatatttatataatatatataaacacatgattaataatggtgtcataaaaacttaattttatattctatatactaatttatagttatacatacattctagatgtgtagatacatttttttagaaagatattacctcaaatccattcaagaaaaaataaaataaatattagctcaaattgacatcctggtaaataatagttatgcatcactaaagttctaaccagatttcatcccaaaactatcattagcatcgctttttgccaaagaatcaattttttatggaagcatcatccattacacttgagggaaaaaaatagtacacaaacaaatgtatttatatattacaagattcgatgcatgagaagaataagaagatgattacaactcaaaaagcaagaacaaataataagaagagaagtactctcaataggctcaaacaagatttaaagtcctttgtcctgaaaacatttcctcagttacatgaacactagagaaactcaaaaaatgctcattaattaagatttatgaagttcttagtgcgtaaagataagcatacccttacaaaattttctatgtttttcagcatcatatcaagtgtacagcaagttaacaatattgtcattgtttagagtttttcactcttatttgaactaactgccaacaacaaattagatgttaatgacttaaatgcacaaaatatgaaccaaaccattcaactcagcaaacccaactcattttttgtagtaaagggttgtgttaagagtaggccatgcccaaccgtaattacggcagctttggggcctggagtcaaacccacctcatgtccggggccatgctattactctaggactacttcattgattttttagtttttgttggccttgcgccttaccaactcattcctcaa

SEQ ID NO: 295536 - DNA, 3395 bp, Cannabis indica
agaaatgtgtagcacttttcattaaatttctactaatttatacttataaaatagtttgttttttttctctttctttgaattagttccacgaatggataaatagttaaattttgtcatcaatcaatttagaatattgttttttaacaatggcaattgcccacctcatgagcatgacccatatctacacccacaaattctaaggctctctattctccttcctctcaaaataaataaataaataaatatataaactaaagaaaaagacattcgtttgattacactctccttctccaaacaatgttttctaaactggctcagatcgttctatatatggtgtgccaccattgaaagaaaaaccttctgttttctcccctttcatacgtaaaaaagaaacaactaagaaaacttattgtcacattcttgatcttaaggttcccattatatatttgttctaagacttaggattcttcttttattttttccattctttgttttctgagtccatgactatggcttccgtgagtgcgaccaacccaattcagtcccccgtccgtacgtctcgaatttcttcgctttacttgtcacccattaagatttcacctacctctgttgctcttaagtctcgatcagtggcctctagagcctcagccgtcgcaggcttggcattttcgcctttgccggacaatgtcataagtcgcaagaataagagtcccccggataatttgtctatcaagtttttgggatttttggcattgaatcaacgtctgagacgtcgaggttctactgaattccctcttgtaacggccgcagctgccggtgccgacggtcgtgaagtttccgacaagtatgactctcatcccctcaaataaataaatattaattatggacattaaatttgggagaattgctgctcatcacgatcctgttaatgtttagagtactgcttttagctgctagtgttgtgaatacttaacaatattactaaattaaaaatatgtgaccaatagcataatactagttattactggtatcttttagcattttccaatatagaattggtaaccgtttactaaacccccagctgatgctggacaaacttggcagcctaatcataatgtcctaaattgttcacattccatccaatgcaggcctaagagctttggagagagatttcctttcctatcactggctttttctttttcatgtggtaagaatctattatatttcctattttattcacttcaagataaccttacttattccattcactgatcattaaaccattttggtagctgaattgtctctaatcactaatgtgttttcatttcaggtacttcttaaatgtcatcttcaacatactgaacaagaaggtttataactacttcccatatccatagtaagtcaactcttccaaaatgacttatctttattccatacattaacttttgagtacatcacattagtattgacaactattaatagtttaatgcctgaattttattagatgtagtcagttcattagttagttaattagttcggttttcattgactcatttctgttaattagatagttatccccataaccacttgtaacctttttcactcctattgaaagtccttttctcttcttcttgtaatatacaaattacaaatcaataacttctcttttctctgcttttcgtaacaacttctcttatgatattcccactttgtagctttgtctcagttatacatctcctagttggagtggtttactgtctcgtttcatggactgttggattacctaagcgtgcagtaagtttcagtttttctgcatttgacatgatctatttcgatcaaagagaaactatgttgtttgaattgaattggcttgtttgttcttggtatttgcagcctattgataaggagctgttgttagtattgactccggtcgcattctgtcacgcccttggacatgtcatgtccaatgtatcatttgcagccgtggccgtctctttcacgcatacaattaaaggtacaacatttgacatttgtttgtgttcatttccagtgatgcgtcgaaaaaggctgcttgcaagtgtttttttcaatacattaatggttgctgtgttgtggcttagatagttagatggcatgtcttatggcagatatcattatttgttgattcataatttcaacaaaatttgtactttcataatttcaaatgatgaattggtagctatagctgatctaaaagtaacatatctgcaaatatgaagaacgaatttggagcctccaggattttgtttgggagaggatgaagtttaaagtgatggtttctttcactcagaattataatatttatgatggtgtgtgcaaatgttaagacatttgttttatgtttttcaacagcgctggagccattctttaatgctgctgcttcgcaatttgttttgggctatcaaatccccctgtcattatggctatcattggctcctgttgttattggtaacctcttaaccctgaaatatttcctatataaatacagctgtatatgtctttgttttggttcaaatttcccagaaactataacttccaaagatggaaggttcttgtactggttgttggtctttgttcttctctccaaatgaatattggtcttcacttcttttctcttaaaagattacttctctgacaaaaagtagaatggaaccactgggtgtacatgcaaaaatcactccaatacttattccaaatcaagctctttttctctttctacaattttaaaagagtaattattgaatggaaagaagttgtctacaaaagtattaccttcctctatttgtagaaaaatgagaagagagtaggagagttaggataagaacttatagggagtgtttggtgtatggtttctagttgatggactttatttgagaggggttgagattatgacaatctcaaactcgagtgtttaaagagtttgagaatactccgaaaataaactaaaaatgagagccacacacacataacctttctactaaaatcactacaaacataagtttggttttatatttctattttagaaaattcgtaccccataacaaacatccccatagtgattggtccacgtggcaagcttccccttcccactcctttttaggaatgttgtgttatagatcaacacactcaagaacaatgatcaatgaagccagcaagaacatagaggagttgaggagatgaaattggattttaaccatcaaaactgaatcaaacaataaaaacacaaatcagaattcaatgaatgaagttgaatgaaatcctttattgctttgatcaaaagggagtacattacacagagagagagacagagagagggagagagagagagagagagggaggagagagagagagagaga

SEQ ID NO: 295537 - DNA, 1063 bp, Cannabis indica
tcaatttaacctaaacagttctcatttatatgtaatcaaaaaaataaatttgaatttagaattcataaaattgtagagtgttgatggtattgataaaattttatcaaaaaaatttaaatttagggtaccaaatatgtatgattttaaaatacaaagtaccaaataagcattattaaaaatacaaggtaccaaatgtgtggatacccccaaaaaaaaaattatatatttggatagagaaatgtaatcattggcaataagaataaactaggagccaacatttctcttagctctgctagggcttcgttatggtagtgaggctgaggcctaagaaaaatgcaacaaaactgacgactaagaagaagggtccaagctcgatggatctagtgaagaaatgcagtgtactgattcagaataataaccatatctaatccatgatgctcctgcaattgtggcgaaatctgttattagggacgatagagtggggattgtatgatatccaaaagcatctaagcgtgaactaattgaaagatcagagattaaagccacgtttgcagaagtaatgggtgctctgtctaattctgcaaaaattagatataaggtaatgttccttcttctaatttacttgttttgcgatttgaaaaaagggtcatgggagaagtagggggtctgcgtcaaaatcatagaagaatatagaattgatgagattcatttctagaattctacacttgttatgtgctataagctaatcctccaattcacgtgatggagggtttttttagaagaatttggaagcatcagaacatagatagagtgagtttacttgctcatggagtcttcttgatcaggtttcaatctattgaggaaagagataggattcttaaagggggatatcaattctttgataagaaacctttaatcatgaaggcttgggatctggatgtgcaattcactaaagaggaagtttggaaagttctaattgttgggttttatgccctaaataaaactcatttcaaatataatcagatttacttattaataaagatcagaaataacatttaatgtt

SEQ ID NO: 295538 - DNA, 7053 bp, Cannabis indica
ttacattcaaataagcgaataatatgcaaaaagagtgcatcacaaatataactgagaatcattgaaatataccacactacttaacatgacatactacaattcccataaatgaaacttaaaagatcttgtactttaataaacgacattatctgggtttttcatggcatagaaattagatgggcgaccaaatttgcttatagcagcaagacacttacatagtggtgtaattaagtaatatgttatacataatctaatatttaattttaccaattaataccaaaatattgttgaacattgctcaaatcttaaacatgtcacaatctatgagtcatgccatgccaaacgcgtgtgggtagtgatcagctcaccaagcttttaatattaaattattaactacttggagattacatgctttcgtacgtgcacctggttttattagttaccagtaccacttaccatttttttttcttctatataatatgttctatagaataaaattgcttttattattaattacttgagattacattcgagtttcgtgcacctggttttataaaatcagcattttttttaataatatattgatgatatttttttatttatttatttaaagaagccgatattcccatttacaaaaaaaaaaaaagaaaatattccaatttatacgtggattgttggagcttagtgatatggcatcacattcacataaatatacgtacgtattctaagcaattttcatatgaatatttggattaaaaataaaataaaaaagaaaacggataatgattgttgactttgtatttttctctgttaaatcgttttccattcataaacccattgaatattattaaagtcattttcattggagtaaatatcatattaaccaattaccatcacaattcaatcaatctcatttaattattatagactaatcaaacaaatggtcattgccaaaatacaaatagtcaatgagtttactgattcataacattaacaaagattttagtttcaacaaatctaaaattattgatttttatagttttactatattagtttttcttagatattcgaaactgaacaatacgaaaacaacaggcacaaacagtattgacgagccacgtcatctctattcgcgtggagctcttaataatccagataatcaccgaaaaaagagaactgttcttctcccaaaaacagcccaatccacgccgattagcaacttattatgacgtggcaataaactattggggacctactcaagtaattgtacgacctaccgcaccaaacccttgctgttctcttttgaatgaatatctctcaaggcctaacgacttttcgagactctctctctctacaaacataataataaaagttgtccttgctttttgagtatttcggtctcgctccagcttcttttcatcagaggtaattatctttccccaaattctacaatttttccgtcgaagctagggttttgacgttacggtttgtaacttagtattgattttgcttggcttttgtctatgtaaatgaataaaaagcagtacaagaaaaatggtgaatttagatagctgtttcgctacaatctatggatgattatatttgattggtttattgctgctgccgtttgaaattttatctcttcacttcaatctgttgtgtttattttctcggtttctaagcagcagactaaaaagttggtgaatagttgaaaagtaccggtgagaagaagattttgtttgtatgtataaaaatatagatagattcctttttctttccttagattattattagttttgagcttggtagtttattatgttatatagaaaattaatcgaacaacgattgactgtgtattttataatatagagcttgactgaatttagtattatgctatttctggattgagtagaaagtggaaaagaactagttttgattattgatcatattgtaatttgtaagtttgattaaagggctattctggacaggcttgattggtacttttctttagatttgaccctggtctctgtaactggtccaatgccgtctcctatcttgcctcagtggcatgataaggctagtggtttcttttcttcttcaggtacctaattttgtgatgtttatggttattcttaggtaccccttttgttgttttatatttatttttggttttaatgcaggggtaaagcttaaagaagccgggcaatcagctggaacatttgtgggcgaggttgcaaaggatgcaaaaggtaatgttgcagatgtggcagagcgagttggctcgttggtgaagagtcgatgggcattttttcagcagccatcaacaaaacatgctgtgcaggaacgtcttatatctgcagctgctactactggtacattgtttaggaaaagcatcacagagaccaaagaaaaagttgttgttgggaagataaaagttgaggaggtagtttttttgccaatattttggtgaattaagatgtcatccatgaatttcgtctacccctctaactattagtgtttatttgcagaagttaatacttagcttaggctaggtggtcatttgaacttaatttattgtaagctctgaactttaaggccattttactttgttacataggctccaagttctggatttgtttacatgagttacacaatcagtggcaatgctttaaatttttattagttacataggtttccgttgtgaatttcttgcatataagcagtccattcagtggtatgaaaacaatgtaaatgttttacgagaacataattgactgctacaaattcatacaaactagggtggttaaaaactaaaatttggtttgtctgcctgtcaatataatcacttatacattgtagttggataatttgtaataggtggcaaagaagacagcacaaaaaagtaaaactattctgactgatattgaaagatggcagaaggtataaacttagacactgttgttatcctttattttatttgtcaattgaattattttgcgtgtactaatgattttgccgtatgtttctatttgcagggagtagctagcactgatggtaagtaccataactagatggttacttcaataacatgtttatttcttatctgtctaattaatgttgactattttgattaatgagaggcatagtgcataaggttaaatctaggtagatgatggatttcgggaaaattggcagcatgttttggctgttgtaagctaacctttttggctgttcctgatataaattaaattcagaacagtgttgtatccattcttgacactattgcaaagaatcaggtcataacctgcagtaagtattttgtatttactattttggactatggaagttacatcattcttcctttgtatttttttcagtatttggagtcccagttgagattcttgtacaaagggaacaatccatgagacccattcccaacatgttggtcaaatgtgcagactatctcatattatcaggtaaattgattaaagagttgaaaataactgtagttgtttaatcaataacattcacgtacttatagacatatacatggagaatgtatcaattcaagtgtgtactactcaactcgagcgacatttgctttttcacttgtttggtttttaggtctgaatacgccaaacctgtttaaaatcgagggagataaaaaagtcattcaacaattggtttcactttacaaccaaggtaatcttaatacttattttgttttcttttctaaaatacaaaagctcatcttcctctgccgttattcaattgaactaatatgataatagtgtgcttttttcaaaaaaacaaaaatgctaatactggtgttttattgtatcagactcaggtgcatcattaccagacagtgcaaatcctggtgatgtagcagctctgatcaagtattacctagctagtcttcctgaaccgctaaccacatttgagctctataatgaaataaagggtgcttgctctagcatacatgaaataagaaacatattgaagagacttccaagcgtgaactacatgaccctggaatttattacagcactattcctccgtgttagccaaaagtctcttcttaacaaggtaggaagcttttctctctcaattataggctggacacttcaatattcatttaaattgatacctaataaagaagaaaaaacacttcccaggaagtatcggttacattttagatcttaatgatacatatagcatcagctgactaaccttttagaaggggctgctttcaagagcaaaatctttcttattctgcttaatgccaagaaatttaccttcaagctgcaaatataatattctggcctctgaatacttattcaataagcatgctcagtaaattttattgtgatgcagatggatgcgcgaagccttgcagtggaaatggcacccattataatttggcagaaaggaagagaacctgacatgtataggcaatattggattcaaccacagaaaggtccttccaaccataatttggagccccagcccgtttatagtgcatgggatctgctatcaggtaagagggtttcaataaaaaataaaaaaaaatcttgtatagatttgtaaatttgcaattcttcttgtaaggtaaatttgcaattcttttataaataggaacatagttatggaaaaataatttctggtcttttacgacttcagttatgaaatcactgaaaaatttctcaattgtgtttttctgatgtttactttagaatgtcaaaaagttagatgagattgctttcttattttaaggcaggaaataaattatttctcttagtttgatcaagaaatttgagttgcataaatgactactcttgctataagatagttttaaaaggcataatgatgtttatttttttagtgagtaaattttaattcacattctttttacatacataatatttccttttgttatctataatgccttgcagacgaaggtgaagctgcagatgcatcttcgctcattccgttggatgatggtgtgccggttgactttggtgcaattgaagttgttcaatgcctcatagaacatcacaatgcgatttttacagatgcaaatgaaacgatttggaaatgatttctatgagcgtgagagtgaagtggtctagttgaattgcctgatcttaaaattttcaaaatttggcaaaggtgatccctgctctagggtgtttgatttcgttgtgaagccagggaatgttagtgaaaatcagcaacttttagtacataacattagtttgtcttgcattttgaaagagtagtgctactgtttactggtagagaaaaagtccttgctatcatgaaaaaaaaattccagtcttctaatcactaacacaatttcacttctaaataaaaatgaaattctaagaaaaaaaaacctacctgttgcagtaaaagtagccatcagcgttgaacagaacaaagcttttcttttttaataaattcaaatacaaattgatgaatgagataatgttgccatatctgaaaatacacaacactagtaagtcttcatgaccaacacaattcacaactcctatgggtccgaaacagaatcaaaatagtcaagcatgtcttgagtcaaatcatcaaaaaaattgctgcttttactttctctaattaatacacttggatcattaatgaaacaagagccaataatgccaccatcatcaaccatagaaagttccgagtccaattttataatgtttggcttcatcatttcaggcaatggtgccaccaccattctcaactcttcaggctccacgtgtgagcagtttgattgatatgatgggctactttccggactagaatcctgaaaatgtgaaaattgctgaacatatattagaactaatatcatagaagtgagtagatgtagtagtaaataattaagtacctttggaagttgatgaagtttcaatttggttttgtgagacttcttcaatggaactgatgatggtctgcgatgatgattaagcctctgcagcttcttcttcctactactccagaaattctttacatcattgtctgttcttccaggcaaatatgtagcgattttggcccacttgttccccacctgtgcttgcaattctatgattaacctctcttcctctgctgaaaacttacaccctctgcacatttttaatattattagttcccaaaaatccagaaaaaagaaagaaaagaaaaagaagagagttgaaatgagtagttacgtcttcaagtcgggtctaagtttattgacccatctaagacggcatgatttgccagttctaggcagtaatcctttggatcgaatggagctccaatctcttgggccatttttcttcacatgatttatcagtacttcatcttcttcagcacgccacggcccttttcttatgtattctccatcacttcctttcatttttctttttaataataaattataaatataaaacccaaaatgagtatattattattctagtgagggagattgtatagttagttactgtcgtatacggttcactgactcgtaaatttgatgcatgttaataacatggctttatatgcaggcactaaccctctccagtaatctgatttggcatcattttattggtgaattgtagtagtacgtgaaacttgaaaaccgctcgtttgttattcccacttcaacaactaacgattgtgacggttagtggtcttcccacacgatcttctgaacttggaactatatccacttcaaacttaaaattacggcatctgtaatatatccacgtgtcttcggtgtcgtttcctcaagttaaaaacgacgtaagtttaattaaacgacagagtttaattattcaggatttcaaattggcgtcgtaaaacaagatgaaagcctttggaatacagggccgaccctgaaaatatatggcacaagacgaaataaatttaaaagaaagagtattataggatttgaaccatgacgttgaacattatggattcctcctcaaccaactaagttatgaatatttattatttataatacacttaattttacttaaataaaagcct

SEQ ID NO: 295539 - DNA, 3274 bp, Cannabis indica
gccttctttcttgaagttagtattagggtcccattctttcataatcataggtcttttgttataaaagacatatccccctttcaaaattgcatatttatcctcaattgaatgaaatctaatgataaagattccataggatagagaaccaattttgtcaatcttatccttcgagagacgcctagcaaagtcatctaaaactgacaaaggagggttggctccgagaacataacatactatcgatgatttccagtaggcaacttcatcctctatatcacctagagttatcttaaccctctatttctttctagatttagagaatttcttatctaggttctgcacaatactaccaaatctcaagataggaggagatacattcttaccttgggaaatggcaatgaaagcttgacgattttcatctctgaattgctttgcctccaagaaatgtgcaaattccactctgatttcctctcaatgtatgctattcttcaaagtcgattgaggggattgagcaatgtttgaatcatgaaggtttctaatatcttcctcttctgactctgagaagtgaatgggttcgattccaagtatctcatccatggattattcttctgcacatcaaaacttgaatcaggacccatttttttgcgtttcttgatagaagctttgagtttcccttgcgttttagcccattttttccatgtcaccaacttgtgagttgaaaaagctagagagagagagagagaaggaacttgttttttttattagagaaaatttatttcttacctaataagtcattaatacaatttgatgtgggatcatggtagacaacttttagaattgccaactattagagtacttttttcgacaaatcttatgtggatgagagagaaaataaaaaaattaatattttaagatgatgtgtgtattttacaactataaatgttatgctccattggagatgctcctacaagatatttccttaagttacatgagaaccgatacttaattacacttatagcgatatgataccgatgagggggctagacaccattagtgtctttcaatatttctcattatattttattcttttttaaataaaaatattgaaatataaattaaactactaatatttaaataattttacacttaaaaataataattaaaaaaatttgtccaatcaagactacaccaaacactagatagtatacattatcctaatcccaatctaatgtaatccaattcaatccaataatcctatccaaatctatgcccaaacggatccttaggattggatgaggtattggtagggaatgatttcatagtctcgttatgtgtatttcaaagaatttacaacttacaaaaaattataaataatctaagaaaattacaaggatcataatgaaaatagtttgataaattgttgattataaattttaagtccttatttgaacgtgtcatcctatgtaaagacacattagtaaattaataaacaaacattataattagatatattatccgaaatggatcaaataaaccaataggctacaataacatcatttgcatactaattactaattatataaatatatattaattacatatcctaaggtttagtataataattaaatgagtagcacctaagtaacatacatgatataataatgtgtaaaatactctataattgcttttagataagctagctataactagtatacaaaaattaattaattttaataaggtattaaattgattatctattcttaataaattaaaatattattgttattagatatcagtagtattagtatccttataaaagtgacactttattattaattaacgatattctttaaaaataatattttaaaaatatacaaaatttaatatttaattatacaaataacagtattatattaaaaaaaataattagctacaaaaaccattttccaattctcattagtattacatatactgtagcttacgacagcaaagtccaaattttttcaaatagcgagcttataactccttttaagatatgcttcttacctaaatttcaaagctcaaagtattggaaacaggagtagaccattattagtcttttatatatatatatttatatatatttatatattattttattttattttgggtctttgctacttataggatatttcagtgcccttcttagatttttcttttccctctcaagtaagaggccttgaaataagaaacgatatagatggataattaaatatggtacaatttaatatataataacataataatgcaaagcttcgcattaaaactaactcaatcccacatcacatgtgacaatgtatatatacaaatttagaaacaatatttaattatacataagatgcatttccaatccaaccttcctcctcccaatacatttaataatacataatattatataatagaaattatttaaatatataatatatatatactattattattaattcaagttgggtgacttaaaactgtcctagattcacttcatgaaatccaacgccatgaaaagtctttaactttatcctataaatatataaaattctgatacagagcccttggccacaaccctttcttacaagaattaataaatcaaattaattattctttgcaataaaacttgagcaacttgatatataaataatgaaggatttgtaaaccgtcatccttaaatgtaaataattatttgatcccaacttgttgctttccaagagacagcagctcccacttgtggacttgatcagctttctttttcttaaaaaaaaaaaagtaagaatagatgactttgaattttgttcattacttgtctattttttttttaacaatttattcattacatatctttatatatgtaattaatttattgtgttttatgagaatcaataaattttaatttattgttttcataagtgtttattcaaaattttacgacggtgacgtgtcaagaatagcaagacgtgacacaaaaatatcgggactaaaataatgaagaatatgtaaagtcatgactgttgagattgatgacccgccaaccatgaagtgttagtctacgggtatacccctacctcctccaccttcacggtacaagtcatgcattttatcatagatacaataacattctcaaaggtatatggaaacattcacattatagcataactactgacaatggacgaaaggtcacctaacgaaggtggttgtcaccccctcaagttgggtcccggggggtcacccaacgatggttgtt

SEQ ID NO: 295540 - DNA, 1282 bp, Cannabis indica
acaacctgctatctgatctagaaccattacatgacactatctgatcgagaacgagatgttcaaacgctccccgttcatcaaattctgggattgttgctacccagaatttcagcctctatgcaagagtggtatcttcacgtgagttcaatcgtagaccttcaaaattagatgaggggggattgggagggtcagtatacagtcactatcattgatcaccactcgggtctctttctagtttcatttggttgcctgggggatctaaagaaagttctatttatggaaccatgtcattttcagaaccaccatattgtcttatgtcctcctactgctcgtcaaattgcctctgctgaatctttgcatttatcacctttctgggttcaacttcacagactaccattcttgagtaagtcaaaaattatggctgagtgggctggtaatattgttggcacttatattgatgttcatgaagattctctaaatgaaggttgggggcctttccttcgcttccgtgcttcaattgatatctccaagccattactcaggggaaaaatggttaaattgcaggattctagagatgaattctcgctagaatttcgctatgaaaggctaccagagttttgttttgaatgtggtactatcggtcacccttttgagcattgtcatcaatttttagagaaaatctataatggtattgagccctcactgtcatatgggccagagatgattggttctcctctcccacaatcgggctatgacaggtataggactgattttttttaaaggagaagtgtggcctcttatgactcgattagccaagaagtccttcactgctgctttgccacaattatctaccagaacccgatcttacccccaaggtttaaccattggtgaatcatcctcaacaccagcacctaaacataccatcatgccaatgactgaccccaatcctgcctctttgaatcaaaatcccaccaccacggcctcaactactagtaacaatattgcagtcaacccttccaatgccttcttatctccaaaactcctttccatttgctacaaatcccccatattccatagttattaactttcaccaatctacaaatttcttatcttcaccattaccctcaaccatctatacaaacacgtgctgcaattcctaatataccaaaagatactgctctgcccatctctctgcaaaatgcaaatcgtaaagggaaaaacattgttattgatgatgttgacaaggaaaattgcaaccccaataaatttttcaaaaggcaac

SEQ ID NO: 295541 - DNA, 8141 bp, Cannabis indica
caaaaatgggagatctggattgcaatcagctcgaagaaagataataataataatatagtgttataattgtcccaagataggcatatttgaaggattgtgtttgaaatttaaatggatttgagccaagcgctgcgaagtttagagaacatggtgatgctgttgtagcaagtgatggttatgagtcttcagatgccttgttagtctcatcaccaggttcagatgagaaatggctacagaggatgttccatatgactgcaaacagatcatggtttgaagaattcaaggaagaacaatgcgtttaggggtttcttgtagacaagaaatcgtgcctgatggttggaactggaaacacgagacttggacttcatgataggatggaagatgggtgttgaggaatgttagatatgtgcccaaaataaaacaaaactttatctcagttgcaattttggatgatcaagactttattgtcaaagtagagaacatcatgaatgtaactaaagtctcttgttgttatgagaggaattaagaagaaccgaatatattcacttgatggcaataccctattttcgagaagaaaaaaaatacaactctttggcacaagaggcttggacaagtgagagagaagtttgactgaattgagcaaacaagtattgctatgtggggagaagttggacagcttagatttctgtgaatactatatgtaaggcttgtagagtcaactttggtactaggcaacaaaccgaaggggactatatatttatattcattcagacttgtaagggccttcaagaattccatcacattcaagttcaaaatatttcttaatttttgttgataatttttctcgaaagctacgggtcttcattttgaaacgtaatgatgaagtgtttcagaagattaaacattggagtattgattgaaaaccaggccggtaaaaagtttaaaaagttgagaactgacaatggtcttcaatatagtgctaataaactgcagctggtacacctcaacaaactagacttgagagatgataactccatgaaagtaaagttatttgacttttttgtgtattaatgtaggtttgttctcaataatttatggtttaatttagattgaattgtttttatttcattaagtaattaatctaccttaattatgtgtattttaagagagctcaattgattttaaaggctcatttttggtgcagaatttggtagcaatgctgcagcattttgagcaaagttgctattgagggatcaatgtgagaaacaaggtcagtagtcatttaatgagcttttcttaaatttgtttgatgactttcggaaaaataaagtcatatgtaatatgattaaaggtggtctaaaaagaagaaaggagctgacatgtgatgaaaaagataaaaggttccctaattggtaccctagtttttggaaggagatgatatttaaaacaaaagcaccagccgccattagggattctctcacgccattcttttcagcagtcactagagagaatacccaagcgatgaagaaaaagaaaagaatgaaaataggaggcttgcaagggagaagaagaaagtacaaggaggaagaacatgttaagacatcattaatggcttaatttctcttaacctctctttatttggtatttaaatcttcatgtaatcttttgagaacacgaatatgaatattttagctgttttacagatttaatcataagcaaattttttagtagctagaattgttgatgaactgtaatatgtaattttggtatgttgttgggaggtagcttttatttggccatcaattgagggtaattcaattattactagtgctgaaaagattaagattaataaacttgtcacttgaatggtgcaagactactcactttagattgtgatttgtaatagtatagatgtatatttcaccttgcataactaaatggaagtagtgtttagaaatgtgttgaaagcctgtgaatttgtttggaattctcagttagtaaagcccaattttttatagcatacttttcttagattttaggtttaatcaaatcattatcagttgttttggtccaagttggtaggtgttaactttacacaatttgctactaacacaattcatgtcaagacaagactcgtacttatttttgactatgtacacttgcacgtgtattaaaattcgcaacgaaatgtttaatagaactatattggagagggtaaaatgactgtttcttagtgcaagtttaccgaagattttttgggttgaagttgtgtcaaccgtggcatatttgatcaatagatgtccataagctacaataggtttgaaaacataagaagaaatttggtcttgctttagctatgatagactaagggtgtttgattgaattttttatgcacaattaaggaaagacaaacttgaaccaaaagcattgaagtgggtgtaaaagcatacaacttgtagtgtttagaagcgaaatttaagaagtgaatcaatagtagtgatgtcattttcaagaagttcttgtacggacaaaaacaatcaaatggaaaatttctgatatgatttattttaattatatgtggatgacatgttaatagcaagcaaagacggatgatttgacaagatgtaaccagtttgaagggatagatgcatgacataaaacattaaatattatataagaacatagaatcctagtgtctactatcctaaaacaacatgaataagggaagaggagagtgtttgtcaaaaagaagagggggcaggttccaaaatgaaggcttgagaacttgaaatctgggtttttttagtataataagaaattgaggtaatgtctcacacgaaggaagctaacacctccctgctcatcctcaaggtgtaagccttatgccttgagaattctgaccgtccctcaaaacaccatttcaaacagttataaatttatgcgttgatcttatacgtcacgatgctggtgcctgtatgacgcaatgccatttgctgaagatatgaagaatgcaagtcaggccttaggtgttgcaatcccgacccagaatgctgctagcatcacgatagtatttctatgtgttgcaacacccatgaatcctttggcctagtatttagatcttacgcgtcacaacgttgtccttgtgtcgcaacacccaagcatattttcaagaaaggacttttttggtggggaaaatcaacttggttagttaaggaggggttccaacttcatttttattggttcacttgtattgtaaggtcactttgctatgatatataaagtgagtgatttagttcattaagggttcgtttaatatacttaatacaatactatgtttgttattgacttgtatattaatagattgtctaaaattatattatctaccataaactcgagcccagccgtggaccaagattccatctctagccccgggccacaaatcccggatcgacctatacccggaccctatccccaaacccgaacgccaaatcgaggtccaagtctggagtcttaagtccaaggccaaatctaggtctaggtccagggctgaatccgggtccagggccgaagtctgagtcggggccgggtttaggtctggggtcggggtccgggtctagggtcgggtttaggtccagtgtccgtgttcggggttcggggccgagtccaaagttcggagccggggtccaagatccaagtctaagtccgaggccagagtctaaggtctaggtccccaaacctggattctttctaaatattataatataagataatacggattattcgttatgtattaaacaatacgattcgaattgcgttaaaatttatggtcgtaataattaatactatacaaagttttattcaaacatagagttcattgttatttaatacaatatgaccgttatacggcctaccaaatgagccctaagagaataacgtgattacaatttgtgagtatgcaacacttagagaaaacaatagagtttgtgataggtatttttcttgagaagggttgcggaagagagaatctcaattggtgtaaccattattgaatgaatagtaagattggctgctattccaaggacatagatgatcttggtcaaacctcgtaaatcctatgatcttttctttcttgcattgctattggtgtggtatgaaggttttcagtgtgaattttctagtttgagtttgatagggctatgaaggggattcaaggtgcttgattgattgttgtatttccatgggttttccaaatcaatttttttcatttatgaaagaatgacaacaagttagccaaatagaaaatttcaaagagaaataatgaacttacagaacactgactcccacaacagcaagaggccttggatagtcctcaagttgtttctcttttctctcttcattatgatctagagcatcatgaacttcaggggacgaaggtttgagtgttttgtcagagattaactctagtttagatgttatcctctcacatccaattccaaatatttcttctttcaaagaggaaagactgtcccttgcctatatatatttattgccaacataagaattccagcaacagaaaaacagaagttaaaggcaaaccagaacttgtataacccattcaaaaaaaaaaacttgcataacaagagaaaagatggggaaacaatagcaaaacaaacctcaggaaggtcaattttattcaaaactacaatgtatggtcgctcaagataattgggattgtacattcgtaattcctgaaaattatacaaacagcattttagcaaagttttagcgtcaaataaacaagtagcaaaagttatcacatacatacttctttaacagttctgtagtcttgtataggatctgcagctgctgcatcaacaacatgcactaatactcgagttctcctcaagtgccttaaaaaattgcgaccaagaccctaaaggtaacacaattataaaacaacttgtggaattttaattagcaggcaagcaagataataagaagaatttacctttccaagatgagccccttctataagaccaggtaaatctgcaagcgttgcttcagaagaatacatctctgcccctaaacttgggtcaccatcaaggcgtccaaggtttggcattaaggttgtgaagggataatcagcaatatctggctttgcaagtgttatggctgccaaaagagttgatttcccagcatttggaagaccctaaagtaataaaaagtagaaaacttcagcatctaaaatctcaatcttaccttattcagcatcaagatctatgaacaaagtttgaatattaaactcagttaaagacagaattaataaacaaaatccacaagattgcgttataaacaaataatcggttgaaactgaatcaacagtgtttataaatataattgtctcaattatctttttaacaggttcaaaccttctactttcatggaacacaaattgtaaacggcaagacttccagaaaaagtatcagattagatcatattgcctgttccttggagggaaaaaagaaaagcacctaggttttttttttttttggaaggaaggaaccaaatatttcatattgcctgcagattaacatgaagattatttaaaaataataataataatactaacaataatattatgagtatagaacagagtctagaatttggccaagcaggtttatccacatatctcatattggctgttctttagaaagaagaaaaaataaaagcaccaagtacttcagaacctcaaatattcttctttgacattattaaagttttcttatttgtaatcagtgaaacccaaagatcaattctttgataccgaccaagaaaaaaaaaatcaattattaaaaaattaataatgaaaaagtgaagtgatacttacaaccaaaccaacatcagcgacaactcgtagaatcaactccaaactaacctcttctccaggttgaccaaggactaaaacctatgatgaagcataaagaaaaaatatttttaaaataatacgtatatatataaactaagaaaagacagtaagctagtaaatgcctgtaccatgcatttttagactgcaaaatctgattatgtaattagtagacagaaaccaccaatcaaattacattatttgacttcaaacacattcaaaaattaatgatgacaatcatatctcaatttatgcatcatgaagcatgatgattgatagccaaaagaaagagatatagcaaatgttctcattgtgtatcaatattacattcgctttgggagttaactttgccttgaatcttaatggacattttaccagaaaatacttgtttatcaactagaagggaaaaaaggggggacaactttaccttatcactatcgtctctcatcacatttgtggttaaagccatcaccttttgttttctgtgttgaggcatgtctaacaagctaatctgccacaaaccaacaaaacttacatctgaatcacaaaatgatattgaccaacaatgtaaatattgcatatagtacttcctctcaaaagcttggccatacaaaaacatgcaaacattactaatcacacatttttcatgtttatacatttatttgtttattaattatatttaaaggcaattgtaaattgtattgctttgagtgttatatcagttgagttcactcgctatgacctaaaatctgatgaaacgtgagactacaatagaagaagagagactacataagtaagccctcacaattacctacattgagaaaattatagaaataaataaactaagcaaatcttcgctaaaattccactacatttaaaatgcaatgttttgtgtctcacccctccttgaccaccccttgccacaaggatttcatcacccggacgcgctagatcagctaacaacttccctcgtttatgcttaactactgtgcctgtcaagtttatcaacaaaaaataatgaggcaaaacgatagaccagatttgaaatgcatagtactccatagactcctcaaacaatttacatgaaacatagacgtcctataaagataatgaaaacataactgacatacaaacctacaggcacaggaatccgcaaaattggcgcaggaagtccatcccgcaattgcgagttcagaacacccatggcattaacatttccaccacgtttggcattagaccggcttttcatatgaagttccaacaatgaatctttaccctcgtctgcataaattactacatctcctccatgcccacccgcgggaaggataagagacccatcaaagtcccttttgtacgaacctttctttctggcattttccttgtcgcgttttccttgcaacttaccacctccctgttgattgggcatattgaggacagcaccatggcctccatcacctgaacgaactgtaattatgacttgatcaaaatacttgtgaggttctcttatcaccatgtcttgttttgcagaagaaggctctttggctcgggcaagtctgcacttgatcgtgtagtatcgaatgttttcaaaattccatgaccgtttgtcacacctatggaaacatatggaatgttactaaaatatgaagtgaagtaacaatggcaaacgaaatgaacaatagactgactaattagaaatcaatcctcatgagtattcctaacaattagactaagaaatctgcattatcggtgtatttattcgcttctaaattacaatttgcaagttttaccgaattgagaaaaatggaaaagcaatcagttttgagcaacggaactcaaagccataatggtttgatgttttctcgagaaccaaacaggtaccttttgtggaagaagacggcggagaagaaggaatgatcccgggaaaaagaggaagttaatggcggcaaagagaggagggaggccatgtacgaataccaaagctagggagccaacggcaactagtgagcaaggaaaggaggtggctttgcgttggggcgggtttggctagtcctatccaaaaaacccagccctatactcaattggactatttatagggtcggcccttttgggttcccattaataccctttctttcattagcttaattaaaaaataaaggctaattagtaatttttccctccgaactttgacatactaaatcgtgccctctgaaattttttt

SEQ ID NO: 295542 - DNA, 831 bp, Cannabis indica
caatatatactggtttacaaaaaaaaaaaaattgttattaacaatactattgttactttaatattatatttttgcttcagtacaatattttaaaaattttagtattgttatttatatacttattcttcatattatgttagttactagtattggtacatttttctgtttttctttctgttaacaggttgttttcatgtggtttaatctaagtgtgagacttatgataatattggattggattggattatttctttaaattttactgctcatgtaattgaaacagattgtgtctagcagctgtgtttacttttaataaaagacatttattttttaatggtcttggatcattattagatgatttgacaaatttgttatttagatttttaagagtgtatctaatctatattcatcgaacggttaatgtaactgcacatggattagcggtggatgctcttttggaatttgagacttttaaggctgagcatgaagcttatgaccagaagaaagatgaggctttatttgagttgcaaaaagccaaagtccaactcaaaaagctagtggagcgtcaagttaaggcgaggctagagccaaccacaaacgacgttgtaacaagctataaagctaaaatctagaagctacaaaagggtagagatgattataagactgcttacgaaaaaaccaaaactcgtgaagttttgctagacactcgtgttgaaagttcaaggcaacaacttaaggaagctgagtataaagctaacaatgctactcttgcaatgcatacgttgaaggaggaggttgaagataaaacccttaaaatgttgggttttatgc

SEQ ID NO: 295543 - DNA, 3101 bp, Cannabis indica
aaatatatttttaataaattcaacggagtttgtactgacgaaactggaagaaaattacagttttacaaatattaagtacttatgccgctaaaaataaacattgggtttatgccacttaaaaacttaaatctttgagtatttataccgctatttaccttacaaaacacaacaaaaatttcataatgggaagaatgctaaagagaaatttgattaattatgcttacaataggaaaaattaatttcctaaacttatacttatcactattgaaaaaataggtatacaaatatttgagtacccaaaatatcccttatacacacactcaacccatcccaccctttctctcttcactatctttctctcaaccacattttctcttctcctctctaacaattcaaactaaaattttatttttagttgtaaattaacctctccaagctactacaaagtgctagaagttagagactttggtgtgaaactccatttttgaggcacccaacaatttttggcaaaaatcaatggctaagtgattttttttttgttcttatatttagcttagaatgttgttttcataattgatatgtggattgttggtgtttttctattgttttgtgtttaaatagttgtctggtttattttggtttttctgcattttttttgcctagttcgatggagcctaataggggcccaatactagcccgatgtgattattagatctatggtcggggatgatgacccaattaggcctgatggtagtttgatagtattctacgaactaagatcgaggaggatggcatgattgggcccgataggggcccaatggtaattcgattgtcaactttaacttaagggcagggctgattggcccgatgtaagcacgatttacgcctgatgctggtctaattctaaatctggacgtcatgagtctgatggtttatctgatgtaggcccgatgcctatctgattgtcctcttggatctaaaactgggactgatgagtccaatgttaggcttgatggggtacgatttgacccgatagtttacagatttatggcattttaagacttcttttttatcacttttttgttagatttttgttctaaatttgtaattataaacttttttaatgtatgtgataagttcaactgttaatgcgttcgttatgtataatggtatttgggagcttgagggtagagattgggtttataatcgcaccaaaaatttgacatttgagattgatacaaacgtaagctactcatgtttaattgatcttttgtacgaagaactcggtagaattcagtgttgataaagtgtagtatgacttgaaattagaagtgaattacaagtacatgaaatgcttaatgtatcgtcctgaagttattggaaataataagtgtgtaaggttctttttgtctatgcttgcaaagaagccaaatgaatttactcccttatttgtgacttttgtaaataagaatgtatgtatcgattctagtcccacaccaagtactgttaatgatactcgtagcgaggttgggatttttgttctaaaaataaatctggaagtgttggcagctgatgtgttacttgaattaaacactatgataccgacagttgacattgtagcacacatgccctttcttgatggttttggtgatggtccagatcctgaatgatatgttgagggccatgatgacgtaagagacgaccaagatatagaggttctgctgatgtagctttgaacttgactccactatcatactaaagaccacccaggccaccgacatagaaaagaatgccttgtagagaaaatcgccaaacacttagtactaatagtagtcatccagacaaaatcagtaatgctacaggaaccactgatggtagaggtcctagtgatgctagaagaaccagtgaagctagagagaccattgacggtacaggtcttagtgatgctagagggaccaattatgtaaattaaccatgaagccactcctcctgatcatgaacctgattcttttcccaaccgagcttttatcagatccaccatgagtggaataaccgagtaagcttgatattccggcatcttcccaatgattactgctttatccagaaccaatcaaccaaaacaaaacataatctccctattcctcactgcccaacgcttttattaaagtggtatttcattaccatcggttccttgatgagaccaaattgatgttgatatcaaaacaaggtttcaaaattcttaaacttggcgatgactattggaaacctttggaccccaatttcagaaaaggtcaatgcatggtgcaatcaaaagatagaaaccaaatgtagttcatctaccttgttcagtctacgacactaggcttggatttaaaggttactttttttgacttaaggacagaggtttatggcatcattaaaaatttcccacgtggtgttttctctgatttaacaaagctcactccgctcaagtggaactgtcatttgcagttggtgttctgagtaagaaaaaaggccttcgagtgttggtactgagaaaccgagaaaggtatggtcgtacgctccaatacaagaaaaaagaagaagtgttagatgtggaagagagaactcctaagcaaccgcgcagggacaatacacttatatcattaagtgaagaagatgctcctcatgtacataatcctaataatgacctcttagttgttaaagtataaatttcaaacatgacagtagtgtggagtaggatagacaatggaacctcatcgaacattcttttcgaatcaacctgtgagaatatgggcctccaacttaaagacctagtcccatgcgcgcatctaatttatggtttttttgaaaacaacatcgcatcattgtgcgtcatccatctctcccttacggtaggaaaggctcccccacattgccaatcttggtatgatggtgtcaatcttgtcaagtgccaagcttggcaagtggtcgtgaatgttatattatttgttataatataatatagattaaaatatttaaatgtgacaaattatatattaatatgagattaatatagattatgtgttggaggttatattatatcatatacagtataataa

SEQ ID NO: 295544 - DNA, 4067 bp, Cannabis indica
tgaatatgggctgtgtagtggattgaaaactagctagtgtgagttgtagtcacatagttactactgacctggagggatgtagccaactgaaccagccacagtggaaatacttccggtgctctttgatggatcaataatcttgtagagctcaatttctcccacttgaggctctttcatggactttagaaagacacttctgcttgataagtcaagcaggagcattggaccagaggaaattccatgaagaaaagcaagaccttgagctactcccactgctatactgtatctactcgcccagtccatatcacatcctgagctactatgaagagcatcgaaaagggtgccctttgaggaatactcatagaagagataagcattctcagcagataaaacataggccaaaggagtcatgacattggaattgctcagtttcccaaagacctcaatctctgttccaaatctatcatggttgccccagtgaattatcttatcactccaattgagcttcttgacaaagtagcttgaccccgaaggcatagttgctttgtagtaggttgagaacctagttttcatcacaatgttagcttggtcagcaactgattccatagccttggtgaagtcaatatttgatctgtggattccatttgaggttaataaatttccctgaataacctgagggagaggtagatcttccactggttgtaactgttcatcagcaacccttccatatcgtcggaaaagtaacagagtgaagacgaaagttgctccaacagaaaatacagaagccaaaactaaaagaattattacaaccactgagatttttttcctagatggatgtgaagttgttggctctgtaacattaatcaaattcccgtttccttttgtgtcaaccatgacccaagaattaaattttggaattactccagagaggttattgtttgaaagcaacaattgtgtcaaggatcccattctcgtaaatgattctggaatgtcacctgagaaattgttgtccgagatatccaacacttctaatccagaaagtcccgtaagagtttgtggaataggtccttcaaaacgattgctactaagattcaaagcgatctgcaaatttggtggcatttttggaatgtatccactcagttggttttctccaagctggagttccaaaaggctattcatggtactcatggtatttggtatggaaccattaagcttgttgccttgtaggttgaggttaacaaggtgttgcaagttggagatagaagatggtatttgaccacttagagaattccagcttatatttaggactgataaactctgtagttgggaaactggctctgggatttcaccagagagatcgtttaattgcagttttaagacttgaagcattgtaagattgcccagctggctaggcaaaggcccagtcaggttgttttgagccaaatttaagagtgccagactcctgcaagaacccaattctagaggaatcgatccataaaaatgattgttgtccagctccaagtatgtcagttccttaagtgttgaaaagttgacagaaggaattttccctttgagtttattgctccccagcctcaacctaaccaagctaggagaaatgtttgtaggaaatgatccatccaaatgattaaatgacaaatccacagtttgcaaatttgttggtgacaggaggtcaataggaattgagccatataaaccgttatagcttaaatccaaatttttgagaaatttggtaatactactggggattgtaccagaaaaatggtttagatttgcagcaaatcgtgatagagttgggatagttgaaaggcttactgggatttttccacttagattattgctagagagaatcaaaatctttaactttgagaggtcaccaattctgttaggaatagaccccgaaatcctattttggctaagatcaaccagtgtcaaattcccataatcaatcatttcttctgggatgggaccttggaaattattcactgaaagcacaagctccttcaaaaccttggactttccaagttttgtaggaacggaaccattgagcttgttataactaagattcaagcttttaagaccatctaagccttcaaactctacattaatgctaccactaaaatcattaaaagacaagtccaagacctccaaccccgcaaaaccaacaaacaaaggtaaagaaccatccaacctgtttctgctaaaattcagtagacgcagtccctccagttttccacagtcagtcatgaacttttctggaactttactcaaacggttgttggacacgtcaaaagcctgcaaagaaccaatttggcagacagcaggaagaaaatctgaggaagaaagagaaaacccagatagagaaattttaagtacagaagaattggtggggttacatgtcactcccttccatgaacatgggcttgactgtttattactattccatgaaagactagtgttgagatactgataaagagtgttcatggatgatagttgggttgggggtagttgagagaaaatcataggaaataaaaaaaagaaacataacaaaaggtaacgaagagagtttctgaaaccgaaattggtcatttcttctgttagctaagcagaaacaaaaatctctcgacctctaatctattagttatacatatgcagatatatatgtaaagtatatatatttgtttatttggtttcaggtgagaaaacacataattaagaacacaagaaattgggaatgaagtaatgagggagaggaggtttgtttcgtggaaaagattagagaaagaaagaagtttataggagtggcgtgttggtaggagtgggagttgactcaactgtaattggcaaagtctagtcttccattgacgaaagacataaaaaccaaagactgacaatagtggctatcagttttttctttcctttaaatttgtttgtgtgtgaggagactgtaaagtcttgagtggatcccatgcattaactagaagaagctggtgcccccttattcaaacccgcgttggtcgaactatgacttttctatatatcaccacatcatatgacaaatgctaaggttaccattgagggtgtagcaccaaaaagtgtcatattatatattatatatctctatctctatgcaatattgataagtcctttgtcttttccttgtgtttcatctttcattttgttcatatgtttaatcccttttactttttctaattcctatgtgattgtaatatttagtattctaatttttttttttaaaaaaaatcaaaatattttataaaaataaaaataataaaagaagtactttacgcttaagaagttatttctcttaaaaaatatatttttttataataaattataatataactaaataaatatgaatttattaattttattatttatttttttaatttccaattcagtccaatatatcctcctgataattttttaacaaatcactctcaactttaatataattaaatatttgatatatttattagctttgattagcttagattaacttggattgtatttttctttttgtctttttatctttaataaatgacctttgtattatgtttttcggtcctattaatgcaaaatttatttattttttattttatttttttattaataatctttgtattattttattttttgattaaataatttttttatattatcatatttaatatcacacgtggtactcaataattagttaacaatttttcaaattatgtataaaattaaattttttgagaattgatattaaaatacaccaataactgttgtggtacttgacatcttattgtgtcccttactattttcattattaatatatacttatcattgtaacagctattataattttaatctttttaattatatataagtttacaagaactccaatgaaaatgaaatgtgtaaaaattatatatttgacaaataaatttatgatatatttgcatcaatttttaatattatgctccaataatgtacaattataaaacttgatgcaaaatttactatttttattacaagtataaaaa

SEQ ID NO: 295545 - DNA, 1201 bp, Cannabis indica
gttgttttgagtacgaaaattaatagtagcactcctcaaattcttattagctgtgaattgtaatggtattattttttttttttttctaaaaaaaaaaaaaaaaaattaaaatccattcaaatacccaaagatcatacatcatcatccatatagtattttagagctaaaacatgagaaaatagttaaactaacaccatacaatcgaaaatggaagacacaaaactaaacatagagtagtctacatgacctatccacatcggagaccttattacctaaactaaacataaaaaacttaattgttggagccaccaccaaacattgccaaagccaaccctaaacccaactggatccaaaacaagactcgtcctctttggaatcccttaaccggagcataggctgaaaccctagcaagcccaaagccaccacccatcacaataaacactcccccaactacaacacaactcagagcttcaagctacaaataaaacccacacgaaattcctttcctcaaaagataataatcccgcaccccacatatcgaatgcgcatcatgcacctcttactaatcagactccaactcactcacttacgtacgagctcctcaaaacaaattatttttttttcttcttcatttcttgatataaatgagagagattcgaattcgggacctttctatactcacaatgtgagtagactatagagttttattaccaataaattatagtatgatatgacacaagaaactaatattatatattattgttgttatggtttaatttttgaaactctcaaagttgatcgatgagttatcaactactcccaaatttaatgataaaaataataatctagtcttacaatgtttagatagaaaaatttagcttatagtttatttaaattaatatattatttttatttataaccaatttaaattggattatgtgtggaatcatttttctaagagaacaaaaataacaaaattaatcacatttacttttaaaggataaatcacgtacgtttgaattcccactaatttttttgaagcttcatcatgtaaagaaaaaaatattggattaattaattaaggtacatttgcatcatatatatatgaccacaatatataaacattatatattgtcaccaaattagagatataaatattcaatttatatatatatatatatatatatatatatagctcacc

SEQ ID NO: 295546 - DNA, 15823 bp, Cannabis indica
acttttgttttttatttttaatttttattttaaaattaaaaataaaaatgattgtaaaatacattttattttcaaaaacaaaattttacttttatttttattttttatgattaaaacaatttaaaacaaaatattatcaaacacatgtttctaactttaataaataattttacaatgttgaacactcaaagagattgaatagaacaaactatacaaatctctcaacataaataatctacacaacaaaataaccaaactggttaggtcaaaaacgaaactcactcaaatttatgtataacaccatgtattaatttctttatttattttttccatttaattagttttttttccatttaattagttttttttttaaaaaatatttatttattttattaaaaatataatacaataatgttacacatatataaaaaaaagtttaaaatataataaaaaaaatcatatttagttcaataaataattatgtctacatttagctaaagactaaaaaatatgtaatgtagttaaaattttagctcacttgatggaagcttgattttgtaaatttttctttataatttaaagattaagctattttagctcatgtgcacacaattcaaatatagttaggttcaaaatactttgctcgtgattagtccggaaagggcaatgctaaataggaacataaagggacatatttgtagtttgtaccaagagacttttacatgatttatactgaagctagaaactataaagttttgactggatagacacagttacacaacacaccataagctcctccattacaaatttggtccccatagaaatgagtcacaaattacaatagtcaatctagtaaaatttctattctagtaaaattacatgagtaagattttttgtcaaaataaataaattcaaagacttaaaaaaccaaaaatgacataaactcgtaatgagatactcaaataccaactccacgtggaaggaaaatgtttcatataacatttaaagaaaacgtttacatttaaataatgatgagagcggaccaaatatggcaaagttgtattataacaatgcaaataatatctatacaaaacacacatctatttataatagaaaataaatcacacaagaattcaagctttccataataaataatgcaaagagtcaaaggttcaaaatgttgactgttgagatggtccagaacaatatcaagtttttcaatagtcaagctcagccacctctaaccttttaaacttacaatttgatttgaacagccagccataatgatattttataagtcattaataatacaattcaaaccttgcatgattatataatcatatcatcatttgaggagtgcaaaagatacttatgtaactatcaatctcaataatgtcacaggaaacacaaagactttctttatgtacaacagcagagatttcaactcagagctctttgctcaaaaatagagtgccaacttatctattaagaaagctctcatttatatttatgggataatgcattattctatttatgacagaaaaagaactctttgtttaccaaacagaaaagggcacataatgtgaaacttctacctaaaatagtcttacaatgctctaattacagagcaagtgagctaacctcatcagctttccacattccttcttcatatttgtaccacctcatgagcccttcgtcacttttcgttcgttggcacatgaggcaagtgtcttcttccatgcatgttagaaattggcgtaaccgagatgctttctcgaggatcaaatgatcgagttctttaacaatccttttggatgcagggggcggagggacttcgattaaaaggcaatgtgaaatgttgagaacttctaggtgttgtaatccatccaagatcatgatcagagcatccttattaagcattgagcaccggagacttaataccttcagtttgggaaggcatctgactagtgtagaagcacataacatgtcacagggacccatgatcttgagctcactgaaatttttgcagttattggagatctcttccatgaagtatggtggatttgctatgctgggcatcgtcagtgattcgagatctgtccatgcacgaatggccttgcatattcctgtcttttttattctgttccaagctggaagaacaagtcgtttaagccgcggacacctgagatgggacaaggtttgttttctcacattcagcaagcaaattaaagtgacaatctgtttgcacataagaattcatcaacaaacattcttcagcaaaatgttaattaataaactaagtgatccataaataacacttatagccacaatcagattaatgaatattaacttttaaagtgtctttgataggagggaaaagtggacggaatgagaaaggtgagaagaatattttttgaattgatgtagagtggttgtttgttcggattcattttcccatttaagagaatagatcaggaaattggataatgaatcctaaactttaaccaatgttcaatccttccaatatttgagaaattttaggaagctttgtctcctgtaatagtgtatcattcaacagctataatctttttttttgtttttgaaactaggctcctgcctaaacctttaggctgtttggtagagaggatagattgcaaggggtggggggagagggatgaaaagagataaatcccttgtttggcaaatgggagagtggaaatgagaggagagatggagggagaccttctccctccaattcttaaaaattcaatccctccattggtggaaggattcaagaaattaacaaaagcttataaaagaaatctaatttcaacaattacttttctttctatccttccaacttcacctttaataccaaacaacacaaaggagaactactatactctcccttcattatattctccatccctcctaaactcttcatctatcgtactctccttccttcctaccaaacatagtcttaatatcccgagatcaggaaactatagcaattgttgtgtagactatgtgagagcaaaccatatgcctcaccatttgagctacctcaatagtattccatagctaagatctttctatatgagcacacacaaaataagcactaaaatattactgacagtgatctgacatgtctttttagtataatgagtcccattttaaatagatatatatgattgggttgggctgcttctacttttgcctcttaccaataaagaaaaaggactcgtttataccaaacacaacaagtgaaagtcactctcatttctctcatattttcttccttatgatttcttactatcttatcttcttctatagccttagcctttgaattgtaaacactatactaaacatgcataatgtttgaaaaagtaaaccatatcatgaattcccactctttttcttgtagaagcatatgaactcaccaataccaaatactataaaaaaaaaaaatcaaatgacttaaacaagtttcaacccaacaaaaactcaaaatgaaaacagtttaacaacttacctttcggctgtgtaagtcaactgatcgtcgctcacgtacaagttaaaatggaagatcaaggtcaaaatgcttccacggctgagactcaaggagatcttcaacacccgagtcaaaattttatccgatcgaccatcaacataaacataaggctctaatgggatttttatgaaattcgatttcaacatcgataaatcgagtgttttccatagcaaaggatcacaacaagcaagtctccatgcgctacacacatgagcaattccttttgttaactcaaatatatcaaatgactggaaaatcttcaccaatatgtcagtgtccaagtcttcccatcttctcgaagcacagtaactctcttccatctcacaagctttctatataaactccttatctttctaacacattactatataatgcctaaaaacaaaatgaaagtaacaagaaattacatcaataaacttcataagcagtagtaaagacagtaacataacatgggtaacttacatcaagagcttttgttatttgataataagatttcacatttcacaaaatatattcatcccaatttgaatcagcaaaaagtatatagtagaatagattcttattccaaatcttctatgggtatgaaactaaaaagataagaggaaataatgctctaatttgcccaaaataaggtcaagcactaagctatatagttagataaggataaaaatggttagaaaaacttagtcgaattcaattttcattcggaggaaaaagggagagggtatgggtttgaacccaagacccatattagtaaattgtaataccactatgctacactcaagaaaaaaaaaaaatcaattttcattcggagaagaagaagaaaactttttgtttggtaaatttaaacctgtaactagagtagagaggaagaacagtagtaatcataaaaatgacaaaacgaaaaagaatagaaaaaaaaaaataagagactagtaatttggtggaactcctctgaaaatataaaatggtcaattttgaaatccaagttcaatttccattgatatgaatttaaaggctcaagaattaaactttttcaccatctcacccccacagagtgaagagatcaacattagaaatctcgctgaggaagatcaatggaaagtcagaaatcaattaaactcccaaaaaatcaagtccagacctgaaatcctccataaaagtttacagataaaaatgaattatttgagggaaaaccagaagctttaaggtacaaacgtttactgggttttgttatttctaaccagatctatcaattcgaatcaatttcttttagaaaaaagatgcataaacaatggaactactcatgcattaattactacatatttttatttattttttattttttacaaaaaaaaaagaagaataaatttgaaatgaaaaataccttgaaaatgtaaaaaaaaggaaaaactgaatctgggttgtggtggaaattcttagttaaactgcagaacagaaagagagagaggaataggaaatgaaactgagatgaatgtgtgatgttcggtttcagaaaagaaagtatgtaacggaagaagaagaagaagaagaagaagagaaaggtagcagagattccgaagggagagtggaaatgacgaaaaggggcttttaccttttctaaagagccattcattcagtttcggagatttggtttttacgttaattaaaaacggacttgtgtccaaacctggttggctacttctgacaaacataaaatctacgactatcactaacactaacacttacactctcacacgtgctatcatttctaacctttcatccatctctataaacctaaatttcatgtacaaatttatcaaaaaaatttcaagaaatggtttagtgaaacagggttatattgtggcattattattttttttttatacatttttaaccacatactttaaatttaaaatttttatttttaaaatttagattcttaattaaaaaaatttttaagcattcataataataattttttttaatatgatctagaaaataataagaaaaacaaaataaaattttgtaaaagaatattcttttgtctagaaaagatgaggattgaaaaaaaaaattaatatggtctttattagatttttttttttaaaagaaattatttcttgtaagaaaatattataatcaggaaaaaaatttgtacaaaataccaattcaaatttattgtgcatgtttttaactctcttttgatagtgctaatgacaagcattttttcaacactaatatactactttttaaaatgaaaagagaaaaattaagatggtgtttggtaatgtttttatttttaaatttttcaatcacaaaaataaaaataaaatttttgtttttgaaaaacaaaaaaattttaaattaaaaaaaaataaaataaaagtgtattttgtaaattttattttttttttatttttatttgtcaattttatttaattcaggtccgaagccgagtctgaagttggtaccagggacgggtccaagtatggggctaggtttgaattcagtttctaaggtctaagttagagttggagtctaaaatattgattaaaaaactacttaaaaaatttttgaaaatgatttttttaaaaatttaaatttttaattaaaaaattgaaatgtaaaaataattttatagaatatgattttagaaaatattttcatctttttaatttaaaaaaaaaattaattaaagaatattactaaactcatcctaaattaaattattatgcctgttcaacattttgtattttttttggaagtgaatacaaaattaggtattttatttatacccatatatatacttcacactttacaggcttacagctagtaaaataaataaataatgttctgaataatgtggattttttcagagtataatataggaaaatttataaatactggaatttgagttaacttttacaaaaaatactgtccaacggaaatgttttcaaaaatactgtatttttataaaacaccagtagaacacagaacataacaactcaaaacaacagtagaaaaactataaaacaccagtagaacactagtaaaaacttaacacaatatactgcagtatgaaacttataaaaaatacagtaaaaaagtaaaaaataacgcctcactgtatttttataaaaaaaatagcaaaagttagtataccatgtaaatttccttataatatataggggaatatatattttttttatttatatcaattttataaatggatttttaaaaaaaaaatataaatggatttttgtctttttcctctttaaattataggcttgataaaatttccctcctagaaagaaatgcgaagtggtaacttgcaacagagatagatatgggcgtgaagaacctgtgggatgttttggattcttgcaagaaaactctcccactccaacatttaaggtgggttttctcactctcttttccttaatttaaatctatgtaatttttttttcctttcttgaaatgttttgttttccgggattttggggtgtgtaggaacaaaacaatatgcatagatctctcgtgctggatggttcaactccaaaatgtgaccaaatctcactcttgtttgaaggaaaaggtttatcttaagggactctttcaccgccttcgagctctcattgctttgaattgcacccttatattcgttacaggtatgcttttttagttctttttccacttgtaattagcctttttgaggtctcgaaattgggatgaattatatgcatattaggttagttatcatgattgtgtcactctgttgtggcattcagtaaaatatgagtatgaacgaactattaagtttccatgtatatcccataaacctttgtcagctggattttcaaagctgcaaacttctactggaattgttgccttaagtatctttaatatcatgttataagagagtaagtatagtcctgtgaattttgatgatacaaatgtccttgtaaagatttacttgccttggtatattgtcatctcaatcaatttagaaggtaatgttctttgttttttcatagatggatctattcctgctattaagatatcaacttacaggcgccgcttaaatttaaccactgaggtgagaatccagtcacaaactcaagttttattagcattctagatacatctggacatatttgtatgcttttcttctttctttttgactcaagttggttaaaggcagatcgatgaaaatgaaacaaactcagaaaaagtgtgttcgctacgaaggaatatgggttctgagttttcatgcatgataaaggaggcaaaaatcttgggcatggccctaggcattgcttgcttagatgggtaatattttctggcatcgtgttatattattagagtagaaagaagaaaagttctcatttccttttctatccgccttgcaatttgcaaataaggagaaaatgggaaagagagaagaacttttaatcttcttagtatttcttttgagggaattttaatcttcttagttgttgttgttgtttgctcctaaaatgtattttctgcaaaatatgttttctaagtttgttgacattttgctttcatgcaccttctttaacaacaaactaagaacaaagttgaacttcttccttttcttgttttctcttatttattttcttgttggcttttcaaggatcccttagacatatacttattacgtgtatcattttgttcttacatataggatggaggaagccgaagcacaatgtgcgttgttaaactctgaatcattatgtgtaagttctgcatttcaaaattagaaagagctccatcatatgacatataccatcctaaccatcgtccgtaatatattacattttaataatgctgttcacaaatataataaatcaattattgcgtccaccaggatgggtgtttcacattagattcagatatcttcctttttggtgcaaggacggtgtacagagatatctgccttggtgagtcgaaaaacagtattttaacctcaacttgctctcttgtagtgtatgtttatgcctgtgcaataattgtgtcaatcatttgcatttgaaataggagatggttatgttgtctgctacgaaatgtcagacatagaaagacaacttggatttggaaggaactcgttggtaatcttctagctgccttgtgaatttactaatcagcattgttttctttccgtggatatgttccaatctggatttttcttttttatgtttttgggggttgtgtggattttattttacttcacttgattatgatgcatcctatgatccgttggaattttaaatatataattaaccaaatgctgcatgaactttatacaagaaggtggtttggagaaactgtacttgttagaaaattatgatttgattatcctatcgtgacttgttcttttagcaaatattattatttgattagacaccaatcatttttctatctgaatatttaatgtcgcatgacattatatacatgcttattacgtatctgattatgatgtataatctccacatcttgttatctaaatgtgttgtactgaattataaaatgttttccccaatggagtttttaagcgtagaagggaatccttgaccttgttcattgtgatccatagatttctctggccctacttcttggaagtgactattctcatggagtacatggtctgggccgtgtaagttatacaaaacctgtttatttcaattacttttatcttttaaatttaacctatgctaattctgcagttgatacaattagaaatttgtgattattttctcttggttttaggaatcagcttgtcaaattgtgaaatccattggagacaatgctgtcctccagaaaatagcatcagaagggctttcctttgctaagaaggcaaaaggatcaaagaaacaagggaagaattccaagaacaaccaggaaaactccttaaataacgagatgaataacaatggtagatcctagttctgataccaatacatgtacctatgtatacatgcaaatatgcacatgaactgttgtatctttccaggatgtttgtcattttccattgagataataaccagattttcttataatttgcgagaatgaagttgcgggtaacattctcaattgggttgtgtaggaggcaagcattgttcacctgaagatttttcagttttggaggtgatcaacgcttatttatatcccaagtgccactcagcagactctaatgccgtgcaaaggtaattgttggttgggtttttttacttaaaaagatttatcattaactatcaatctgcattaatgaactttgtggtgttttgacttttatttgaacataaaggccccaagcatgttattttaccttttcatagttcatctatttcatctaagattcttttaactacagcatattacagaaggctggttggtaagttgttaagtacactgtatgtaatgtaaaattttatggactgtttgtcttattctatgaaatctaagtaaacttgatttatactttgtttctaaagggttcttgttcaacatccatttcaacatgtcaaagttcagcaagtatgcggtcagttctttgggtggcctccagagaaaacaggtttatcttctcatatcacatttttttttaatccttaaatacgtgcatgcattatgctaatagtttatcttcagttatgagaaagatgcatacagattacagaggttgggtttttatttaattgcagagaattttataattcttcctaacctgttgtggtgttgcaaattggaaattgatgtttcatacttgaaatttctttgtgaccataaattatggtttatactttgtaacattttcaagagatatttttccctttcacagagtcatttactctttatttttcttttatcttattcatgatcattgtttcagatgagtatatcctaccaaagattgcagagagagatttacggcgttatgccgatttgcgctcagcttcgttgcaacttagagagaaacttcctttgcataaggtgttactattactaaactcagtcctctctgtcttttgattccatgttccttacaatctggtttttaagttacggtaaaaatttagaaacaatgtagcagtgtagtataggatttgagttcacttgaatatttcttttcttatatcaactgcatattagccaaccctcttgatggctctgtcactaaagatctttcttccatttaaagctgccacctaagtgcccagtgtccaagatcataaagcagagaaaagttcagggaaaagaatgctatgaggtttcatgggaagagcaacatggacttaaaacttccgtagttccagcagatctcttggagaggttaggaactttcaacatcattagatttattgctaacatttttaatgattataagaaatgacatgatctcctcttttgtcttcaaaatcaaacataaatctctctttttttttttggtttgtctatagtgcttgtcctgagaagattgtagagtttacagagggaaaagctcaaagaaagaaacaaattcgccgcaaagcaagaacaaagaaacaaggagaagaatcttcttcaatggctgaaattgatcaaaaactccaaaatcttttactggacaatgaattcggaagtaacaccatcggttcttctcttcctgcttcaaaaacagatgtattggaaaacagaacacatatctccagtgaatttactccaaccatttcaaattcggataaagaatcagaaagtcacattgaacctgctactagtgttgttgttgatgatgatgtcaagtacaagaatgagataatcgatttattaagtccttccccgccgagattgcaacatagattattactacttaagaagcaacaagaaaatgtaagtattcaaagtgttgatgtagtagaattgagtgattcagaaactgagatgtctgctgagcaccataggaaagctagagagttgaggttgttcctagcaagcataaaggattaatctcatatcatatccaatattaatgagtatttatttattttatggaaatctttagctttgaaggttgagcagacttgtgactacgaatttacaaattacatgataaacatcattaaggcgatgaggttaataatcgtgcccttttttttttaatttttccgaagggggaaacgtcattacacagaaaataacttaactagtcaaatgccaaaacttgacaagcagcaaggggattcccattcctaatagcaaaatcaaagcatttttagctagatgagctaaggactaaagagaagagaattgatgtgttccagcagccaatcattgtcatatttgcatagcattgaaacaatctgattcaacagtgactcttctcccattcaattccaatcaaagaaaacttcagtccttctgaaattgcctacagtttggaagtgagcattaattgatttcagcaaaaacacctctttggcgcgcacccactgtccctagctgtaatatcaagcccacatcagccttcttttgagcaaacacacctgcatctatatataatcatattgcagccattagttgggggttgccacttctccttaggctccacaggtccattagagccatttcagcaaatcaactgcattagggcctttaccatttctcacagttttgttgcacttgggcacataccagatttgtgacgagacagtccccaaacagttcaaaatcttccctatcgagtgctctggagagacaacacaacatcattgtgctggaaactcttcacttcttctccatccaaagcctctgtttttccatatatgcttttacagctttgcaattccaaagagcaaggtaaaatgtcctcagcagcatttcctccacatctggtacagcttacttatttcacacttaatcatgaaagtagttgctactaataattaaagggtgcttttatggagagttatattttatacacttttcactgcattttatttattattttacattcccaaaattagcttttaaactttgtagacctttgaaatgaaatcatacaccccatacccatgtgtagtacatatccttgagataaagaatgaaaaagaaaagaaaatgaaaaatatttatcccacatatataataatatactagaaataaacgaaagttaaaacaagcaagcaaaagaaggatgagcctaaacttaagccccttcaagttcttcaattcaaagagattccacacatcaatatgggcatatccccaaaagtaagagtgaactacacattctattcaaacaaacataattttacatgatgagaccatatgcatttattatcaagtcaggcagagaaatagaagcaagatccacaataatcagattggacacatacatgtttatcaagataaaagataaacagattaagtaaaatcccatgatatgtataggtaacatatgatatcataatatattattatgagtttatgagagattaattaaagaaagcattagaaacaggggagtatagataggtgataggttgtggggaattgaaatttcttcaagaaccaattacacgacacgacctatgatagggtacttagcttcgaacttcttctcccaatcattgagaacgcccatctccttctcggtgagatcgtcgatggagggagagatgtcttcgtcgctcttgctcatctttcccagagccctgctggcgtccttcccggcgaacatcgagtaggaaccttcggggccgtagaaggactttcctgtcgtgacgtcgaagatgcgacccttgatagccacgtatatgggcttggaggggtccctaccgttgtattggctcagttcctggggtgtgagtgtcacctccattgctgctttttcttccaagatttgctttgcagattgagattggtgtttgtctcagtctctgtggagtatggaatatgaacagtgtgtggagtttggagtttggtggcaagataatgccatgccaaattccaaatttatcctttcatttttatttatttgtttgtttattttttctgaaatgatatccaatagaaaattagaatttttttcccttttgacataagtaatcatacatattgtagtgaaaattataatgtacaagtggacatagtatgttctttcatcttgagtttcactagccaagtcctcctctcatcatgttcttaccattttggtaagctatatctctcttaatagctccctcaatggtgacaagtaacttttgttattactaatataaagtcatatggctcttagtagagtctagtcttttatggactgttttaaagtatttttctatagtccttttcggcatgtttcttagcgcctttttggtttatgttgtttatctttctcggtaatcttgtggtgtcccctagtttttttttgttccccttgtggcttttgcttctcatctatggcgaatcaaggccctgaaaaatgttgataaccatgtggatatgaaaacatgaacaatgtcctacaaagagatagtgcgatggagatggaatgcttaagctttttgaagatatcactcttgaggatgtggtggctaacaaagcatgtgttaggaaggttattggttgcaaagatatgcctccttcggtggtcaaaaagattctcttgggtgattggagcaagttgggctttttggagaatgaaaaagtgttgaaggagtgatggcttttttctttgatgatgaagacgattattcttatgttctgcttggctggtaaatggtgtgctccttgacctgaaattgtggccggtggagggagaagttcgtgttggcgagttcgaagtcacaaggttttgggtgcaattccatggaccgcctactcgatgtttgacaaatgataatgctcccattgtggccaagagagtaggctcttttgttaaggttgaggaaaagaggaaggaagaacttgtgagaaggggggtacatcagatgctgggttgatgtgtgggtgacccacccaatcctcgcaagtttctttcttaaggcagataaaaaaccagattcatgggttaggtttaaatacaagaagctacaacatgtgtttcaactatggtagatttgctcactgggatagaatttgccattctcccatggctatggtgattcctaagatcagagaggtggttcgtatgtatgatacttggattaagagtgatatagggaagagtaattgcttctcaatggcaggcaaaggcgtgacccaactgatagtggactctacagatatcccctcgtggaagaatcacaaagcttctcgcattggaaaatggaggagaagagaaggcttggaggatcagaaaaatcagtacctgaacaacggtggggaagagaagagaaatagggtgaaagaaggtgtggtgtctactgagatgagcagcaaggatgttggtacgggataggggtgtgcgtccactactctggacaattctaacaacaatagtacaatgaggatcatgggaaacgaattcatagaatgttgaaggtggtattgttgctgaggtggataaaggtgggaatttgaattctaatgaggtggcaattgatgttgggccaaattacctagatttgcctagactagactttacttatggaaatcagaggaatggggaattaattcctgatattgggccttttattgctcaaagtttggaaataccgcactcttatgtttgtctatcccaaaactccattgttatccgtgttttcagagaagagacacgtggcgtaaccggaaggtaatcaccatcccataatgggcttaagccttcccacttgcagaagtccaagccagacttgaaacgaggccaagcccagcgaaaactcagagctttgcctccaagacataactctcttccacgactcaaaagccccctagtcattcgagacacggaaagaatagagacctttggatgaagataaagatacaattggaggcagaccacgtgagatgctcctagatgcctatcacaggatgagaagtataataccctagaattaagaaatggattagcaaaaccctaattagataattgtgaataattgaggaattctattattatatagttcaatatatgtgaattaatatgatttataatatggtaagaccccgttggtgagcaaggggcattttagtaattgtgacccgggaagggtaaaatgatgaattaatttaattacgtgcttaatagaa

SEQ ID NO: 295547 - DNA, 7897 bp, Cannabis indica
aatgttcttacagccgtggttttgaatgatttatgttcattttctatttatgtcttaactgttcggtttgttattttaaaataatgtatataaaagtgtacaaaatggtctattttataatacgtttcatgtatgctaaacttactatagctcattataaagtaactataatgacgatataattaagtggtaaaagaaaaaaaaatggtttagattaagttgttccatttttgcaggtcacatatacgaatgtgatatcgcctcttgcagaattagaagcgcaacagtttccgttggtccaatcttgtgttcttcccaagttattatctttaaccgatgatatttgcaaagctagtgctgaagcagagcggagaatagatgcccatgtcctcacgtgcaggtttcattatttactatttcttgtttttgtgaatctatgtttttgttgctctttattccatctttttacatgtaaaatgttagtagggtgagtgataattttgaagagcattgctagtataaggcgcttaggatgcccaacaatattaggacatggcatatcctcaatttagtagcgggttccatgtatattaaatgtaaatttaaatatgcgggaacgaatacgaataattcaactgactgcactagggtgctctttaacatttctcaattttgaatggtacgtaggcaaaatgtgttggagtgcgtgacctgaagaagaaaaagtttctttgttggtaaaaacctgggtggtgatagaatcacagaggttgagcatataccatatacattatttatcttccagtcagatagtttgttatagtagaattagattttcttaaatgtgcaatgttcaatcttctgttgcttttaatgtaattcatttgacttttgagtttacgcttttcacatggatgataagcgaagtgacttgaaattttgcagttacttagttaagcactaaataatgtgctattttgttcaatatggtcagaaaacgtgaagatgtatatcgtgtagtcagagcttttgtgtccaagggagaatggataaatgctgaagcaaagcgctataccctttgcctggtaagaaaattcttatcatacttgtttccactagtattgttttttttttttcctggttaaatgatttcggttgcttaataaatgctacttgttttttctttttaaaaaatattacttgttttctgggagccttgaagctagctaactacccatgtatgattgttgtgatcccaccctttattaaaatagttaacttcatgcttatgaaatttccattgtttgattatgtcttcttacagtcttcattgttaggaagataagaaaaaccgatgttgattattttctaatcagtgacaggtgaaagactttgaacgtaatgggttgaatcttacttcaaccaaaagagaggaaatgcagcggttgaggacacagatcgatgatcttagcttccaatatattcaaaatctgaatgatgacaattcctttctttcctttagtgagaccgagcttgctggtttaccaccagaatttcttaaggtacatttatgtctccttatcattatcaacattcctttcgtgtgagtatgaaactcttccaaattttggagcaaaaactgtctttactttccctctattgctgcgtgattggattaaacatgtaggtgtcttttgtctcttgtttctgatggatattttcagtcatgttaatgttatatatttcatactctcgttgcatattatgaatggatgtttgataggttgatgacaagttgttacctacttgacttaggctacatataattaagctctaaatattgcaaaccaaaaaaaaaaaaactgaagaagaagatttctgtaacttcggaaattctgcatatccatcttaatggaaagtgtgcccaatgtcatcaccaatgtagaccagtttcaaaatttaaacgatattgcttgaagccttatatttaattttttcagagggtctttacagcctttacctgtactgatgaaattttactgtacagaccttaaacaaagctggaaatggtaaattcaaggtatctctgagaaatcatcatgttgcagctgtattggaactttgtaaggtattatactctaaatctgttacctactaccattttgtgttgggaatttggaaattccaccaatggtttctttgtacttggcttcgctgaatgttatcttactgtcaactacattgtttaataagtaaagcagttattaatgtacttcacaatgtttatttcgagtgtttttaaggtgggaaaaacaagaaatatgatagcagtggcatatggaaaaaggtgcggggacatcaatcttcctgtcttagaagatctggtaagccttctgccttttcttattttcccagaaaagtattcaattaggtgaagtttgagttcagtatatatttgcagttctttcttttatagtatttcacttttcaaatggttatacaagatgtcagtgtttctcaacttcaaacaaatgaataagtttaggttgcgaatgaattagtgttcagcattccaaagatagaagtgtaaccaactacttggaatttgggattttatagcagagttgatgttccttactttctgtcaagtttgaaatttaaaaagttgttttgagaaaattgcaatattctaattggtaggatcagtgctactttttttccgagtaaaatggcttccaggtcaattctatccctgacatatctatggaaatttatcgacaagtatcattatttacttttcaatttgacttcatttccactttcatttctggttaattttaaaaatcaataagaattaattatttctgtccaggttcaactacgccataagtttgctcgaatacttggttattcgaactttgctgactatgctgttgatcttcgaatggcaaagacaccatcaaaggtttgttttgttatgtcaagtagaatggtattctcataaagtgagataattctagaggaaagtccctctgcttcctactgttctcagccttctttagtgtcaggggcgagaggtgtatgggtggttcattgcactgctgatagattttgtgatgtgttttccttcaggtatttgaattcttagaggacatttcaagtagtttgacagatttggcctctaaagaacttcagatgttgaaggacttaaaggttcgtttggtttatgttttatgctttccatatttgattctgttttttctgtcattcatttggatcttatgtgacatcagaggaaagaggaaggagatcttccatttgggattgaggatttactttactatgtcaagaaggtccaacaggaagaatttgatttggattttggggctcttaagcaatactttcctgttactttggttttgcctggggtttttaaaatagtccaagacctatttggtaagtttatttgtcttactctatgatacttggtcgatttttattgtttttaatgtaactgaaaatatgatttctatcttaaatgcaggtttaaggtttgaggaaattgaagattctgaaatttggcatcctgatgttcgtgtattttcagtttttgattcaagctcaagtgaacttatgggttatttctaccttgatatgtacaaaaggttcaagagtattccttttgttgttatatgtgtgttttaatcaaaattttggggagatgagctgatgttgcttatttaaacagggaaggaaaatacaatcacacttgtgttgtgggtcttcaaaatggtgcattatcatccagcagtatacgccaggttgtgttttcattatgaaaagatgatgtgtataagttataacttttttactttatggttacaaaacatttcgagttcgataatagtttatgaacttatgaccagcgacctcatctccccttatttgtctttaacaaccttttctgttcatggtcttatttagtctgtcatagagtttcctttgcaatatcttgtatctttattttaatttttgctttagtcttaggtgatcagttgacatactatgtatcatgaattgaagggtactttatatatttagagttctaataaatggattttatatctaatttgtctatcctgcttctgtaattagatcccggtggtgttactaatatctcaatttccaaaggaagtggatggacaccctgggttgttacgattctctgaagtggttaattttttccatgagtttggccatgtggtaagctttattcttttcttagtactgggactggttctttcactgattttacttaagcactgcaaattgtattcaatgatttaccaataaattgaaactatggcatgttctaatgtctttggtgaaatggtttgtaacattgagcatcattttttattcttatgaattaggttcaatatgtatgcaatcgtgcatcttttgcaagattttctggactgggttatgatccagactttgtcgaggtgcctgctcaggttctagagaactggtaattgttcctcatgttctctgtttactagttggaataaaatcaaattcaccatttaattacttcatgcaaaatttaggtgttatgagagttcttcccttaagttgatatctggcttttatcaggtaagaaatgactcttcccccctaccccacatgagatggtctaaataaatgtcttacattagctgtatgttttttctgatttctgtgattaggacataacaagacctattgaggatgaaatttgtaagacgcttaaaagatggcgctattcattttctgcgctcaaattaaagcaagaaattctttattgtaagttctctggccatttatgctctgcaatgaaaactttgcttcacctttgttggttttgaatgattttggggataatcattcatgtaatctagaccagctagaaaattttagtttagtcattgttagtattaatattttatggaaacaaaattaattgtttggaatgatgcctggttttttacaattaggtgagtaaacaaaattagtgtaaatgattgcgcatgcttttccttctatctgctaaataaatattgtggaacaaaaaactgcatatggccacgatctgtttgactggttctttaaatatttgaaaaaggagataatcagaagaaatgacaagaaacaacatgacagcagatcgagatgttcttgcggtgtgttttttacatgttagcttcacatctaaggcaccataagttgaatcaatctgtttctccattgccatagttgttgtgttagcttcatatttaaggcacaccaaaggtttgttggaaaaaaaatctcttaacatagtttagtcattcttcttgctgtgtgtgatctattttttcttttcttttcttttcttctctaccgcatacatgagtcacgactcatagttatcttaaatttaggtctttttgatcaaattatacattctgcggacaatgtcgacattgttgagttattcaagcatcttcatccaaaggtacaagtaaattctctctttgtgtgtagattacaactttatctctcatcttcttattatattttcccactttctgtgtctattcagattttgttaggtttgccagttttggaagggacaaatccagcctctcgtttcccttgtagtgttattggttatgaatctgcttgttacagtcatatatggagtgaggtttgactcttcctcaactaactcaaatattattttcatatacatactttggacccaacattatcctctattatcatgaacaatataatttcttcctaataataatgtttatcacattacaatcaattgtacaggtttttgctgctgatatcttttcatcaaagtttcacaataatatttcgaaccagtacgttggcatgcagttcaggaacaaggtaaacattttgctctattaaaatcaaaaccataaagtaatgagcacaactcacttaattaagaggggtttgctcccagagtctatgtgtgttgctatgttgttatggtttcctaatataatagtttttggggtcagttatgctcaagtcacttgagtaacccacaaacaatctttttccattaagataattctaaattttatttgtgattttatcattaacttggaaggcactggctcctggaggagctaaggaacccattgaagttctgtcagattttcttggaagagaaccatcaatccgagcttttgtcgacgccaaagctgattatagtttgtgatcacagaggtagcatcgttggttgtcttcttcctcggcttccctaatcaggattctgcaattttggttaccaactcgagtacatccccttattgtataatctccattcatagttttttctatttgaatcgatcgtttcagtgtctaatttgtcttaatttattgcatatggaggtttgtattatctttgtaagttggctgttttaaggcatttttcttttgattgttgagaaaatttaccatggcttttatttatgtatttattagtttcaaaacaacttattttctccactctttttagggaatattatcatttggtatgttgtatttatcaaatgcatcggtggtaatttgtgttttcaataatgtttgtatggtacttagtattttaaagatgtatatatttgtagcttgaatttaaattttatcaataacttataaattggagatattttaattatattgataaagtcttattcaaagaagaagataaagtcttattgattaaatttgaatatttttcattttcattaggtccaaattggtctacaaccaaccttaattctaagaagagtggtcgtgtttcataattcataccaaagaaaagtttaacattaacttttgttcatttattttggtattactttattattaatgatagtaaatagatagatttcaatacttgataaagaaaaaaaaacatcaattacagcaaaagggtaaaatctaaatttagtgttcaacaccaacactaaaagggtataataatgctctattttttttttccttattctaattataatatgaaaatggaataatggatatacgtattatttgaaaacacaaattaccaattatgcatataactattattgaaaatataaatttttattgtaatccactataaggaaatagtgtcaaatcacactattaatgacattttagtgtccggttagagttatcttaataaatatatgtcaattaataacaatatacatattgatgcatctataaattatattaagggataattgcggcaaaagtccccaaaaacttgaggttaatgccgattagtcctcaacttcaaaaattggcggtgaaaatccttaaggtcacactttctataagtccgttggtccctcaatctaactgatccgttaaactcaaataaaatgccacatgtcaacaaattattggtacaaatcatatttttaattaaaaaaaaaattaaaaataaaaaactaaataaattaatttaaaatcataaaaactaaatatattatctacatatccctttttttcttaaaaattatttacatatcttattactgaaaaaaagggcagccttcgtcttccaccttcaatctcaccccatcaaccccagatcgtctcatctgaaactcgcaagcccaagtctaagctccatccatttgtaaatcgcaccaccctgattttagaattttctcttagtttaaacccattttcggatctcgcaaacggtagatctgagctaagtcttggtgggtatcatcgccgaccgggtatggagtttgaatctatccatctccgagttcaaaactacgaatccagataaggtgtactaccttttgttcga

SEQ ID NO: 295548 - DNA, 6999 bp, Cannabis indica
tatttcaataaaaaattagttcaaaatcttatttgtaccatttgaaaaaaaaatacaaaatccattttatcatataacaaacaaaaaattcaattagtaacttttacaaaacacaacctatttatttatttatttatttttgaaattgacttgtttttattttcaaattttgataaaaattagaaagtgaaaacaatttatttttatctagttttctaaattctaagttaaaaagtataacacaacacaccctaaattaaccaaaactaatataacagaatcttaccaataacaattagttgaaacttgttgtaccctactttctccactttacacatttaagttttatcaaaatacaaaacactatcttatgtcagaaacaataatctaagttagtcggcacatccatgaatcagcttcacagccatatagtttctgcccctttctctttcttttctatgttttaataaagataaattgatcaaagcttctagaaactagcattttctaatctccacaaacattctttcctcagaggtgaatccgcaaatatggctttgataaagtcttgaacctaaaaacaaacagaatgaaataatataagcgaaaaagccaatggaattaaagtattaaaaccaaataataagaaaatttcaacagaaaaataaattacaaaatattgtatgtaagaaaattatgtgcttagatccgtatagccatacctctttgattgtaaaaccactgctcagcaaatctccactttcccaagctgctgtaatggattttagaggcatgtctaataattctgtacagaagcgaaaacaaacattaggttatcataacatgaattttttttctttttttttatatagggaaactctagagaaaagcatgcctgctaatctacgcatcttgcataatgatggaatgagatcatcaagtgtctgtgtcatgcactcttgtaaattctctgtttggttgatagcggccaaggacgccaatagagaagatagattttccagcatcaaatgaattaatctttgaagctatgaacagagtatcagaagaaattagatagaatgaaatatagacattatttcaagccaaaaaaataaataaataaaattgcaagtataatgatagttttttatagaactatacctgtaatgtttcctctgctgccatgtcatcgataagtagtatgtctcttgtaattctagaaaataccgactctagaaccatagacatgcttctcctgtatgtcgaaggcatcaagagtggttcccatataatatgcactttctcaagaatgaaaataacctggtcaaacatattatatccacattaacaccatcagcaaaaactcactgagagattcagcaaaaaaaagaaaaaaaaaaaactcagtgaggaaaagaacgagaatgccaatgcaagaataatcaaatgataaataaatatctatgaaatttaaggtggtcacgctacctgatcgatgctaaattttgaagattcatatgcgtgattcaaatgggtgttctgaaatccatcagcactgtctatagcctaaaataaatacaataaatcattcagtggcctatcacagaagatgtcaaaacagacaacctgatcggttatacaacttttattagtacatttcaatatgacttcacctctttcaaattataaataactaattgaatttgtctctgcagtatctgctctgccattacatgaaatcttggagataaatcaacaaacacggcatgttccttgattgaacatgggaaatctgggcgatactggcaaaataaaataaaaaaaaaaagaaacacataaattggattcaataaatttatttaagattgcatccacaaatctagacaggtcaaaaaattgaactccataaaaatagttaaccgtgaatccaacattatattagcatctgttgcgcagcttcattaaatagttacatgcaataaataagagtgcatggatgaatgagcaaggtgaaagactccaagatcatacactgtcaaacatgaaagtaaatacctcatatgcaagcccaagaatctcctgtgatagatataggcaatcattatgcatgagaacagctacctggttgatgccatcaagctgtctttctagcttcagaagtcaaacaagaaggttacactataaccattattcaatatgctaaactgtagttgttaaagcagaaaaactatgagattgccacggtaaatctagctctaacaatgagagaaggatttataaactataaaaaaataatactatgtgagacttgcccagaaatatataaaaaacttgcagtttagattaaattacaactttgagaaactggagtcattagaaggtcatcaacaatctaacagcaatcaaatgacctcatttctaaccactaatgaggtgttcatttcttttctttctttcttcttgataagactgtcagctgtcttcaaaaaagctgttgttgagatgtccataataaaggaatgggaagaaagccatataataactgacaacatcttattcactggatcatacaacgtcagctacagcaatttagaaactaatggaagtaacctctcaacttttatcactatctgctagctatgttctacattattagaacatctacagttaattgaatccatcattaagagattgaaacaggaatatggtaattgtggcaaaaatacctaagttattaggtttgtagcacttgagtatccaaattatctttttggtagcgaaagtaccaaaattattaggtacccaaattatttatttggcggcagaagtaaccatattattagtacgtttgtagcactaaagtatcgaatttatttttttggtattaagtttgcctatgtgatatcgaatttgcttataacttggtacttttgctgaccaaaaaaagaaaaataacttaagcactaaaatactgcaaacataataatttaggtattttctccgtcaaaaatataacgcgggtacataagtgctaaaatatataaattcctgatgcttttgccactaaaaaataacatgagtactgaagtgctacaaacattataattcacttgccgcaaatatcccaaaagaagctgacattataaaaggaaatataatcacaactatcagaccacattaacacagtctgtaaactgtggactcaaagaacctcttattatcattgaaaacgcatatgcaagctagtaattctgtcaatcgtcctacccaaagtctgaacaggaaacaaatatttagcaggcacagttagtgagttccacaaactaaccttgactggtataacaacttcataaagaagtataacatccctagcagcatggtagaattccaaagcgactttggttgacgacaaacaaacatcctgcccatgggattaatcaaaacactcttcagaaaaataattatgcttagtgatttattccattaaaatttgcattgacatgaagaaacataaaatataatccttacttatatttcttacatcagagcatcctaactaatgtagtaaagctaatgctatccgcctagcctgtaagacaaatggcattatcataccttcatgtattcaggttgtctaattttaaataattatcaattcaatatgcttataaaaacactattctaagaagcctcttattacttctaatgctctccgcaacttatccctcaaatgctgttacaatgtgttcattcatcgtatgtatgttccataagtcttttcattatagaagaacaatgcaatatcctacttcatgacacaattctagtcatctccaactatagatcccaggtatcaccctttttcaaaatttccagcatggctgaaagactccttgatgagtaattacagtttttttttttaattcaaatattactcagtaactacaatgataggcttctctgaaataagtatcttattcatcctacttatagagcggaattatagacagttgctgcaatcatgcatgcaacaaaaccctactccatttccattatttgaataaacataagcttcagttatctcaaaaatcacctgatatgggatattactttcaactagactaacaaaataatgccatatgatatacaatcaaactccaaataagcaaaacaattatagaagctcgtgctcatgctaggctgagtcaacaaacatcacaatatttagcagggcaggccaatcaattatatgctaataaaatgggcaggttcattctgtaatccacaccttaagtgtctgatgcacaagctccatcagctgaagagcagctttagataccacacacctttctgagaggaacagcaattgcacatgttcagaagtgttgacagccaccctatcattttttgcatactcctgcagcaaattccattggtctaaagctagcattatgaagataacaacaaaagcagtgatgttgatcctaaatactcacttgaggtatggaaaaatcacatcgcagaagcagctttctagcattcgccaagatttctgttttctttctagatgcaaagtgaacctcaacattctctgcataatcgcacaatctgttatccttgttatcagattttgaaatatatgtgatttcctttaaagcactttcaaattcagaagtgtgttcaatgatcttctagaaagtcagctaagttttgaagcatcttgggggacaacctgaaacaagaaatgaaacttaaggtacttgactcatggaacttgcaccacaaaaatatgcatttctcttatcttgaaaatatccaaacaaagagaaccatcaaagttcgtgttataggaccaacatactggaatgcctaagaaaatatttatttgtcattaagaatgggaacataaactaagattctagacatcataaacccaattatgaagacaaaccttagaaagaaaatttgaaataatcaaatttgaaatccttggccatgtcaatctcccaaaactttgtatccaagatccatttcctaagcatatacttttgcagacaaacttgatagtctgaataattcctgaataaatagtctccccctcattctcaacctgaagattggcaaaaaatatttcagtagaacacccaaaactcacaacaagcataatggttacacaaccactttcaaatagataagctacaattgaagattttcctctactcaatctaaccacagaactaagtacttgcggctggctcggatgcttgagtaagtgaatgaatggtccagagttaaagcccccccataaatatatctttagaaaaatacacataatgctagccaatatattcaagcaatcaatcaaaagcttagaaaaaaaaagaagcagtctaccttcgaaacacttaacggaactatctttaatatcgctccagtcagttcctcagagtcttgaaccaattcttctataaatgaaacaggcgatttgtaatttacagccggagagatgacatatttgatcaacaaatcggctacttttgccagcccatagtccaaaattccaattacctatcaaaaaagtaaaccacaaagtaattttcaccactaaatccaattgacacattgaatccaaacataccatagttacatagtttacacaatcaaatctcatatccgtaacacaatgttctactacacacaatgattcccatgctttaaatcattaattttcactgagtaatgggtgataaaaattatggcattgtggttaacttacgtctaaagcctccagaactgtacggagctcaactctggcaattccgccatcactaagaaaatattccactcgaactgcattcgattcctgatcaaaccgcaccgcctttgccatgaacttcaaaagaacctcttgaatctacaaaccgaaatcgaattcctctaaaaaacacaatcagaaactcaaataaaaatcaccaagagcaaataaatatgaacatcaaattagaaacagaaacgcaatacgatttccaaagaatgaaactcaatttccattctaccattctcctgtacctcatcgaagcaatcataccactctttcctcaacaatccgtacaccacgggctctccctcgtctacttgatgatcaccaccattacaggtcccgagagctttcttcaggtccctgagttcctcggcggcaaatctcaaccgcttacacctcaaggcctcctttgcagccatcaatttctcgttgatttctacgatcaccttcaccaaatccaacaactccctcttcgccctaacttgctgcatcttcgcattcatttccttgacggtatcggaaatctcggcatcgatcgggcggtcggaaatggtactgaggaggttggagacatcgccggagattcggtcggagcgggaaacggcgtcattggaaatggagaagaggttagagaaatcctggtggtgagagatgatgtaagactggattttggccttgatttggagggagtgagattcgagacgctgtatgaggaggcggagatcgggtgctgagagcggtgtggtggggtcactgaggtcgtgcgcggataggagatcacgaacgttgattgagtcaaagagggcgtccattttcggatgatccgacggctccagctgccgggaagacggagaagatgaagatggaaaagctgttcacggttcagagtatagtttatgatgatgacgaggctgttgggtaacaatggccactgagtctgattcactttttagcaccctcttaccaaatataaagcccaagttttatggcatcgcacgagagagtgttaatattggaaaattaaaaaaaaaataaaaataaaaagtatggtaactagttacctatttggttacccaaagtacctgattaatattatctttattttctcatatttctaaacctttttctcaattttcctatgaaataaaaaaaaaaaaaaaaatacatattttttgcta

SEQ ID NO: 295549 - DNA, 3883 bp, Cannabis indica
tacatccatttcaattcggactcagagataaggatcccaagtctctttgagggatgcagtatctacttcgataaatcgccccagtacttcaccgagcctttgtgcaagagcacgggatcgtttcaagaaggggatacctgaaacttgaatccaaaaagggggtggtagtgagagtttcagcagttaccacagagccggcttctaaggggtcatgactatgagtttgtagtcaaaatgccaaggttggccaatgagtactcgacgtctatccccaaagcaaccaaattcgacagtatagaagttgggctctttttcaagaacgttgatggaaaatctttcaggccacatctgcttgagtcggttcttgaaagcttcagagttgaagtggcgagtggtcaagagcttgacggctaagaaggcagaaggctcttcatgtccatcatcctcgggatggtcaggtgtttcagtaaaagaatgaatttgtgtttcaagagccgtgaggttaagagtggcagtaaaggtgttggacaagtcgtccattgtgagaacatgggtgggaatttgggagtgaacaaaaaaggaaaagctagtgttgagactgagataaacaaggaaagtatgcagagaatgacagggtgcagagtgaaacaaggaaagaacagatatatagaagttgaagtggtcgagtatatgctctggcaagaggatatcagcaaaaattaacttctccatgtcagggaaactatcgattatacctgcagggatgacagtggctcctagaattggggtagtgtcctctacaactatagatttaatcattgcccagggtggttcaggatgtttggttttcattaatgctaattcgagagaggggtttcctttataagtaaatactgaagaaatggaaaagggatgcagaaaggaattaatctcagatgggacagcagcacaagagtaatggcaaattagaaggttacctgtgaaggagatgacaaagaaattaaatgttgggttccgtttgatggcagcaaacgacatctggaggtgataggaggaaccgtcacttgactggaggggcgaaggacggactgtaacgccaataaacgacgacgacgacaacagcagcatcgacggcactacacttcgaaccctaggtcgcactcttcttcagaggagctttccagaagtttttttatttcgaaataaaaatttgcatgtgaatactttttaccgttacatctatgatttatactaactaatacagagtaaaattatctttacgtcatgagacatgtaaattattacagttcttttgttttttaccccaacttattaccaccactaaattatgtctacttttttttttaatagttaaattatgtcttttgaatatttttggtcaactggaattggccgctttattctgtcacttgagatacaagctgacacgggcaaagatctcttgattccttgctgctaagccaacttggaatcaagctacatgtcacctatctcactcatttcttcttgttattaataagataggttgcacccttctttaataataaggtcaaatgctaacgtacttaatttgttttccaaactaattattctagttttgaaatataggattttagttgaatttatctcatgtagctaacaaacgaaacttatacgttagcggcttgatcctatgtgttgactcaatttttaactaaagacgcggaatcaagatttacaacaaagtgtttgtgaagctataaaataatgacaataaattcaataaacagtaaacgacacaagaaaatttatagaggttaaatcttaagtttttggcattaacctacgccccctttgatggtattactctaagaacaattaagtgttagggtttatgtcctgaaaaacgtataaagacatttctatttataagtaaaagttgaacattttgatatatgattgtgtttatcgagattttcagaaaaaaaattaattaattagaactgaaagaaataaaataactaaaatagaaaaagtaagaagagacaaataattttttacgtggttagggcgttaattaaccttagtccatgagtcagtgttattcagttgttctttagcttgaaaaacctttaggaatacaaagaatatatgttctcaagtttgcctcagcaagctttgcaagacaattcaaccttaatctataggatttgatgggtatttatagtagtttgaaaattacatttagtttcttcttttcctctgttggggagtttacattggataacaaacttgaactgcctagtgaagtctagcccacgaaggatagaatttgctgactaggcagatcggatttgacttgatttggtcaacaccgtgtgctttgattgagggaaattaactgtgaatttattgcttgacattcatttgaggaagtttccccatttaacttggtacgatgctcggtcgagatatttggcagctgttgtttctttattgtgcgcaagaataaaaaaggaaattgaaagagtcttccaagaacactttgtctcacccctccagtctcatggtaccagacttgcttctgggaatgattcgccaatggcagaagctctatggtcacggaaatgggagacgttcctagaaggactcgtccaaatgggcttgccccactttatcttcgttgagggactcactgatgggtcttagatgctgacctagattccatgtgtccattgctagaaacgcagataacatttacccccaagcttccggaatgtttcgtatggtggaagcttccttcacgccttcaatatggatatgtggaggttgagggataaaatcatgaatttttaggtgcttctcaattacggaagttggcttccgtctttcattgtagtacatccacgtgtcaatcacatgatggtggaagggtgtgactatcgaggagtcgctttctagaaacgactatcttgtgacgactgttcactttttggaacgaaaatcaaaagatggaatcttcatcattgatttgtgcctcaatcttgggggagaattaattgtaaagatgcacgtggattttggaactccttggcagttagatgaaacttgtgtttctggggactagattgtggaccatccttcttctttcacgtggattgctctttttaagtataaataccttttgtgaactctagttaccacttttctctcgtttccaaattttacccttcaaagctcatactgcatcctttgagtttgaacccgaatttagaaatgagtcgtcttcttcaatatggaacatcctgttgattttgccttagtctgttgttgatgattagggcacgagaattcccacatcattaacccccagtgattaagacttttacagcatgagaaatcgcaaacctaaatttcaacgtagaaaataattcgttgatcactttagcatcttgtcttcgtgaaaggtgcaatcgacttccccaaccagacccaacgacgattaccttgacatctccgctttcgatagtaggtatattgttccttcatctgtgaaccgtgttttctaggtttactattataagttttgcatgtatttgttctaggatgcgattaaggttttgatctttatggctgtcatcgtagatagatatagacatcaaaaaccattttattttctgaattttaaattttttgaaaatcgagtattttgcagtagacatgctggcaaaatttttccacgcccaaaatccctctagtttttgtctcttgattaatttccatcctgcttttcctctttgtcattcttgagttcctatttggaatgaatgactcctaggagttctcatttctgaatagttagtctagttgggacctctccaag

SEQ ID NO: 295550 - DNA, 4997 bp, Cannabis indica
aataccttatttaaagtcaatgaatagtattaataagtgacaaagagataattaaaaaatgcaatttagcacaatttttagcttgggccaaatttggaacacattttacattggagttaaattttaacaaaatgttctaaaaaatagtaacacttcatatttatagctctccattggagatgctctaagagcattagcaaaaagcagtttcttggtactagcccaaagaacattccttacatatctaaagccatcactacaaaaatcataaccccctctctaattgctacatcacagttaagtttgatccagtccatgagcggaggagcccactcagtgacactaggagaaaattgtaattgagacataagagagtgagcacaatttgtataataatgagcaatagaatcaatataataatgtacactatacatataattattatgtaccttgtcattctttgctctccatataatgtcaactatgatagaaacatagaaaaacacatcatcatcattcacatctcttatattcaaactctaaatgaatttaacataattccacaatatagtccccgattcctgtacaagaatgagaccacctaaatattgagcttacttacttacgattaaatattattatcaatttattttattttattataaaattactaaaaaattattaatttttataccatttgattgtttacctaaaaaaaaagagatttagcataaatataaatttaatattttagccacaaatttctcttcttatattaaatttgacatgttagggattcgtcgctctatttagagtgtggtttggtttgtgtatccgttttttgtttggctatggcatctagtagtttgacagttagtgagattgaaggtagatgggttgagatatcgttggaagaggaggatgaggtgggtatatcgatggaatgggtagaaaaagaggaagtcgctattgatactcgatggtgtctggttggaaaacttttcacaggctgagttttagactttgatgtatttcagaatatgaaggtcttcttatggcagccaagaaaagacatgtatgtaaaagaacttgagcctaatttgtttttgtttcagttctaccatgaagtagatatgataaaggtcttggttggtagttcttggacttttgataagaaacaacttatcattccttggttgaaactaggtgagaattctcgtttagtaaagcttaatcatcttgatctttgggtccatattcatgatcttgaaccaaggtatatgtctttaaggattgttaaagagattggaatttttatggggatatttcttgaacatatatgaataacttcactggagagggtgtgagtatatgcgagttcatatgttaatggatgtcaagaaactaatgaaaagaagattgaagatttggatgaatgataaaacttggttctgggctaattttaagtctaaaaatatgtctacattttgcttcatctgtggggtcatgggaattcagagaagttttgtgctaagattttttataaaccttttcatctactcgagaaatcttatggtctttacttgaaggtggctccaaagaaatctaaggggagtataggagccaattggttccagttaagggtcgtggtggggccatgttaggcaagtgattgaaacacagggggtacatttggcacaaatattgatcgtgggaaggaagctgatttttcagggtaatattataggaaaaaaagtcacccatgaaaggggaaaggaagttatttctaagaatcaagtgggctaaaataatagggatattattaaggaatttaaatttggaagtattttaaaaatgggtctttggttattgctgacccaaaaaagaggtgtcaaaataatgatatagttatcatgctaaatggtgttaatgggcctatttaatgtagaatgtgatgatatgaagtaggaagtagttgagggtattaatttgtcaaaaaatgagtttttggcgggttctgatgtccaagcttgttaagaattatgagtaatttaagttggaatattcgtggacttagttgtatagcccaatctaatttttctttgtgaaacactttttgagaaagaaataatggaggggataaaggcccaagtgggtttggaaagatgttttgttgttgaggcccaagggcacaatgagagtttggctttattgtggaaaagagagggtgatgtcgtatagcaaggctactctaaacatcaccttgatattatcgttcgtatggagggggagagagtggtatttaattaggatttacgttgaggcaatagatttcgacgacatacaaccagtgatctttttcaacctctgtgctttaaatctcaattatcgtggtgcttaatcagtgacatgaacaatcttgggagacatgatggaagaaaggagggttgaggtatctgagcaagcttatcgagggattttatgagtctatggttgattgtgggcttcaaaacttaatgattcagggatactctttcttttggaaaaaaatgagaaaattataaatcttgggtggaggaacatctagataggctttggttacataagattggcttcatgtattctcttcagctaagctctataatatttagatttctactttcgaccagtgccccattttttggttccttctgtgatgaagatgtgggtggggaagaggtttttttggtttgaaaatacttggctctgggagcctatgttttaacagtttgttaagtcttgttggaaatcgatggggtggtgtagtcttcaggagaaaattaagggtgtggtgaggcattggctaagtggggtggagattttactataaatttcaagaagtgtatcagtaatcgtaaggctcaaattaaaaaatttaaatagagacaagatggtgattcagtgcaaaaagttaaagctagcgaggatgaattatgtgatcatttagctcaataggaggtattttggaagcagtgatcaaaatattgttggcttgagtgaggggataaaaataacaaacatgttcactctgtggctaatgaaaggaagcacacaaattttattcaaacattacaagggtcaaatagaggttaggtggattagggtactggtttggatgtacttatggttgactattgttatctcaaaattcacacaaatgaaatgcacctggcaagctgacacgtggtagggaaattgaaccctggacggagtattaaaccataatgtactgactaggcaagacaatgctaaattaaattgatgtataaatgctcaaagtgattatcacttgaatgagtttaagatctcacctcgcgcgagcgatgtgagcaggccacgtaacgcaaaaggctgatttaaggaattcgctaaagatattttaggacactcgagatagttagctttaaaaccctaagtcaaagaagaattccacaaggcattagatactcaacctggttggaatatcaagatacaaaggacaagataacatcaccaagactagaagagatgtatgaaatgagaccaatgcatttgcaatggctaatggtctcataaagcatagaaaaatgaggttttatgagagcaaggcaaaacttttggccagttctcgcatcacacatgaaggtcccaaatgtgtgaccaaggccatttccttggccagtggtcacatattgagaagaaaaagaaccccccatgcaattaagccttctctcgtggctagtggtcgcataagaagaagtgaaagattaaggcttcatgcgaccatggctccccctagggctagtagtcgcataaaatgatgggaaaagataagccctcatgtgaccaaggccaaaccctaggccaatggtcgcatatagagggaaataaagggatcacatgtgaccatggcatttcctaggccagtggtcgcatacaatgagacggaaaggagcttgggcatgcagccaaggccaaaccctaggccattggtcgcataccacatggaaaagcactatttgatgcaactttgatgtatttgggaagctatatgtgagaaatgatcaaaagataagtcattgctccttggacatttcgggagccttgaaaaccttcaagcttggaccaagctctaagacattctcaaggtaacataaaatggcaagtgtaagtcattatacatgaccagtggccattctcatgccactggtcgcatatgatattatctccttaagttatggacttcattcagtacacttgaagacagaagcttccagaagcttttcaaatgtaaactaacttcgcaaattaagaagatatttacttttatgtaatttatttgttaattatttaattgtaaatgtgaaatattgtaacaattgtagccattcttctgaagtgtgagggagtgatggtcagaccatagtattataaaaggcattgacctagactaggggattcagtctttctgctatctgatctcctaatcgcattctagtctagatggttaatcatttctcttcggttagtcgtactcaagaaaaccctagagaaaataaaagagatttccattctaactttctagccaccatcattgtgagcctgtaagaaaagagatcttgccattgaaatacttaaatgcattactttgggaacataactctggtgtgtgtttgagcactgaaaataataaaactacaagtggactagcccattattgccaaatcaaaggaggtgaaccacaaaactctgtgtgattcattttctattagtaacagttttaccattgacaaccattaaagtttgagttaaattttctcgtttacaacgttctttggttagttgacgaaagattatgttaagagatgataagtttggttttttggaaaaagttatggcaactaaaagtccctcctaaagtaaaagatctcctatggcgagcttgtaatatcccagaaaataaataatatttaaatgga

SEQ ID NO: 295551 - DNA, 8952 bp, Cannabis indica
taaaataatttccaacaatagctacattcttttcttattttgtatttacaaaagctaaaattctacaaacaatttgtagatgtgggtataaaaaaaattacacatgcaataaattatttaaaatttaattttgacacattaaataattttaaattttctaaagaattataataaaagaaatgctaaggcactacaggggcctaattttatctaacatatcatatcactatctatcggtagtatcacgtctcatataatttaatataatagcttttatgagatattgctaaacaatcacaaaatatcatcactaagtagggtcgaccttgagaatatatgtatcatggaactcgaattcatactattgcataatatgttatacactctaatcaaccaaactataaatatttattattaaacatcactactggtgtcttatagcaatgctcttgtaataaactaaccttattaaaaagagttttttacggctaaaccctctcaactatcactccacttgcacttaatcctctaagcttaaattttgacggtaaaattctccaaaatacttaactgcttgcaaatttaaggtgtcatctatttttttacagttaattgtcaatatagactgcttatgtgtacacttttgtacatgtgataaatttatattggtacacctaatattattattttaaaaatataaaaattatttcaaaatttataatattttttatttttttaaaaaatttaattttattttttataattttatttaattttaaaatgaattttgaaaataagttttaaataataatattaggtgtaccaatataaatgtaccatgtgtacacaagtagcccataatgagagttaaccgaatgacaccttaaatttactactaatacattcatttagagggttttatcgccaaaattatagcttggaaagttatatacaagtaaaacgatagttggaaaagttttaccacaaaaaactcaatgaaaaataaatttataacttattcacgagtaaaaactgaaacatatgcaccaataatcctttttagttgctatcccatggaagtcccaataacgtagagagaaaaagtttgatatatatgtggcaacatattatgtttgactagtaaaaattaattaataaataagacaagaattgaaaacattaataatggttggactggcaatatttttaatgggtatgttttcattgtactacacgtagcaaaattgaggtaaggtggctagaattttcaatgaaacttgttgatgactgggattttgttggcttgttatttatttatttatttaacctgaaagatgtagctataaaagtattgttattgaatattaatagtacctaggactgttagatatgtcattttgtaattgactagtaatatttttaaaaaaatattatattaaattatatgtgacccaatatttaccaataataatattgacacagttgctagacattactggtactttaacattttttatcacatatagttattgtgtttgagttctaaacattaattgatttttaacacttaattaaaactgctcgaaattaataatgagaaaaatcatgtatgaacattgaacatcagcaaatttatttggattttggagcataagtttacttgaatttgaagaaaatgttggttcattaatattaaataatgctattgccttatttatcggtatttattttgattacatcaaaaccttattattttttttagttaattctttctcgaagttctgatcccttgttttactgcggttttggtgtttggtgtggctataacgataagataattcatgttatgcagtagtgtaaaactaatcatattaaattaaaggctcattttctggttatcttatctaattgaacctaaaaaaataaataaaaataaattacatattagaacgtgagaaagtgacaatggctaacttttcaattttgttcattattattattattattgttgttgttgttgagccttttcttctgttatctacagggaatcttatagacataaggttattgggctataattatcccaagagcatagttgtaaacttgtaatcaaacaactaccgttgtcctccacactataaattataaaacattactctatcttgaaaattcaaaagccacagtggtgtgataccttttgaattgtctttataatattgacaacccaattttatatgattttcttgtgaaaatgatgtttttagaataatcaaactaacaaataaatttaatttcttttatttcttcaaaagaaatattatatataaatgtgttgtctccatagttatacaaataatgaaatcggagtataatatattcttcacaaaataatgtttctgacacattgtcgaatatacccaaagaactattttataaaaaaattggtatttaaaacgaactcgccaataaaaagaaaataggaaagaaaaaaaaaagtagtcctacaaatcttatcaaacatccaattgaaggaaaaaaaaaaattgcaaattccatggtaaaatcctgaccgagctagcccacttgaagctaggtccaataaattatacaataaatgtatagccaaagaaatattgaagtgagaatacaaaatttgtcacccaacaaaatatatatacttatttttctctttttaatagaaaacccaatattttaatttaagagaaaaaaagaaaatcatcaaaattcaaatgtgggtacaaaggggccctacaatttttaataacttttcaaattttgttttatgctagagttgtccttgttttcctttcaaagattgaaatttcggttgaggcggcttactttaagctagttacaatatgtgcctaatatcatcacatattgctgctttataaatgattagaaatttaaattaaattatttagtatctaatactgaattatactaatatcggttggtagcttttaacatttatctctaattaaacatgaaagcttatcgccttaaatagagcaaagaataggtcaacattgggttcaagaaacaccaaggaagaacccataagaaaaagaacattgttatttagtaccctaccaacgtgtcacctaataatttattatattatttatttaataaaaatatgtgggactgatgtaaatattttgtgtgataaatcaaatattagatttgtttgaatttataaaatatataattaattaactataaatattttaattatattcaaattttgatttatcaaaatatttattacttattttttttttttaaaaaattaattattaaaatattctaaaaattaattaatattatatcacttgtaaatataagttatgctccccaagctcaaaagagtaattctttttattctgattttcataaatctttcatatatttacataataatttatataaagttttaataggacctaatattaaaatgtaccgatagcggtacaacattgtgatctcgacatttctgtaagaaaaaacttattagatattcccaacactacaccatcaccattcaccattcaccaccaccaccgcaccagcagcaattgcaaaaacacatcccaaaataataattgcgagactgaagaaagctcccagttccaggttcattaatagctccggtgtcctgcagagaaaaacagttcatgcagttggccatggttgttattgtcttcatttattgttttaccttcttcttcaaaccccgtgccatctcaatgtccacatctatactgagctctaattaagattatttcagagtaaaagattgtatatatttgtatacaatatttaatatagatacataattcttgttccggtgtcgtttctgctattgggttgtgtgtttcgagaggaggaacgaagcatgcaaaattgaagctcgtgattggagcttagaatttctcggaaacccaacaaaagagaaaaaaagaaaaagtttcttcctttgggttcattgccccaaagagaatcccattttctgtagtgtgagactctaaactaaggttgtgaagtcaagaagatgaaatgaaagcttcgtatatgaacttcagctgaatatcatcagaagtagccatgaaagctcaagtttgttttttcacggtttttctttttgccttttttattcagtggggtttagctcagcaagtgaggttaagctccagagctgagtggtcggcgttacttggcctccggtcgtcacttgggcttagaggaagagattggcctataaaggtcaatccgtgtagttggcccggagtccagtgcaaccaaaatggtcgagtcgttgggcttactgtctcgggactccggcgaacccagaaaggccgacgccaaccccagttcgccgtcgatggcctagccaatttaactctccttacttctttcaacgcgtccgggtttttgcttcctgggcctatacccgacttgtttggcgaaagccttaatgtacttgaggtgctcgacctccggtcgtgtttgattattggtccaatacctcagtcgcttggcggtttgatcaatcttcgttccttggatctctctgataatagcctttccggtagcatcccttcttcaatggggcaattatcagagctatcagttcttaatctttcccgtaattctctcaccgggtcgattccgttcgagtttacctcacttcgaaatcttactactcttgacctctcctcaaatttcttttctgggtcgattccatcaggtttaggtaacctctcgagacttgagtttttaagtacttctgataatagtcttaccgcttctatacctgttcagttgaataaactttctcgacttgttgagctaaattgtagcaagaattttttaactgggtcatttcctaaagaattcacgggtttgaggagcttgagggttattgatattagtgctaatggtctagagggtccattgccaaagggcttgttttcaagcctttctcagctgcgggttgtggttctgagtgacaataaactcgatggtgctcttcctggttcactctggtctattcccaacttgcagttacttgatttatctggaaacaattttactggagctctgcaaattccgagctcaaatttcagtacgaagaatgccactttcaacctctcaaacaactttttatatggaaatttgacttcttcactctggcaattgcgtttctttgatttgtctggtaattatttccaaggaaaggtatatgaaagttcaggtaataatgctaatctttcaaaaaattgcctacagttgccgaatcagagaaatttgcaggattgtacaaacttctatgctgagaggaacttaatttttgaaaatcctgggatcccaaaaccaacaagtccccaagagttagaattgaagagcagaaatagactgatattcatactggttggagtatttggtggatttggcttcattgtgcttctagtattggttcttgtagtgttgctaaaatgtcgcaataagaacgttggaagtgaaagaggggttgcaaatgcagagcctgtatcagaaagagccatcccttcatttcctaaagatctagtatacctttcaggtctgggagagtcgtttacttacgagcagattgtccacttcactgatgattttagtgacacaaatctcatcaagcacggacactccggaatcctgtttaaagggcttttagaaggaaccccggtagttattaagaaggtggacttgagttcttgcaagaacgaatcatatatgatggaattggagttcttccgcaaagcttcccatacaagactagtcccactattgggacactgcttggagaatgagaacgagaagtttttggtttacaagtacatgccaaatggagatttgggcaattcgttgcacagtattgtgagtttgggagatgatgggttacaatccatggattggattacaaggttaaagattgcaataggagctgcggaatttcttgtttacctacaccatgaatgcagtcccccctttgttcataggtatgcctacattttcgctctctgcttctgaattctgaatttgttgatttagtcaagaactttattgcatactttaatatatgatctattttttctttaatgaaaaaactttcatgatataattgtcaatggtaggtaacaagtattgctgaagttgttgagtatatattcttgttggtggtttatctttttcagtcgatatttataatatatagtgttggattatacatttttaaaaagtggaagaacatgattcttgtctgcattttccactcctcaagtactaacagtataatttactttccatgattaaagggatattcaagcaagtagtattcttctagatgataaatatgaggtgcgaatcggaagcttgagtgaggtccatatccaagaaggggatgctaaccaaaaggttctcaacaggttattgaggaagcaacagtaagtcttttaagctgacccttactctattttttggttgtggtgaacattgttagacttatttcatcttaagtacttgtatggtttcactaagcttctaatacacaatcgtggactcacaaattacatttacttgttattttgcagaacatctgaacctggcccttctggtgagtatctttactttgtctgaactttattgtcatactcaaatgagatgacaaaaacaaactacttgttcataagcatttcatctttcattttcaaatcaataatgggaactttttttccttttttctttgtaatggacagcctcttctttggcaatttgcactcaagatgtttacagttttggaaaggtattacttgagctcgtgactggtaagcttggcatcagcaaaacagacgatgccaccacaaaagattggttggacaatactgtgcgtaacatcagtatgtatgacaaagaactcataaacaagatccttgatccatctctgattgttgatgaagatctcttggaagaggtatgggccatggcaattgtagcaagatcatgcttaaacccgaagccatcaaaacgccctctcatgaaacacattctcaaagcattggagaaccctttgaaggtagtgagaatggagggttccagctctgcgaggctgcggacgacatcatctcggttgtcttggagtgctgccttcttcggaagctggaggcacagctcatcatctgatattgctgctgtaccgggctacgggaacagagagaatttcagcagcttcaaacagtctagtagagtggggtctcagggcagtggtggtaatgatcactcatcttccaacaaaagattgtctagtgagattttccctgaacctgttgaaatgcaagacttggaaaagcaagacgagcattaaagtttaaaagagcgtttcttgggagtttatccagtgggaatgggatgggaactactcaacgttgtcgttccacttccacttccacaactcaaccaaccagttccatggttccatatcatccgagcctgtgttgaattgcttttggtttagtacagcccttttcacccaccatgattttggatgtggagatataaattttggagcttggtgatttaaaagctagtagtacttggttctgaaagcatgtttttattgcccaagccaactttagatgtaattgatatttccgaattatatatatacatgttacgtagaatttatctatattcccaataaatggtgattcttgcttttacttgaaggaatatttacaaagcaaatgctaaaagagaaatttgagcttctgttctattatttttaataattatctgaaaaaatgtttcacttctccttcttctcttatcttctctcctcttccctttctctcctctctacccacggcaaagcaccccaccaattccaaaaaaaaaaaaatctgatcctccattgaaccacatcagaatatccattaacaccattaaaacagttaacgtcatctcctctcaacgtagaagaacccattattcactatcaatttttttttagtgtttttgatgatttaaaacttacaaaactcacaaaacactatattatctgtttcaaacatctttcatgatttatttgttttgtttgaggaatttttttttccttaaaaaacaaaatctcaaaattggaaattcacatattttcaaacaaaacaatgtttaaaatgatggtttgcgattgtctcgttaaaacttggttttagacgctcaaacgatattaaactgatagtttgcgatagttctatgtaaattttagagaccgaaaataatgcaaaaggatgtcattttgattgtctttcaatgatcgcttcaaaactttatttcagagattaaaaaagatattaaaataacgactcacaatggtcccaaaaaaatttaattttttgagactttgttagtgccataaaactttattttggaagtgaatcaatgtagaattgtaaattctgaattgatgaattgttgatgtatgatcaggtaatttttttattcatgtaataaaaacttaaaaattataattttacactcagattgtgtttaaggccatttgccccgcctcaaaacataaaaataagatgtcgtttgataacacttctgttttctaattttttaatcacaaaacgaaagtaaaatttttgtttttaaaaattttatttttgaaaaataaaaatgcgatctgtaaccacttttgtttttcaattttaaaaaacagaaaacaaaagtgtcttctgtaaagtttattttatttttagtttttgattttatttaagtaggatctaggttcggagtcagactcggattcgggtcagaggccgggttcagcgccagggccatagggagagatttgggtccggatctggtcggagtttatattaattaaaaaaaaaa

SEQ ID NO: 295552 - DNA, 1588 bp, Cannabis indica
taaaataatttccaacatttacctcttcttttgaggctttacttctgttttttagactattttaagggttgttcttgttaggttgttgtgaagtgtatggttccagcgaccaatactttaaccctttttaccagtcttcaccccttcagatgaattggcatccgcgaactccaacttcttattcccggattggcaagttgtcacggagccttagtactttctgcatgccatttgtggctaattattgattcgagaatgctgctcaaggaacactagctcaagggtggttttatttgcggaagggggagctttggcttttcaaatacctcttgggctcatgggtttcgggagtgatcttgagtttgccatagactccagcgccctgggagtgatgcccgtaagggctatagacttcaggcactttcccttgtccgtaaatggtgctggaaataatgacttttgagtcaatttccttgcctcaaacattgccaacatgagtcttcaactctttccaacaccccacaaattaaattttagggactccactgaggccattgagaaggaattcaggcaaatttttcttctggggaaattttagctaaaaatgcatctcttctccaaagttaccccaacttttaatttcatagaggaattgaagcatttttcccttaggaaattcggttgaaaatgcttcttgcttttggtttaatatgcatgaagtgctaatagctttgacaaggtgagtgagtaaatcgcactgctgattccaagtcacacacagctaggcataacaccccccaaatgagtggagagatttggttgcctccaatttctcagtcatttgtttgaaacataacttatggcaccattgtgtccctttttggtcacgtaagggagagatctggacgtgtgtcaaggatctagccaggttcctttctgggaggcataaccatattcatgtgaattccccatttgtgtcctttctgcctaatgtcgcttgtgaaagaattttcccaacaaacaatgaataacaagttgaatttgacagtggtcttccaactccctcaggggaaggtttttatcgtacttaaaatcaagtgaaggcttcatgcttaccactatacgtaaagactaagttgggtggcaaactttgagtgattcttccttcaagaagagagggtcgaattcgtgcctgacaataatatcttcattcaaaagtttggaaaataatccctcagcatgacagaaactgcatggtgaaggtacacgtgctcgtggaacccctgttgagttgtgtggaggactttagcttccttgaaggaaagctaaaactccactaaaactcaagtagcggcctcaaatttgaggcaaagggccgtgaaacatcactgggcatgtgacagactttgagcagtccttcccgtccaggaaagagggttgatgacgtattgaactcccagtgatctttcacacacaaaaaaaacttcgtgcttgcgggagtcatgttgaattttatgtggcagacttcgacttctgtgaggaaaggctgaagttgcaataaaattcaagcgatgactttgctttaaaa

SEQ ID NO: 295553 - DNA, 3358 bp, Cannabis indica
tcggctattttatgaacactcctgcgcaagttttatatgtacgtgaacctaattagaccatatatattatcatgacaattaaatttatacagcctcttaaaacaaataatatagtaatatacaataaacgtattttagcccttaacgaaatgatatttagattcaacataattttctgcatcccacaggaatgatccaaacgcaacagcctccaacacaagcattgtcagcccagaaaaggtaattgaaaccacttcatcattagatgtatctattgaaccgtcttctgcaattttaatgtcaggcctaccgaacagagcctgagtttgcttctcaatcaatgaaatagcttccttggatcttatagtagcatatctctgaagtgtatctgcatctaagtacatcacataggatcgaagtctgtatgacctaccttccccgtcgctgtcaaaatcattgtcatcaggtggtactctgatcaacgattcaggatcccataaccggtttgctggtgataggtcttccatgctatcttgttctttaatgaaacgctcgggaagagttttcatggttctctcaagctgaaacctttcatcaactctcttgagaaaatatccatacatgattgaagcagcatacagttttccaagttttattttgctaatctgaacaatagattcaaggggccctacaacccgctccccaagcacaagggataagtgactctggatcatctcaaatgcttcgggagaatgaatacattctagtttctgctcttgatttggccaaaaatccacgcggccagtgggatctgaagtctctgatatctttggtatcattgtaatgtcattctccacaaatttacaagcaattaagcagtataatatctcttcgagggtgttgcgcctttctttgtctttaacttcagcaattctcctacatttacgacatgattcaatatatgttggtccaaattacaagaaatcaaaaagtgtataaagtaatagagggagaaaaatgatatgaaagtaaagtaacacactaaaccaaaaagaaatagcgaatgttaagagttgtgaaaattttcaagttgtttaaggcaagcacttagaacatagaaaatagccatgcgaaatgaataactctcataacagaaaaaagggttgtattttgatggcaacaaccttgggcttataacaaaaagtaaaagcaatacatagattaattagcagagagaaaacattggcagggacttgatttttcttccgttcaatgtatccactcagtgtttaaagtgatgatattgctgcacttacaacttgaaatatttgtaaaaatcatctagaattcacaaagagcaaatgatatctcacttatttaatacttcgagcatgcataaatttgaaattcaacacttacatatccacgcccaaacctgtgtgatgtattgaagaattagctttcaattacctcaaagtactgcagaatttaattgttcttgtttttaataactagtgcaaaattattggcttcacaaggttagatgtatcttataaaaaatgcaccatcagaaatagatgcacatttatgttgtaacagttaaatatgaaagagagtacttcaaacatagatcctggcctctacacatcaaaatttgatttgtaagtaagctagtttttgtctcaaaacatgacaccgttctcttccacaaaccatgtgcacacatttaacctaataagtgtatgcatcaaaacatcaagaagacagtaccgaatcagttaacatctaaagataatttcatccaggaactgtgctttccgtcacttgcttaataaagaaggtttcttcagaaacaggctgcttgtgaatacagttttagagttgaaactagaagctaactcaacaaggatatacattttggtgtggaaaaaggttaaagacaatataggcttaaacaaaagcccagtcactagagttgaatcctgacaaggtacccagtaaatagacactagtttcttcagaacacaaagcatcctaaaccaaatatctattgcttatgctttttctgtagtgggaacactagttctctgtatcattgtaattcaattacaggacaattgagataagcctacaaattaaaaccatgccaaagtattcatgtagtttgacatctataagataagttgaaaagcactagtctcacaaatattctatgagcactggaagtcgaagatcatacatccccagccatacaaatatataaaataagatttgggtgacatttaatttgtcatttttgagtcatcctacataacaggtataataagtataataaacagataactttcaatcatacccaagaatatatcgctataaatatatggagacccaatcttatttccccaactctcttatttgtcatatagtaacaaagacttaaaacatataattttatacggtattacatacgtttacgtatttttttaatatgcaaaattatataattattttagaaaatgacataaccaccaatattaatattttttgataagcataacataatattaatatatatataatagttacataaaaaaatatatgacttgttataacatattactacagataaaaattctatttaaaacttaaattaactataattaattatatccttacaaaaaatattattttttaatcgaaatatttaaaaaaaaaaattattttattttttttgaaaaagagaaagaggcctttgtctaagactgacccctcccccgttatatatagataacctcacttatggcggaggaataccatgattacaagtgctatatcataaaatatttaaaataaaatcagtccaacaattcataagacacatcaggacctattaaacaacattgcacaacagtctccaatctctattcaaatctaagaacgaaaactgctcaaaactcttagttttgtaaacccaaacagctgtccagaatctgactttttcccataagtcttcagctgaagcttcaattccttcaaaaattctgttattcctttcaagccaaataacccaaatgattgctagaacagctgtcctccataggcatgatctacccttactaccccccaccttgctcaccatcattagagggactgatccgggaattacccattggatctcaaaggcgttcagcaactttatccaaagtctttgcgcaagacaacaccccaaaaacaaatgcatcacttcttcactacttttcttacaacaaacacaccaacccggggacaagcaaataaatggtcgccttttttgcatcataggatgcacattaatttttcctaatgccaccagccatcc

SEQ ID NO: 295554 - DNA, 2973 bp, Cannabis indica
actcatctgcaataacaaacaactcttataatatcatcatcatcatcataataattgtgttaactaactcattttgggtattgggcaaatgttaaattttttttggaagaaaatttcgtgccaaatgggttacggccccactcgccttactctaataaaaccgagtttgagtagtagtagtacctgcagtacacggttcgctgctgctgtggcttttgcgtagtctttttcggcaaatgcacaagctagaatagcctatagaataaaaaaaatagtagtgaaaataattagtagtactaatataaaagaaaaaatgttttaagtgttatacactaattaatttaataatgtaatgatgctcttactttgtacactcaaattacaaaactgtgttttaagaacaatttgagatttcgagtcaccatcttgaagggacatataagagtcttacatcgaatataaaaagtgtttgtttaagtagttaaagaaatggtgagaccttcaattaggcctcctatcaaactacaatttgatcaaagttggaaaacttataaatttataagactacagactatttcgtttgatgtcaattggttttgagttggaactccatgtatcttaacaaaaaaaaagtaatgtttacctgaatggagacggccaaaccatcggcaagaagagaagatgtcaaccaaacttgtaagcaagtttggaatgcagccataggtgtcgcgccaagccttgcagccaaagatgcagctaaggtgacacaaaatgtcacagctattactcttgctaacaagaaaccacctattgtttatacattccaacaaaatttgagtgagtactaataatcaagggcaattcaaggtgatgattgttcattagggatggggaaaatggcgattttcggttaccatttttaagaaatcgaccgaattgcaaatccttaagacttggaggtaaaaggttaacttttctcatcaaaatcaagaatagtaccaaagccatcaagtacctaaaaaataagatcattcaaaaatcattatatgataacggctaggcatgtatctagggcccactccgtccagaagtccaaaaaaactcaacatatccttaagggcccaataattaacattttttgatatgatgatatttttaggaacaaatgagaaaatgaattcaagaaagatgactttgacttactgagaaagaacatgagcaatggctgcacctctaattcccaaatgacaaacaaagataagaagtggatcaagtgcaacattcaatgaatatcccaacactgtcaacatcatcaaaatgaaataaaaatcataactttttagtaacccatcttagtatattaactaaaaaaccagaataagaagaaaaaaaggtcaaaagagatatatacatatgacatataatggagtagttgtatccttaaaccctctaaagataccctgcatagccaaagttaaaagaacagctggtgcaccaaatgatcttgttactaagtacttctctgctggtcctaacataggagaatcctacataaaattaatcaaaaagacagtaactaatttgtgcttaaagattggatttttattaagggaataaaaaattaatacacacacagacacttacatgtttgactcccattacacccaatagtgttcttgctccaaacataagaaaaattgcttgaacaagtcctaatattatcccaaatatcagagctgttgatgctgaagcaatctgtctttccctttttttactttggtaattttctccaactttgacacaactgcaatttcatacaactaacttaactaccataacagttaattcaaaactagaaaaaagaaagagcaatactatattctataccattattatcattattattattctctgtttctgaatcatcatcatcattttctttatgttgttctagtttggttggaacacctttttccatgtcatcattaacatgattagcagctttcaatttcatgtttgcaacagtatcttcctcagcaacaaatgaggttgttatgctaaccaatgggaaaatggtaatcctcgacgcttgattaaacaaggcgatcgatacaccggctgcagccagctccaccggtcctaataaaacacgaaaaatactaattaagtcctatcctgtttagaccgatatgaatagattattctgttagtagaaaaccgaaataactagttatagtagacatctcttaccgatatggccaatgaaggctgtgtcgattagagatgcaatgggatcggctgctacagctaaggctgcaggcaaagccatccctaatatttcttttccaagtgaatcccacttgaaaacatgcctaattaaacataaagattgaaactttgattaagagatataataaagattgaaactttaattgataaagattgaaactttgatagtaaagattgaaactttgagtaattatttgcattattattaattaccttgcatctttgaagaaaacaccaataggcaaattaaaattccacttagtagtagtaatcttttttggtatggtatgggaattgttattatctccattattctcagccataattatgtgaagcttattagtaagactgcaaagagagtagtactatatatatagtatataaaaataatattagtaataacagaaccagagatatataaagtatatatactatatgtataatgttattatttttcatgaccatgttcaaatattatttattattaataatattaattgtgaaggttttgtttgtgagagtaaaaccttcctcagttatgttatttaattaactaaacaaaaaaatggccgacccattagagatcaatgatgatgaaacttagtacttggaaactatgccttgaaatgctgatttattttataaaattgaaaatatttggtataatgcacaataatattttaa

SEQ ID NO: 295555 - DNA, 5361 bp, Cannabis indica
gaggttgaatatttatatttaatgctaacttttggctttagtttttttttttattatgtgggatttggattgatagtttgacagttataatgagttatttttcccatacaaaacaaaaaaatgtacacttattattattagtttggatttaggggaggttgtgactgattaatttactattttgtgatttgattgaatatgaatttaaacataaaatgatccactttctttgatgatgcttgccaaccactagtgaaaaattaaagcaaataaatataaatcacaaacttaaatacttataagttatatcattttggactctaactctttattttgttaaatgataaattagaccatatttttttaaaatggtacaaaataatactctgaactggttttttatcaaaataaaaattaataataactcgatctgagttgttataacaaaactggatacattcctgcatctaatcttgctgaaattgtctttaagttgattatactaaaaaaattatcaaaaattaagctcatagtaatattttacaccattttagaaaataaatgatctattttgttattttataaaatagaggatccaatcgataatttttacaaaacagaaggtccaaaatataattacttgtatagtttagaaaaaccattctttcaaagccacctatataatacattatttatatatgtaagcaagaaaactaaacttcagaagagaaagagatagatcattcaacattgcttggttggttcacttgatcttcactcattagttcttgattctactatctacacttaaatgtggtcattcaaaaatcaaaattatatgagtgttggaggtaatttaattaacaaataaatagggattgactctatagtgttagttaaaattagttacatctagctagtattcagttacaacaagtaaatttcttaaaagcttcaatctcgtcagtttagttagttggggacaattttgtctttccaacactcttggataatgcatttatataccaacctcttctacatacagaaacaactttcaaaacttcttcctcctctccaaaattctctccgtacggaaatgaaagctataaaactcgatcttcttgtgagttcatagctgttggtgatcatcaccattataacatcagtgaatcaataaagattgaagccaaatattgttctatctagggagtaaacatgttgtcactgccaagcaactgatcgaacttcgttaaattggtatgatttgatttctattttgtattttatgttttttcattctcttgattagttagttcaatttattgcactaattgtcatctctgttcttgattgtcattcgaggtgattaaaacaccgcaagtggtatcacagtatcgagattcaagtatcaagatttggtgtttggtgatcaagaatcaatcaagatgtattcaaaaaagtttgaaattgacaagtttactgggaagaatgacttcagcctatggaggcgcaaaatgtgtgctttactggtgcaccagggcatatcagaagccattgaactagaagaccttgaagatatcaaggaggataaaaagaaagttaaagagatttaaaagaaggctaaaagcaccatcctctaaagtcttggagatgaagttcttcgagaggcatctggtgagaccactgcaattggattgtggaataaactatccttaatctatttgaaaaagactttggctaacaagttgaatctgaagaaaatgttgtacaccttgagaatggaggcatctggtgaactcagaatgcaccttgatgatttcaacatgatcattcttaaactcaacaacattggtgtcaagattgaaaaaaaagatcaaggaatcgtcctattaagttcactaccaatagcttatgaatattttattgacacaatgttgtatgggaaggcgactttgataatgtctgaagtcaaagttgcactgaattccaaggagacttagatgaagtctgacgacaagaatggatcaaatggtgaaggtcaaatgcctcgaggtaggtttgataaaataaaggacataagagcaacaactcaagtggaaatcaatagaggagtcacaacaacaagggcaatggttatagtcaatcaaaatccaagttcaatgctagaaagttctacaactactgcaagaagaaaggtcatctcaaggatgaatgctacactttgaggaacaagaataacatggacaagagcaaagacaagaatgacaaaggtaacaagagtgaggttggtctaactattgatggttatgattctgcagatgtgtttttgctaaaaacacaaaattaagaaaagattggatcttaaactctggatgcacctttcatatgtgtccatacaaaacgttattcaattctcttgaagaaaagattggtggaaatgtacttcttgaagataacaaggcctatttggtaaaaggtattggtactatcatcatcaaaatgtgtgataatgttcaaggaacactaacaaatgtcatgtgtgttcctgatctgagaagggacctattatctattggatcacttgtcaccaaagaatgcactattaagattaatggtaacactctcaagattatgaaaggatatgtaattgtcataaagggtgagcatgtttgtactttgtactacatgattggataaattgttactggtgttgccacaccagccacctatgttgaaactggagccaacaagaacaaaatgattgatcaaaccagattgtggcatcaaagatttgggcatgtgagtgagagggggctcacaaaacttgagagacaaggaattctaaaaggtaaattgtctaggaaactagacttctgtgaagagtgtgccattgagaaaagttgtagagtgaaattcccatctagtgtgcacacatcaaaacaacatctagattatatccactctaacctatgggggccatcaagagtaacgacagttggtggagcaagctacttcttgagtattattgatgattactcaagtacggtatggatattcttactcaaaagcaaggatgttcaaagaatattgtgtcaaagaaggaatagcaaggcatcatatagctctaaagattcctcaatagaatgaccttgtagagataatgaataaaaccctcatagaaagggttagatgcatgctaactagagttggtttggaaagacatttttggggataatttgtcgagacagcatgctacttggtgaaatatgtgtccaactgttgcaattgatttcaagacacctcaatgaaaatggactaggagggttcctaactgtgatcacttgaaggtgtttgggtgttctccctatgttcacatccggcaagacaagttgcaaccaagggaaatcaaatatctatttcttggctaccctaatggggtagaaggttacaaactctagtgtcttgaaccaactttcaaaagatgcatcatcagcaaggatgtcatcttcaatgagaaggaaatgcccttgaagctgcagaagaaagcagatacacaaggtataggtagcaatgtaagaactcagattcaactcaaccaggatacagttgggacataagagagattagatgaatctacatccactgaaccttctacatttcaaggtggacttgagacatatcaacttgacagagatagggaaagaagatagattcaccctccacacagattagggtttgctgaacttgcagaatacacaggatttgcactatttgttgcatgtgagattgatattgcacaaccaacctcctacagagagccataaatagaagaaatggtacaaagttgcttctagcaattcaggaagaaatgtcatcagtgatcaagaacaaaacttggatcatagtcaagagaccacctggacagaagcttgtagattgcaagtggataatgaaagtgaaagagggtattccaggggttgaagatagaaggttcaagaaaaaactagttaccaaagggtttgcctaaagagagggggtaagctacaataacattttctcacaagtggtcaaacaagcttcctggacagaagcttgtagattgcaagtggataacgaaagtgaaagagggtattccaggggttgaagatagaagattcaaggaatgactagttaccaaatggttttccaaagagatggggtagactacaatgacattttttcataattggtcaaacaagcttctgtaagagctatgatggccaaagttgcaaggtgtgactatgaaattcagtaaatggatgttaaaacagccttcctacatggtaaccttgaagagaaaatctatatgaggcaacttgagggttttgaaaatggtgatctagataaagtttgcctattgcagaagtccctttatggcctgaaactggcacctagacaatggaacatcagatttgatgaatttatggcaagaatcaaattcaacaagagcagctttgatccttgcatctacttaaatgataagttgttcatcttattgtatgtagatgacatacttttggtggggaaagcatgacataaatataggttataaaggatctggtgagcagtgaatttgaaataaaagatttgggtgatgctaagaagatccttagtgtagaaatcataagaaatagacttgagaagatatgtctatcacataagtattatttggaaaaggttttgagcaaattcaacatgagcagtgccaaaccagtcactattcctatggttgctcacttcaaactctcaaaagatcaatcacctcaaacaaaagatgaaagaaaggttatggacagtgtgccatatgcaagtgcagtgggaagcctgatgtatgtcatggtttgtacaaagccagatttggcacttgccataaacatcacaagcaagtttatatctaaccctggagaataacactggaaagctctaaaatggataataaggtatgttaaaggaacccttgacaccggtttagcttactatgctagatcccttacaggttatgttttcacagctcgaggtcgatgcataagttggaaatcaaacctgcaaaaggtagtaactatgtcttccattgaagcagagtatatggaagccactaaagcaatcaaagaagccatatgggtgaagggtttaactaaggaacttggcttcaattcagaatatatcacagtgtactatgacaatcaaagtgccttaaatttgattaaaaatctcatgtttcatgagaggctaaaatacattgacatcaagatgcctttcatccgagacatcattggcagaaataaagtgcaagtaagcaaagtgaacactaaggacaatcca

SEQ ID NO: 295556 - DNA, 1247 bp, Cannabis indica
tataagtcaccactcaaagtaagtagcattcattcacaattagaaattcatacacaatactaagttatttatttttttcctttgaagttattaataaaaacacaccaaaaacggggaaattaggcgtagataatcgtctgaagaaatatggttgtatgtatataagttccaaagtaggcttcttattaagatgtttgacctcacccagacctcatttattgtcatctgctcccatgaccacccatacacacaacacacacccacgcgcccattcttgggatgtgactatcacgcaatcatgtaggccccacctcctcatccccttcatattatttatttattattaatctgctactagtacatacataataatcatgataatatatcttaacaaaaatgatctaataatgtatatatattttaaacttaaatagaggaggatgtttcttgaatatcatgaatcatgattatagttgaataagaatcctctgcttttttaaaaaaatatatatgctcatgttattataaataataaaaacatagtataataatgtgatactatacacataataataatagacagaaaagaaaaagaaaaagtacgtattaattactccttcagtcataactggttctggtgataatcaaattattactccttctgctgacacatcgtacaccaaaattgtcacatgttaacctaagcctaattaataatttcattaacaataatattataaacctatttatttatttatttttaaaattatattctaattgatattggtgagaatcttaggacaattataagaccaattagatggtgtgttacagtaaatgtgggagaaagatgagagtggagggtccaaaggccatagggccatggggcctcctcagccgaagtgaatagtgtatacacataatggggccaccggccatgtgaatttttgaatcctcactcatctttaaaatgtaggttaattagtaattttttctcccgaattttgacatgtactaaatcgtgcccctaaactattttgaccattagaaattcctcccgaactattgagattgttaaatttaaagacttttgtctaatttcattcaattctgtttcagtgattgtttatgtactaaaccatgctcctcaaactttgaaatctactaaatcatgcccctcaaactttaatatgtactaaatcatgcccctcaaatttactaaattagacaaaagtccttaaatttaa

SEQ ID NO: 295557 - DNA, 7493 bp, Cannabis indica
tacatatcaaagtttgaggggcgtgatttgatagatatcaaagtctagggagcatggtttagtacataaacaatcactgaacagtaaaattgaatgaaattagacaaaagtccttaaacttaacaatctcaatagttcgaggggaatttctaacggcaaaaaaagttcaggggacacgatttagtacatgtcaaagtttgggaggaaaaattgctaattagcctactttttaacttttcttctagcaaggttattcacatgagcctatggcttatgacttatagacagactgcaacatgaattaatatttttatcttttaaattttgataccatctaatttatgttttttaaattttctttaactgttaatttttttcttctaaattattgaaatagttagatttaaatttttttgtctaattttattaattttgtaattatccatgtattaaattagaaaaaaaaaatacaacttctcgttaaatgatgctctctaaattttaatatttactaaattatcccacttaaattttgacatgtactaaatttaaatttttatttatgttaaatttttttttctcaataaaattagacaaaaatctataaattcaataatcttaataatttaagaataatttttaacttcaagaatatgacttattatttaatactgtatatgtcaaaaattaaaaaataaaaatataaattcaaaaattaactatatcactctttaatattatctatatgtaccttagcagaaaaaaatatacatatctatatgtacaccgacagtattttgttttggatacaagtgatgccagtctttattttggaaaaatcgaccctaatttaattttaaatcatttatatatatatatgttatatattttgctttttatttatatatttatgtatatctacttttatctgccaataataattggtcgagaatcttcatgggtccaattcttagctggatttttataagaatcccctcagccaaaatatatagagccaacgtttcaaataatctttacataggcacatcattttaatttattttataccagaaaaataaaaagaaacagtaattttttttttttagaaaacaacaagtttgttgaactaaatatggggaattataaaggaattccctctctttgaaacaaacggtcatttggttagaggttctaacacattttgctagtccatctgcaaaggaatttagacaacacttaataggaaacgataatttgcaatctgattagtttaaaatcagagaaaaagataagtaaaacccaattaaggggatatttctgttgtaccaaagcactgactacaccataaaattaagataaaatgtggactttactccaagaattctgaagagtctacgaaagagcacaatggattgcacgagtttctacctccaaagccgattcagccttggtgaaactcttaggaatacatgatttcctacttaaaattctacattactacgctttggatctttataacttttctgcttgctttgggaaataagtattcaagccttgatcttttctattacattacgggtcctttgatctgactctggacctacatactatatttccctagtttcatcctaatggatcagagaataatatttttcaccatacaataactcttggggagtcatccctattatacttgaaaattgttgttataggagaattctaccaatggcaaacacttactctatgaacatttaaattccatcatacaagctcgtaacgtatctttcatgttatccgtatttttggcaaaggacacatggactccatgttagtatctaaagtccatcaatgggcccaaagaagatatcttgggtcaagcccaaatagactagaccttccaagaaggtatcttagttctataatcatacaagcttccgtcaaggatagcctgtctctgaaagcagttctaataccgtgatttcggtaagcgtgttcttagaagacagtgaaattttcctttttatccaggcacacagaataagaaattgactttcttaaaatctttgccagaaaatcgtattaaactaaaaaaggaaatgacctaaaatagagatcaagtaattaattcataattaattgcccacaattataggatgcaacattgacaacttaattgtatcctatctcggagtttaagagtctttgtatgtatgtgtctatactggacttggccttcaagaatacttgtaatatttatttaaagtttgtaatgattttgagcttataaggggatttacacaataaattccacctaaatacccttatgagccatgatactaattcatactcttagggtcttagcttgatgacctctagggccagcttcctttgtcaatccctagctagttcatagcaagttcatacaatgcttgaacttatctcaagttattcctttagttcccatatcagcaaggctatgttcagtgaaaacttttttcactgtcacctctccctgagtcaatttgtctctgataaagtggtatttgatctcatcatgcttgaatctatcatgaaagacaaaattcttgcagagattaatacaaatctggatatcttaatagattataggaacactcttaagtaggttgagttcctttaggacacccttaatctatacaacctctttgatagcttttgtagcagaaacaaattcgacttctgtagttgatagagcaactattggttgcagctaaactttctaacttatacaatttccctaattataataggcagggtggaccttcttatgtctctatcaccaacataatttgagtcataaaatccttatatcaaagttgggttttgtgattttttgaacactaaaccaatatctatagttcctcttaggtacctaaatatcaattttatagcaagccaattaaattttccagggttaaccatatacttactcaaacttataatatctcaagtctagtacttaccaggttctttattacccataacctgtagcctttagtaccttcagggtaaccccaaaaaatatattttagagctttaggctctaacttaccattgctttggtgtgcataagcaggacatcaaaaggctctcaaatgtgatgggtctagtggtttaccaaacaacctctcttctagaattttaaactccacaacacttgatggacatttgttgatcaactaagctattataagtacaacctccccccagaaaccagtacctagcccagcttgaaacaacatgcatgttgctttgtttaggatagttttgttcattctttttgccgcactattctgttgtggagttagtttgacggttctgtgtcttttaaaatctatccttctgcagtatgtgtcaaagataccattgcaaaactctaggtcattatttgtccttagagtcttgacctttttgttagtcaggttttccactaaagttttccaatcttaaaacttaataaatgcatcatttttatgttttaaaaaaaacactcaaacattcctacagtaatcatcaactataaataataaataactacaaaccccatgtgtattaatcttttttggatcccataaattggaatgcacatattctagtatatctttagatttatgtgtcataactttaaatttaagtctatgatgcttatccaatatgcaatgctcataaaaatcaactttacttactttatatttgcacaatagtttatgtttactcattagttgcaaatctctttcactaatatgccctagcgttcagagccatagggtagttttagaatcctcaagtgagtttgttgttgtattgtggcagtttaaaactagctccccttttagatagtagtgacctttgtagactcggccaaccccaacccgtagaccagcgagctcgaaactcgcgatctcgaaccatttcacgggtggggtccgagtacaattttttgaactcaaaacccgcgaactcgaaactcacgaacccaaaacccagtcaacccacccgatgttcacccctaacaataacagcacaaattgatgagagttagggttagagaaaacaaacaaaaaaggaaatttgaacacatagatttgatgatcttgaagttcatccaagaacatgggctacgtctctaccaagctctcctaagagtagcttgattctccactagattcagcaggtaattactagtgtgatttcagatttaaacacaaaatttttgttgataatctcatatgattttctcactatttctctttcttatgtatgtgattacaactgagctctgaagagcttctcactctacattctcactccaactccaactcagctcgcatgagataaaaaaaacatctcgaggtagatctctcaacttggatctatttatttataggttgtaaaagtagttgcagcagttagggagtgtagttgttgttgtaattcatttcttgttagtttgttgtaactaaaacaatttgagagtctttgtattgagtgtctgtactagtcttggccttcgagcatacttctttgcaaggcaggatgggtcttcttaccccatttacattcctccttgcaaagacaaaattctaactttagcttcctgcatgatacactaattggcttggaaaagtttcatgagatcatgctgaggtagctcagcatattgtagtatcgacccaataaaaagactgattatctatgtattgtcattgcttttacaaagtgaatgaaaaaatataaatatttccaactttgctttagtgcgaactattttatagttggagaatctagtcctttatttcatcatttatatatggatatgatgtgttacgagaaattactaaaaagtatcaatagtgtctaacttcctcctacgtgttaatttattggttgaactaaatatcaagttccaaatagtgtctaacatcctcgtacgtgttaatttattggttaaactaaatatcaaattccatataattttaaagagtatcactaaccaatcgtaaaacgacacgtttaaaaatgctaaaggaacccaagaataatgctacatgtcttatatatatatttcattaacgtttgaaacaacacatcccactaattagtacatataataagccaggtatgcgtggcgcattatcgtgcaatacataaatatattgtgttccacaaactaattatatggtcaaaacttgtctactatttttagcatgctatattaatagactatagatgcaaaaataatggaccatataatcaaagaaaacttaattaagggcgtgcaaaatatattcacactcacacacacacactctcaccggtttcattccactaattaaacaaaataagaaccatgtgcaatatgtcttcattatgaaagtattgcacattaaccacaccacttcaactactatatatatatatatatagaaaacactaaatgtaatgtctattattattgataaatacatttcaaataatggaaactaacattctacaaaatattatcaccagacattgtttagtccaaacatttttcttcttctctctaattctcatatgtttcccaaaaaataaccaagtaatctgtcacgacaataatcaagctcaagccccagcaacatgttcatgcgcaccacctgaaataatacccgaagtaatactaagcttcctcgaccaaagactagccgtggtgtacccaatcatacaaacattcaagaacacaatcacttcagacccctttggagtaaccaaaacatgggttggatccgatgtgtgcagctacaccggcttctactgcgataacccgcccgataatctcaccgccaccaccgtctcctccatcgatttcaacggcttcaacttggcagcaccaactctagatggcttcatagaccaaatccctgacttagcactttttcatgccaacaccaacaaattctcaggcataatttccccgaaaatcgcaaccttacaatatctctacgagttagacataagcaacaacaactttggggggcctttcccaactgttctcctagccatgacaggtctaactttcatagacttacgttataattcctttacaggagttgtcccaccacagatctttcaacagagtgtagaagctctgtttttaaacaacaacaacttcattcaaataatccccgaatccattggctcaacaccaacaacccttctcgtcttggccaacaacaagttcatcggaccgatcccgagaagcataggaaaagccacgagtttaacagaagttttgttgttaaacaacttgcttaccggttgtgtcccctacgagattgggttcttaagaaacgccatacttttcgacgcgagtaacaaccttttgacaggccctttgccctgttctttggggtgtttagagaatattgaggttcttaactttgctggaaacttactctatggtaaagtacctgaggtgatttgtgagttgggaatgttaaacaacttttctcttgctgataattattttacctacgttggaccccattgtaggaggttgataagtaatggggttcttgatgtgaagaataattgtatccatggcgctggtttatctgatcagagatcaatagaagagtgtgctttatttttcatgaaaccaaggagttgtttgcacccatcttggtttacttttctcccgtgtaggtctaaccctcatgatcatgatcatggtcatgatcactcggcgcctttcaagcgtcctgctctgcctcatcatccacattccaagagaaaattgttatcttatgatgccctttcgaggcatagacaaattggagttaattaatatgtaagcaaatgaagtttcatcataataattctgtatgtatttatatgaaaggtaaagttggtcaaagaattttgagtggattctatgaatgccattaattaaagagtaaagaccattataaagatttaaccaaaacccatttgcattaacaatattttatatttttaacaatgctcgacactaccttgatatcatattgcactacaaaaatatgggtttttattggtgcatttttgcttcattttgcgccaataaaacttgataacttttgctggcccaaaaattcttctaaaatattgttggcaataacttatagctgaaacgctttatgtggatgataagattatttccacgctagcaaaaattgtcaatactgacggcttttatccgcgacaaaaactacattgcctgaatgaggttctatttcaaaaccaattggctatgggaagagtagttcattcatcttacatatcacaatttatttctacacattagcaatgtaggacgaacgacttttaagagactacagggccgaacgtgatatttgaaagaatcccacaagccaatattgagaaatttgtagattttgaaacaggtctgttgaccgagattttcggcaactatt

SEQ ID NO: 295558 - DNA, 4854 bp, Cannabis indica
agaattgagaaatccagaaaggaaatggaaccgagtgcaaacctggttacaaatgatcaagattcgataatggaagctaatctggcctttaggaggtttaagcaacaacaggttggtcgggggaattttcagtttagcaatcctacaggtcagtttggtaatagaaactttaatcgtagcagtgattatggttctggttcaggccaaaactttggaaacagaggtaatgcttttgtcaatagaggtggtaaatctggagttaacatgaatctgaatgttaacaggagagttcaatgccagctatgcttgcgttttggtcacactgcctatgattgtttctataggtttgataaatccttcttaggaccacagtcgggtactagaaccagaagtggatcaactcagcaaaaccagcagtggaaccagcaacctcagactaatcttgccaccaccagcaacacttaaggaagcccttcaacaagaacattggaataatgcaatgggtgatgaaattctggctcttgccaaaaacaaaacatgggttcttgtgacgtttcctgaagggagacaagctattggatgaaaatgggtttataaaatcaaggagaatgttgatggaagtgttctaaagcataaggcaagacttgtggcaaaaggattccatcaacaagcaggatttgactttacagagactgttagtcctgttgtgaaaccggttacaatatgggtgcttctcactttagctttaatgcaaggttggagtgtaaggcaacttgatgtgaataatgcctttctaaatggagagctggaagaggaggtatacatgactcaaccacctggatttgaagttcctggtcaagaacacttggtgtgcaagttgaacaaagctttatatggcctttagcaagctcctagggcatggtttgacaagcttcaacagtgcttgttgtcctttgggtttgtttcctcaaaatttgatcattccttgtttattaatcactctagtcactctactacacttgtgcttgtgtatgtagatgatattctaataacagggagtgatcctactgctgtgacaacattgatttcagacctcaataggtagttctctcttaaggatttaggacttctctcctatttccttggcattgaggtcaactacaccagtaatgggatgcatctttgtcaagcaaagtatgcaagagatctacttatcaaagctcaaatgatgggatgtaaaccttctccaactctaatggttagtggtcttcgcttatcagctcaccaaggggaaccatttgcagatgttcaaatgtatcgttctactgttggtgctttacagtacctaactatcactcagcatgagctatcattcagtgtaaacaaggtttgtcagttcatgcaaaaccctttcaccactcattggcaaactgttaaaagaatactaaggtacattagtggtacaatgaactatggtcttcatctcacaaaaccagtttcttgtgacttggttgccttttgtgatgccgattgggcatcagatccagatgataggaagttgacttctggctttgcaatcttccttggatcaaatctcattgcctggaaaagcaaaaagcagcagacaatatctcggtcaagcacagaagctaagtatcacagtgttgcaaatgtcacagcagagttaacttggctgtattatttgttctctaaacttcatatcgagcttccttaagctcctacaatatggtgtgataatccgagtacgataatgcttacacaaaacccagttttgcacgctcgaacaaaacacatagagcttgattatgtactttgttcgtgaaaaggttctaaacaagatggtgcaaatcaaacacgttgtagcttatgaccaacttgcatatggacccaaagctatttcaagtcaacgattcactgatttcagacacaaactcaaaattgagtcatccaattatgagtttgaggggaggtgttaaggcaatctgttagagtgtctgttagagaagtggttgttagttatagactgtcttagtttgttagctggttgttgcttatcctagatgtcatgttagttgttagttcgattgtgttggttgtatataagttgtactcttctctttcataatgaattgagatactctttcttctctatttctttcctctgttttctctctttctttccttttcttctctttctttggttctcagtttctttcattaatggctagacggttcaataaaaattaaatcataactaattacatttgttagttaattaaaaattttaaaactgaaaaattagttttgtaatgtaatcaaattaaaattaatacacaaaaactatttgtataaaaataactaaatcaaaaacgacttatttggaataaccaaattaaaaatcaatggagaaaatacatctatatattactaaaaaaaaaatcacttattatcaatgcactcataaatattgagattagttcttaaaaaaaccatgatatagaaactaatattacaaatatataagaaaaaatttaataaaaaatactctaatatttttttaaagacacaaaaaaaaaagttctcatgttttatgttcctctattggtaaaattatacaagattaataggcataacaaacatggatgtccgatgagatcgtcattattgaattaaggtgggcatgatttagtgaattacttattgcatctaccaatttttggttaatgcatgacaaaagggaaaatgtacttacatacattatgtaatataatattataaatataataattatacataatcatcttgaataattctagctgtgaccacgtacatgcaatatgttttacttgtatttggtatcagcttggctcattattataaaacaatactcaaaatgcataaatacatatatctcacaagtaccacgtctattatatactgtatacatatataaaaagaacttttctggaattttcacaaccataatcaacataaacctacctttatttttcagctataaaccattgtatagtaaataaatctatatacaaatgaaaaattataataaattaataaaagaggaaaatgataaaatcttaagtgccgtattattgttcagttctcttgaggaaaattaggttaacacggaagatattaaagggaagtttcctcatataaacatatacataattaattaggtctcgtatatatatccttacgatctacaaaatgaataagctatatgaagattttatgtaattcccaaatggaacattttgggtgtatataatgccacaatctcacaattgctaggaaagaagaggcatagtctttaagtgaatgtttacataattattcttcctcttttttcacaaaccatgaggagttgtgaaacttttttttctttttaatgctaatctataatctatctataatttataatctgtgtataacaatgaatggatttttttggttttgattcaactattttatctttttatagttttttttttaattttatttttgtttgactcttcccaaagtattaatattttaaatttaaataatttaatatttattttttgatcttatgttttttttttactattaatatacttataaacttttctatctttaaaaaatccagttgtattgtctgaacccctagacaatgaagagctaggcgtgtacctagcactcacagatcatgatgtgagtgctatcctaacaagagaagaagacggtgtacaacaccctgtatactacatcagtaaaagactaatcgacgctaaaagttgatacccactcatggaaaagctgacctacaagttgttattagcctccagaaagttaaggccatacttccaagcacacccgataaaggtgtacactgatcaaccgttgtggtaggttttatagaaacctgaactcttctctctttccctttcttcattcaatccttaaatcgctcctttttttttctgttccagttcttccgcaacatcatcctttgtctctctcgatatgtttgatgatggacctaattgtgagtgagtggattgtcccaattcaataaaagttttcttgatgttaattgggtaatttggcaaagtgtcattgatgttttgggttgggtccattagaaagcccaaactcattgattgaaactcactatctttcttagaatgtagttgcatctcctctacaatttttgccctccatcattgccaatcgttctgtcaaccgtcacagtcccctcaactgcaattgggccaccagtattcattgcttattgatttcttagggccgctctgatcctcacttctaaccgcacctcctgaaaatacgtatctcgtttggctctcctacatcctgtctctccgttgcatctgcttcaccaccttgacccaatcatgcctaaagaaactgatgcgccatgaattagttaggaattggatcatcttcattcaaccacttaccatatcgaggaactctcaatccattttcatcaatttcagtggcttcctccgcttaataattcccctactcatgaccccaaactccacaccaaaaacaaagttcgggcatccattcaataatttgtattcatttattttggccaccaaaaggaatgaaacgcccctcaaagatactatttgctattggaaatcctattcgagctcaaacatatcgatttagaacagatttctgggcatcactccacttaaccttagtaatctctccagccaaagcacctatcctttgaacataattaagggtaaatgaatttagtagaaatcctctcattcgaacctaatgttgggttttatgccc

SEQ ID NO: 295559 - DNA, 4083 bp, Cannabis indica
aaaaaaaaaaacatgtataaagtatatgtaggaagccattacattaggatacgcaacagtaacacacggtctaattgaagcacttttaatagttttttcccaattttttaataatgatgtttatatagtcatagcataaaccctttcccaaatttttaagaaattccagttcattaaaataaaaaaaaaggtactggggcaataaactattttaactctaatttggacagtgtaagttatcatgaaattctcgaaaacttgtagaaggcctgctatgactaattaacaactgtcatttcatcaaaaagaaaaaacaactgtcataaaaataatttaagtgcctcaattatatcgtaccccgctataaggacattttgtgtgccccattgtagatggcccctatgtatataccatgttttccctcctttctcacataaagacacagcaataacaatacaaacaagaaagcaaagcatcacaaatataatgttcttattcatgcctaccacaaaccataaaatttaaatttagtagaccttaccatgttatcattctcacagataataagaaaaacaagtattatagacaggcattggcttaccagtttccctcgttcaaactattttctccttgatttatttcctcctttgcaaattcctccaaaagagcatgttgccgttcatttaattttctgaagacggggcaacaaatatgaaaatggaggtaaatgtcatttagtccatcaccaatagtttaataaattacaattttaaagcacagttgacaattcaaagcccagtaaaagcgactggtttttcatcttatgttagagaaccagcaactaaatcttataaaataagtggctgacacagcattagcaaacattataaacataagaaaaattgactgaagatttcaggaatgccttaggctaatagtattgtgacttgggataaaaactcaaccataatggcagcaatgttgagggtgaacaaagacatatagctcatgggattcgagagtcactacggccaaagttgttactcaaagaacaaaagatactcttacaagtcaaccaacaaaaaaatttactgtgataaaaattatcgtctcaaattttcatgtcattcactaactaatagcattgaaatacatcatttaaaatagttagaaaacagaatgaacataccaagagaggtaactcaaatgatcaggcatgtgggtttctcccacaaagtctgatattcgagttgctcttaaactctacatagctattgctataatccctgttactcaaaaattgtaggattaggtgcaaacggggcgaagtttctttttttttttggtaaagagaaaaaaaaacagcacatatatgtatgtatatactcccccattttcaatatgtatgtatatactcccccattttcaatactgtctaaagctattggctaatcacaatttgggaaagctgttttggacaagagaatcttaattccacgttaaagttgacaaacttcagttcagtattgtagaaaaaataaagaatatattacttttgttctattattcaaacaaactttggaccctaaacaaacttagagtttagggtttagggttataaacaagctcttcaagctggaaatgattaacgcttgaggaggagctaaggagatttcagagttgggtgttagtttaggtggtgtttggtaacacttttgtttttgaattttttaaccacaaaaataaaagtaaaattttcaaattttatttttaaaaacaaaaatgtgtctggatccggggtccgcgtcagggacgaggtcgggatccggggtctgggtctggatcagggtttgggtccagggtctaagtccaaattcgagttaggggtcggggtccggggctgggaccggggctagccccagggtcgggaccgaggccagttccaggtccggcattgggtccgaggtccaggtctaggtctaggtctagggtctggggccaagttcgagtcgggtcagggtttgggtccagggtctgcatcaggttcagggtcgggtcgggtctgaggtctaggttaaggtctggggtttgggtcctgggtccagatccgggtctaggtccaggtcgtggtttgggtctgaggtctaggtcggggtcccggttagggtcgagtttccaagatctaggtttggtcaaaggaaaaaaaaattgtttaaaaaaattttaaaagtgactttgttttgttttcaaaatttttaaaatattgattctcaattaaaaattaaaaaagtgaaaacggttttatagaacatacttctagaaaatattttcgcttttttaatttaaaaaataaaaaactaattaaaaaagtattaccaaaagcactcttaatgtttgaatattttgctgtagaatttgtatgtaatatttacgtcttcttgatcagtttgtaagattgttaactggtgaagaatccctttgattttattcaaccagtttaggtttgtcttcctactcctagaataaaggaccaagtcaagatccaattctaacggtaggaaatcaagctagtcaatgcgactcctaaaattcaaagattgtgattatgtataacagaatttggataattttaatcgtccacattgcactaaatatcctaaggtcaagtctttatttagctgatttagtttcctatttgtaaagatcagatctgatcttttcctctgtataaataccctgtgtatttttagcaactaagaataagtagtgccaaaaaccaaatacacaactccaagacaaatacagtcaagaactacaaagctccacatttagaaacaaaacttaattcatcttcttatagtacattctaaaccaaaacagcagcaactattaatgtagcgaacctaaccaacaagggtgctagcggttgttgactcgtatttccacactgggggaagcttcttggtctttttgtagtaacgtgcaagtctgtgtatcctgctctcaaccaaaatcaatcgaaacttagaatccttgtccttcatgttcctcttaagatgcttcctaatagagactgccttcttaataagatgatacagatcctcaggaattttgggggcaagaccgtgagccttgagaacacgcaaaatcttgcttccagtaacgctcttaacctgagcaataccgtgagagtcacgaagaatcacaccaatctgagatggtgtaagacccttctttgcaaacttgcaaatgttgtcctcgacatcttgagaagagatcttgagccaacttggtgaacttctcttgtatggaagagctgaggcggagatacccttaccgcagctgtgcatacgacccatggttggaggcgctgaagagatccgtcttcaaccttctggttactgaagagatcagaactattctccaaaaagttgtggtatgaaggcaggttcttttgaaataatcctcactgcctttgctcaagtcacaatttctagtgttatgttaggatcccacactaagtatgagattggttggtggttagtaagtacttgaacaccctttgtgattgtaataaatggtatcagcggcatgcaccctcaagtgggatcgacattgcaaaagttcaccatagagtgggccaccatggacgtcctctctaagaaaaggtatattgttaggatcccacattgactaagtatgagattggttggtagttaataacaacttgaacaccctctatgatagtaataaatggtatcagtggcatgcaccctcaagtgggatcgatcgacgttgcaaaagtccatcatagagtggaccaccatggacgtcctctctaaaaaggggtttggttggtggtttataaccactcgagaaatacttaggtagtagaactcactcccaaaagctaccataagagaggagggtgcctaagtagctataaaccaccaaccaaaaccgtacttagttaatgtgggatcccaacagtcttgtagaaaatagtgattcgaattgtgtgttgatttcatagaataatacatatttatatacaaagttaggagactaaatatctactaaata

SEQ ID NO: 295560 - DNA, 3738 bp, Cannabis indica
gagattgagtttgagttttgtaaaaagaatcttctataaatgaagaagattcttgggtaagagtgtgagagaaacactctgagagaactcatcagaaaatcgatcttgactgtattgtatttgttcttgctcaatcaataaataggatttggtgttctagaacgagaatagagccataaatcacatcgatctattagacttgaatcagtatatatcttggtgttgatttctattgttttattgccttaattgtttatggttttccttacctagttttacaacaaaacaattgcttactctgagagtcggcagtcggctcaaagaaaagattaatgactctaaattgattgaactctcaattttctaagctcttattctttaaacattcttgtttaaaccattcaatcttcgaccttttaatgacaactctaattaagtattttcttgatttcaatttacttattttgaattacttcatcgatttgactgttagttaattaaccgacactaccctagtgtcccgaaaactttacaacattcttcctttttgttatttgcaaaaacaaaaaaataattaaaaaaatgtatattgaatgaaaccaccgaatctctccctctaattaaaagagatttagagattttaatgatcccaaatgacatcttcatgttagaaggaaaatctccaccccattaaaagtatatactcataagttccatagataaaattttcattctacaatccaattccaaagtctattcttacccatcataaagccaactaacatatttattatttccttaataaattctatctattgaaaggcattgtaattgtgggaacccacccaaattactataattaataattataatgttttaatttccttttcacaaattaattctaaattatatcaaattatgatacctatttaatgatttaaaatctttggagtaaaatagcaactaaacttagtgtgttgccaaaatataatggtaccagcaatatattagtgactataggttgtgattgatgtcaaaaaacaaattaggttaaagtccattttccaagcaacaacattgaaattcttcacatttgacaaatgttgtcatcatcaattaaattttacccaatgtagatgatgttgatacttgatcatttaagactcttttattggtcacaaaaactactttaaacagcccttaattattacaatatatttttttgttcaattaaatcaaatttactatgtttaatttatttgtttaaggatgtttacatttcctattttgcatgttttgtgggttatcacatcaacatctcacaatttaaggtacacaaattactattacttatatatatgtaattaatatgtccccttaataattatttagttactaaatagtcttttttttattaaattataacggaaatataatcatgtagcaagggacatgactaactaaatagttagcactgcactaactttttgcaataactatagaaaataaatagtattattgaccaaaatgaacatgagtaaagctaaaaaatttacattaatttatagcatatttagtttagtgataaacttcacattaatataagggttttagatatatattatcacatgaaaaaacatgtttagaaatcatatgaaatttagattttttttctttaataataataaaaaaagaaacaatgctactatatagattagagaccttaattaccaccttgaaagataatggaaatttcatatttatttagcttaattaattatatgaagtaaagaaatcaagaaaagttagaaggtctacttaagagccaaccccacttatagggccaaatgttttaagagtgatctttaattgtgggatacataatcatatgcaaaatcattggcaaagataataatatatatatatatatataaaatattaaataattagtacaataaattacatatatataaatatatataagtttatatcaccatgtgttctttcatcatcttctcgttaaatggtaattaattacaactagaaaagggacttcgtagtttgcttttagtacagtattaggtgatggattaaggctttgttaagcaatattttttattatatgttttttcaaagcaaaatgagtacatggaaatattttttgagaaaacttatcatgtgtttcaatattttatttgaagtacatgtagtaattgtcaaacatgtcttaaaaaatattaagaaagataaacaactatatataatatttcattttttagagtttataacaaaatattgtatacaaaatatgtacattccaaatatttcataatgaagcaatatgcctttaaagtagtgttgcaaatttgtacgggtctgatttatattttccataattgttaaaatatgagtcgtgtcgtaccgtgttatgctaatatttttaaacggtaagtttggcatggccagtaggctcagtatatttgtgtcatattcggattcgtatcgtattttgctcgtactagccttttttgtttaaaaagatcaacccgttttaatatccaggctcgaataattcatgttttattttctattttttttaaaaaaattaataagttaatcactaaattacatgtatattttatagtttcaattagatttatataattttaacaatattttataggtatcatataaaaatataattaaaattattagaatttaaatatttatttataaatatttatttatttataaatattcaaattttatgtaacacgttatagataaattaatatatagttttagttttatatttttagtagttgtaattataaaatcataatatttagtgttatgcttaaattttattattatcgtaacttatttttaattgataaatacatatattattagtattattattattaagttataagattttttaaatatttcatgccgtgttttttgagcttatcggttattgtgcatttcaggctggtctattcgtacttatgtgttgtgcctttcgtatcgtgtcatgcttaattatatattttttgaaacgtgtcgtgccaatttatagtatcgtaccgtattattccaagctcatattttttttttgtgtctaatcatactcgtcccgatttcgtgccatgttaaaaaactcgacatgtatttacatcactactttaaaccaatactattaatgagctcattcaatttacataatcaaacaaaaatttgtttcttaaactataaaagaaaataataaacacacacacaattcatagagtttgaattgttttgtttttgtttcttttacatatatgtatacaatagacttgaaagtgaaatgtcaatattcaatatcaaaaccctttttctaaaaaaaagattcaaaattgaaaaagatggtatggtgacaaaaagtatatgatatgtacaatatgttagtcaatgtgcctatataagtataaacatatacattagttttcgtaagagaatcaaaatggttgataggacaaatcctctaatccaaacaaatttttgtaatgtaattttttttttcccaaaagtccatgagaaagaaaggtatagagaatggttccaacttcaatgtattactaaatatacattacaaaaaaaattaatttaattttaccttaccttaattataaagtaattcttctaaatatgtaaaagctatagctatagtgttagatcatcatcaaaaatccc

SEQ ID NO: 295561 - DNA, 1975 bp, Cannabis indica
attaatgaacatttttctttgaaaaaaaaaaaatgtgtgagatcataattttaccatttttaaagagtgatatacattagagtgtttttagaagtaagagtgttaaaaatgatgtggaaaagagataaaataaaatattatatttttagatgatgtgtaaattattaacattcttaaaagataccaccattggagatgcgcttagtcattgttgtcttaatttttgtcaaataaggacaaataatagtccacccactagttgacacaactttcaataaagctaatgtaatatgtcaggaaggttttccaatcaaattgaagagacaagacgacgagacaatctcacgtgcctacaattaatgttttatttatatctattaatgtatttccttcaatcaagttaagcattttaaacgaataaaagaataattcccatgactgcctataaatagaaccatgggatcacatgcaataggggctcgactctttcttttttattggtattaagcgaaaatgttatcaaattctagaaagagaacttcattttcctcatcccaatacaagtgactcatgaactaaggttcattaacgtcacaacaacgtaaaaatcgtagtctccatattcttttttcttatcatgctctaaatctttatttatttaaggctaattataatttttgccccctgaactttaacatgtactaaatcatgccccctgaacttttaaggtcgttaaaaatgtttcctgaactattgagattgttggatttaaggacttttgtctaatttccttcaattttactatttcagtgattgtttatgtactaaaccatgctacccaaactttgatatctaccaaattatgcccctagaattttgacatatactaaattatgccccctgaactttcatccatgttagaactttttactaaaattaaaaaaaaaaagtccttaaatccaacaatgtcaataattcagggagtatttttaacgatcttaaaaattcagggggcataatttggtacatgtcaaagttcagggggcaaaaatcataattagcctttatttaattagttgcaaaaattctcgataacagacatgttttcatatttttcattttggttttgaatgaacttttatgcctttggacctactcttctttcttaatttagtttctcttcaagtacaacacgttaaaaatcgttaatcatgataaataagtttcaccgaaattgtttaaatatgataatctagaaaagtacgagttgtttagacaaagtgcttaaggtttataagtcattagtgagttgattttgtagtttgtaatcaatgtgagatgtagtgtagtcttgctagtattaaataaagtaccatgactcaacaacataacatcaagatagatttgctcctctctcaaagagcctttacttccacatcaaggtggttttgctcctctctcaaggaggccttgctcctccttcaaggagcctttactcccatatcaatgtggctttgcttctcgctcaaggagaccttgctcttctctcaaggagtctttactcccacatcaaggtagctttgctcctcactcaaggaggctttgctcctccctcaaagagcatttactcccacaatcaatgtggctttgctcctcgctcaaggaggtcttgctccttcttcaaggagcctttactcccacatcaatgtagctttgcttctcgctcaaggaggtcttgctcctccctcaaggagcctttaatgccaccaatggcttaggcaccgcgctttgcgaatagccaacacttttgggcttggtgcaattttctccaagtcctaatgccaatagcttaggcactttgagaatagtcaacgcctcccgacttggcgcaattctctcaaagtcctgaagctactgacttaggcacaagatcctaatgctaatgaattaggcaccttgagaatagccaacgcct

SEQ ID NO: 295562 - DNA, 2862 bp, Cannabis indica
gttgagcttcaacttgggttgccaatcaaacaaatacagtctgattggggtgtagagtaccaagccttcacttaattttttacaataatctgacatcctacacaaagtttcatgcccccatacacatgaacaaaataatatagtggagagaaagcataggcacatagtagagagtgaattaagccttttagcacaagccatcatgccttttaaaattttgggatgcaacttatagaacagatgtcttcctcattaatagaatgccctcaccacaattaaatcacttatcactaatagaaattatattcattgtcaaacctgcctaatcctcactaaaagtgtttggatgtttatgttatcccaacttaaggccttacaacaaagtatcaaattacaatacaggtcttaaccttgcacttttattggttatagcctttctcataaaggttacaaatgtctctccaaggatggtagagtgtacatttctagagatgttctctttgataagaatatattttcttatgccactgaggcatctcaacattcatctcagcctacatccttatcacatatctcagcaactattctctctcatagttcacctcaaaacccactctaccattcccacctcctggatttaatcatacgctttcaaatgcccctgctgctgtttcataagcagctcctgttgctactacccaagcagctcccactcagaccaatgtttcacataattctggacatgttaacgctgtccaaatgaacatatctcctattggttttagcagctccacttcagaacaagttggcaccaacaatgtacagtttgagccaaaatatttctatgctaagtcaaaagacacctactgctgctcttcctgcttctattgcaacagaaacaccaattgcactttgtactacagctgcttctaggaacactattgttgcaccacatgattcaattgctccacatgattcaattgctgccacagttaacaaacattccatgacaaccagaggaaaatcaattattcgaaaacccaaagttcttatggcttctctaacccctgcatttgtcaaaagtgctttaaaagatcccaaatgcatgatttgtggcaatgtctgatgaaaataatgctttaaaaaaaacctatacacaagtcaatctaccgtcaaatagagaacccataggctgtaaatgggtgtttcgagttaaagagaataaagatgggacagttgactggttaaaggcaagattagtagcaaaagagtttcatcaacaagttggcttttactttcataaaacttttagccaagtgattaaaccagtaacaattcgtgttgttctcaccatagctctttccataggatggttagtaagacaattagatattaataatgcattccttaatggtgatcttcatgaagacatttacatgatgcagccaccaagatttgttgatcatgagcatcccaacaaagtttgcaagttatacaaatttatctatggtctcaaacaagctccaagggcttgatttgagaaattatctacagtcttactacaacttggtttcacttcagcaaaaatcattccttcacaccaactagtgtcatctacattctcatctatgttaatgacattctcataattagcaatgacaatcaacaagtctcaaacttaatcaaagccctcagttccaaaattgctttgaaagatcttgggatcatgaatttttttcttggcattcagttcattcacacaacacaaggcattattctgtctcaacaaaagtacatacaggatcttctttgcaaagctgaattgttgggagtcaaaactcaaaattctcctatgaatattggtttgagattatctaactatggcaatgaccctatcactgatgctactgcttgcaggtccttggttggtgctcttcaatataccactataactagacctgacattgccttcagtgtgaacaaagtctgctgatttaagaagaatcctttgcaatatcaccttgctgcagtaaagaggatcttaaggtatcttgcaggcacactagattatggtcttcacttaaattctgctgatttaacctgtgctcttcttctttgcatcttaaagctttttgtgatgcaaattagactgctaatcgagatgatcatcgcttaaccatacgttactgcatcttctttggtggaaacctcctctgttggcaatccaaaaagcaagctaccatctccatatacagaggctaaataccgcagtttggttgttgttgtcactgagttaagttggatccaaccattgctctcctccactcctcctttgatctggtgtgataatttaagtactgtgcacctgtctgccaatcctatcttgcatgctcgcacaaagcatatagaaattaatcttcactatgttcgagacaaggctctgtccaaacaaatcattgttcaacatgtttctactgagcatcaaattgcagattccttaactaaaccaatctccagttccaggttctattttcttcgagataaacttggtgtggtttgctcaaccaccttataagtttgaagggagttgttaagggtaagcttcagttgtttgttagtgtttgttattttctgttagcttagttagttctgttgtaactaactttcagttagttttatttcctgcacgtgtgcttattgtactgtatataagaagttttgtcttctcctttggtcaatcaatgaaacaattcctctttcttgcttacttgcttcgttcttatctttctttgagagttaacaccccctcctcaattttgtttttttcataaatattttttacaatttagtatctttataatg

SEQ ID NO: 295563 - DNA, 944 bp, Cannabis indica
aagaaagatccacctactggtgttagctcaacattaactaattggaattcgaacttttgtatctatagtatgattaataccaacttaattccagcattttagttgaattggtagcatttattcatactatttaatattgtttaacatactaaatatttgtatattagtgcaatttttatatacacatactgctatttttaattaacatgctagctgcacaacaatacatatatatatttttaaagaaaatcaatataaattaaaataacaaacgtaacaaaattaaggaattagaaaaaaaaaaatttccaatctataaaagttcattatctatatcctaagagcatatatatattaatacttaattaattatgttgagaatatttttataagtaataattgtcacattcttaatttaattacacacaaattaaaaagaaaaactatatattagatgtgatgatatatctacttaaaaatatataggggttaaattaatttaatataaatggcctaatacattaaactaagatgtcataatttttaaaattaatagagaaataatttgacattcttaattatttagagaaaaaaataactcaattaaaataatttaattggccttgatggtacggatatgaatgatggttaattaagaatgtttttttccttcaaatagtcaaaagcaaatggttaccccatttattaatcttttggacattcataagttagtctatttatttatttatttattttgacaaagctgcttgtctatttaaattattataataattttattttttattatcatatctatttaataataaccaaaatataagtcttatatgtattctgtcatttcaatacttacttcttcgccttcgtaattttcggttttgagtttttttttaaccgaagactaagagcatgtttagtattgtttt

SEQ ID NO: 295564 - DNA, 4714 bp, Cannabis indica
tatgatgatcacaggcagccattgacaggcttgatcaggcctcgatggtacgtttagaccgtgtcttggtatagtttttagagcctcaagttcttgatgacgggtcacagggagactggtgggtctctcatccatctgaatcactaccaaggtttttgataggatactatagagtggactagtgagaggcatccaatgtgaggtgcctttaagggatcagcgagcacacatactggccttcaatcaaatggcatggttggagggccacatccaacaaggggtagtattgtctttgcacccatatttcagagacatatttggctactttaagattgttccaacacaaatcaccttaaaaagtatcaagtaccttttggcaatgtttgttctctatgtggagctaggttggccttaaactactctgtatgtgtttaccaagattttttggaaacttaatatttttaaagcttaagaaagaaataacggaataaataacaggataacaaataagagatttttatgtggtttaggcgttaactatccttagtccactagtccattttattaggctcatcaaccggtaactatttatacaagtagggatacaatggactgaaactcagtttcccttgtgttcctcctaaagaagaggaagcttaggagggatattctggggtttcttagtatattatttagcttattacaagtgtgtttgccaaaagtttgaagaatgagtcttgccctatctcgtgttttataggagtatttataagccaacttctttccatgcactggattggattgatcatcctcaggcaaaatctaaccattgatttggtagttggccttttctccatattgaatttaagggcatcaaattttataggctgggcctcatacacgtgtcgacccaaacctttccttttgaaattccattatccctagctgctggatcatttggtcaagtacgatgagacacgcatgctctatatgatagtgtgtcatgggggaaaacttctgacgtcgtacctgaaaaggcctggccacttggtctgtagtctgacatgtacgagcaaagcctccctgaaataagagaatagcctggttaggcacatttcaaaaggcctttgttcttctggtaaaaacccatacgcttcacaggagcagatggcttcgttttccgggactggggaagatttcagctcatggactaccctccgcgctactggcagtcagggaactcccagtcacagaagccctttctgtgagttggggcctttatcatcccgaagcatcagttaacaaagttgatcgactaatgacttcttaaccttgattaaaatccacgtctcgcaactgcaaaaatgcggataacatttacccccaagcttctaggacgttatatgatttgggagcttacagtatcccttcatgcgtgattccaggaaatgggatgaatacaagatctttactacatcacgccatcagccgccaacaaaagtttcactgtcagaaggtattattccctttatttttacatcaaggcttgaaatgctgacttttgatatttgcacgcgtggtgggtgcatgtttgatgagatgccaaaaatggtagcaattggattaagcaaactttccattcgatctgtagttttcacgaagcatgcaatgatggaagctaaactttgggagttaatacaccctcttagcttccctctgatccaatcgtctaacgtcacttgggtgaacgagtcaaaccattcacttctcatggaaggcaccccttcttggcacctaataaatacttagaagagccattttacatctcacattttttctgcctgtcgtactagagttttagcgattgcttccatctcttcctctatcttggaacacctttttagcaacttcaatcccaaacacacgtttctctgggcaagacacatcacaacagtcacccatcctattggtaagttctttttatcatcatttatctaatgtagagcttttaaggagctgagagagtgtatgttgtgtgcgattatttgttctaggaacattggcaccatgcatgcggcctccactagggacagagagacctgggatcttgtatcgtgctgacctatttagcttcacactaatttttgggaggtacattaggtctgctatggaaataactggttcttctaaagctgtgtgtgacagtagccttggcaagaaaaggcaaaggcccacaatggctgtttcagaaatagggacccaccctccacatcatgatccactactatggttgggccagcctcattcgtactacccttctgccatccctaaaataccctctatggcgttcacattcttctgaaaggccattcccttcaatcctcatgacatgcaaagacggagggaagtgaacaaagccttgaagtttggaggcagagaaagtgttaatacatagatgggccaccgtgctttcagccatacagaaagttgaaattttagacggccttcacactttgacccctaccggaccaaccgtgggggtatacagaccatggagaagcgcctggcccccaaggtagggagagaagctgccctcttcgctgccaaaattttggaccaaatggctaggagtacctctgagctgcccagggagatttggccatcatgcagtagtgtggacgtgtttgcgctggcccattttgctaagcaataggcggtcggggtaaagtttcaagagacctctctttctccctctcttttttatatatctttaccaccgtccagacatttaactcttttattttggctcattacgataggatgctttgctggctgagaaagctgacagggaggctgacacactggttacggagcttgagcaagccaggacagacaaccgtgacttgcgcaacgttaatgagacccttttggccaaacttactgaggccaagcttcaaattaaaggcttgaagaaggagaaccagctattggagaccaattatgctcaatagacctgcctcacagggggtatgagggctgttcacgacctttattgggagcggttgtctagagcagagtcctcaaacccgtccggtggtgcctaattttgaactgtagtaggcctcttcaattttgttgtttttttttatatatctccttctcactacactttttaattcgcagagacaatttattttgccttggccgtggggactggatgtaatagtaatacgatttttgtcatttttttttctagagatttattttggtagactttttaggagctggttatgtctttgaaatacctagttccactgcccaatgtttcaaatcttcccgtcagtctttacatctcttaatcgattcagggatcatccctggactttaccctttcgttactggagttataatgcttcttcccactatttagcctcccacttgggtagaccactcacgaagagttagtccggagatggtttcctttgcagaaaggagccttttcttcacacatctccttgggctttaactctttttttcaggtaaggttctgggagaaacactctagactttaagcatttttcttattttgatccttgcaagcatgaagttctagcaaattattttgatatgatgggatcagttagaagtaatttgggcatatttttcttttcatgaatattggccaaatacacatcttatctaagctaataaccttagcaaatggacgtaagaaactgtagtcatcagcaactgggcgtaccatagcccccaaatgagctgagaatttcagtctcttctgaattctcagtcattttcctgaattccaatgaggaggaggtcgaagtgcagttttattttggccaatctttgctccgggaagattagttcacctagaccatgcctttcctctctatgactacttggaggggaattttcaaaagtttggagaggccagactaaacttggtagtaatctcctagctcccacggggaaaaaccgtaggatcgtaggtggaacccaagttggatggatggcttcacatggttccttcttccaaacagtattcccatcaatccatttgtaatgtgtcctttaccatgacacgaacatcatggtgggaagtataagtccttgtgggtggcaaactttttgtttcccagagggaaagctagaactgtgccttcacttgagaaattatcccatgctgaggtctgcttcgataagcgagggtcatgttgaatttcacagtggccacctttggatttcacggaaaaagggtagaggtgcaccaaaattcaaacaatgactttgctttaagaggttgaagggtgaaacattactaggcttgtgatagacttcaaatattcattctctttcgggaaggagggttgaagatgtgtcgtacccccaattatctttcatgctaaaaaaaaaaaaaacaacgtgtctacgagagtcatgttgaatttttatgaagcaaacttcagcttctcagagtgaaggctaaagttgcataaaaattcaagcgatgactttgcttgaaaagatcaaagggtgtaacatcactgggcgtaagacagacttcaagcagtccttctcttatgggaaagagggttgaagatgactcgtaaccccactgatctttcatgaacaaagaacaacgtgtgtgcaagagtcatgttgaattttttatgaagtaaacttcagcttccgc

SEQ ID NO: 295565 - DNA, 889 bp, Cannabis indica
gttttgagaataaaatcccatgattctcaataaggggtaaagggtaaaatcaaaacaataggacattgaggaagaaattcctctgcattagtgggttatgttatgtcttgggtgctaacccgcctttaaattttgtcgaatatggcggcaggggggaattgagaaaatgggttgcttggtgtgcttttggttcgattccaattggaagagcaacatgatatggtggtctgaatagtgattttgtgtgttttttttttggacaaaaagccattgattaaggtgccaatttggaacttaactaaaaatagggaagtctcttttagtcaatagctgccaaatgaggttttgttttattgatgaaattgatcaagatgtaatagtgactcattactatgaatggaaaccaaccttttgttcaaattgcaaaggtattggacatctcaaggaggtgtgtagggaggggaaggtgatctaagttccattatttatggagggggagatcctccattaatagatggatagaatcttatgctggaatgtccgagggattgacagtcatagtaagcaaaataaagtaggtagttttttctcgctaaatgttaggctaattttagcctactttttaagtgtcttaattcatgctttcttgatatgtttacgtgtttttggagtgaatttatacttgttttgcttgctttcaggtttcagtatatgttttggggcatttagagtggaatgtggagagaaagtgtttaaccaaactcaaaacacaagttttgaaattgtattaggatcgcagcgctgatgtgttttacaaacacaacaagaaacgatcacatattcaaaatcaaaatttttctaagggtatttttgaatttggtgggaaaaa

SEQ ID NO: 295566 - DNA, 1848 bp, Cannabis indica
ctcatccaatctctatccattctaatatttctaagaaaacaaaaaataatatccaattaattaacctattaaattaatttttaatactacttgttaaaagtaataaatataatcttttatttttgaatggtatgagcttcttaattatgtattcgtataattgattttgtttgatttaatcaaacaaaagagtatgtactcacaatttgatcataacttcaaaaaaaaaaaatagtgattatttcagtaatgatttaggcatcatactaattacttcaataaagtactaatcttaccgaaatttcagaatctaccaaaatttcggcagcatataattggacgttcctgaaaatttaaaacatgcaaataattaaattaaacaatccacaacaatgtaaaaaaacattaactaacaatgcaaaaatttccacccatccgaccgcagtacatttattcccagaacctacttcactatggatgaatatctaagatattcaaactcttctagataaatataaaattaaaaataatactaattaacaaaataataatatgcataactaaaaaataattaattccactcactataaaaatttaaaagttaaaatacaaagtaagaaaattaaaaagtaatgtagaagttgatgatgtaaaatgcaaacgataattttttaaagtgtcacatgttacctcggttatacatcatatcccgacgctaattgttatttttagcttcaatcacaatctgaagcataaaatctccctcagtttttgcctcggacaatcattttggtgagactcgttgaccgacacaaaaagtactttttgtagtagtgtaaggcttctctcattttgctctgggtcttcccgttggtaaggttccaatcaagtctattcaccacatggtgaatgaccatggacttgtcatgcttgtgagctcggctggagggtgtctacaaaagatagcatgtctttggcacttgcgcatctttttgcaaaggtagtaacgtctctttccaaagtgggacagtagtatccttactttaaatgtctttcgtgacatcgagaatcctcacgcgtggttcctgcattctccttcatgtatctctgatagcacttgttgtgctttgcattccttgatgtagcgtaggagaggagtggaaaaactcctcttgtataaaactccatccatcaagacatatctgatcgctttatacataattctttgtgtttccttctttttcaaaggcaatgatatatttgatgtaagacgtcatccaagaggtttcgtcattccccacttgccacacttgaacattctcaatggtgtgaactttgcaaaggcatcaacattagcgttctattctctcaaaatttgctcaatcatgtagtgttgtagctgatccaggtagcttttaaccctagtcagatatgccaccatctttggtccatttgattggtattctcctcgcacttggaaaaccaccacttgtgagtcactaaaaatttgtatgagtaattcttagttctttggccaatctcaagcctgctagtattgcttcatatttggcttcgttgtttgaggctttaaaaccaaatcttatagcataatacatcttatgtcctccagggtcgtcattaacaccccgactcctgttccgttgtaattcgaggctccatctgttggaagttattttaccaagatcttaatttactaatcatgtatgctgattataaatattataatataacatcttaaagatgaaaaatataaaacgataattaaacacatataagtaatagatcacttacattaattgcagtgaataaattgttggaaattatttt

SEQ ID NO: 295567 - DNA, 3853 bp, Cannabis indica
gaaagaccaggcatgtccagggtcttttcaaatgtcattttcaattccatttccccagacaagttgaagattttacgcaaggctcatacgatttccaattccatggagatcgtcaaccctgatctcgaacatcgggctcatgctccacctgaaggcatggttgccttctctagctgccttcttaaatcaggcgtggttctccctctacatccctagtacaataacttgttgaaaattcttaagattgctccattacaactctatcccaatgcctataccactataagatgtacttacatgctatatcacctagttacgtgaagacaaccttccattcttgagatcctctaaagttatacttttcgagctaccacgtgctctagacattattttttattcaagagagggcggaggctcaagacttggtgtctggccaagtctctcactgcacgggttggaagactgattacttccccgtcaagtttggtatgataagtctcctactttgtttataatagaattataataaaacaatttcgaatgataaaaacttgtcgtttatcatataatagaattaaattttactaaaataactattttgaataagctattgtgtttcgaattctaacttatcattgtcatcttttgaaactgggtctccatctaatctcttccttcaattatccttttagaacaaactttggcatcttcacatccatccaaaggttaaacactttgagagtagagcttgtaacaatgctcttctcacaaacactaaccttttccataggaaaattaaatagaatcaagatttggtttctcctctaagtcactttcttatgatttgtttggctgccctttctctaagtactcattcctctccctacatgatgtcgtttcctagttaccctcggcctcctcttcgctctctacaacaacctcaggtggacacttgtcggcatcctccgtcagcggatcttctcaagctcaatgtagaagccactaattcaccagattataccacaacagaggtagtagttgcaaaccaaaaatcatgatttaaaaatttgtcatatatctcaagaaaaaacagctacaaggcgcttagagggtaatatgatttagattttgtgatatgatatccttgtacatcatgactaatatattgaatggatataaatttctgaaaaagaaaaataaaaactgaaattagtcatattgggaaattacttttaaagacgatctatgcaatatgcaaaccaaaaatcaccttcaactagtttcctaacaggttcagatttttccttaaccatctggttttacaaagtcaagctcaaaaagataaataaaacaactgctcttataatagctttgatatgcatttaacagaaaaaatgagtcttacaacaactacaaccatgctctatggttttatctcaacaaaaaaaaaaaaaacatgctctatggtttttatttggcctgcaaaaaactgatccatccgattacaacaacaaaaaaattgatatataatcttaacgaatagtccaatgaggtagcgatgccatatcttcagaagctgcatttagtaagaataaataaacttatgtgtattgtataggtatattcaatcttacgatcacaatactgtagtgattatagaaactttctttacctgcaagtttaaaagagaatcctgtaaaattatttgaagttctacaatgttggtactaaattaaaataaagtgtgaaaatgaccttacattcaagacgatattcgtcctaaaacaattccactaaaaataatagcaccaaaccacttgtttgacacaaatctggaagcaagatgaaacagttaagcaagttagtgatgctcaatgccataagctgagctaacaataaaaggagaagagaataacacaagaaaaaggagaatcagaaaaagggccaatattcagttaatttttatatgcttagtcaaaataatatgacaatttggccaactgatatcaagacatttcacaactaagctattagcacaaacttgtaagacaatcccctatcaatcaagaaaatgtagatatttacttcatgaatttatttactggcacatgtttttcctcaggaaaaaatcaaacaaataaaaaatctctacccttcaatttttcagtactaacatattatcctcccctcacaaaacaaacatgtcaaataaagaaggcttcttaactacaccagtttataaatagggtgagtccatccagatgttagaaattgttttatatatagataacatagtaaatgcacttctacatgcaagtattcttatcattaataagcataggagtgtcttttgtaaactaacagcaacacaaggcaatgaatcaaagattctcctaatttaaattgaataatactactaataagccaaaacgcaatttgcatatctacagttttctctaaatcaacatcaactcaaaccatactttttattgcaatcatctcgagatgaaaggtcaacggtcgatatctgccaagctaattgtccagatgcagcaaccaatgatgcataaaatggccaccctgctcaatagtcagcagattttttgcataaagatcagtcacaaatagaacaagataattagactagagagaaaacatgaaaaagaaggattaccaatttcagcattatatccactgagggcaagactactaatgcatgcagctccaaaccccatattccactgcttagttaaatccccaaatctcaaagccgtggacttaataccaactctcacatcatcttctttgtcctgaatgaaatattaatcccttctaatttaatgaaaagaatttaggtgcttaccatggattataaattcactcaacttgcagagcttgctcagtgaaataaaagttttttctccagcacaagatagtacaccaaatcaactggccctattttgtgcaacttacaaacctctgtcaaacaaaggacataattacacatttattaatatacctgatgtgcataaatcgtgtcatatactagagtccaaaatactccagaggcatacaaggggagaactatagctggatcaatgtttcctttaacagcagcccatcctaataaagctccccaattaaaagttaagcctagataggcttgaggctacacaacatcacaaaagttactcagtcaatttttgtgacattttacatcagtaaaagaaacaagttaaagctcaagaaaattgttaatgaagtataaaattattacccaaaatgtcaacctcttcataaggggataggaaaagactagcaacaaagatgaagcccccaatatccgactgtgaaacaaagaaaccaagaataattcaaacatgtttaaatgtgtatcttccagacattatggattagataacaaaataaaatcaagaattaaagaaaccggctgcactcatgcaaagcttgaaatttctaggtaactgtagtaggacaactgataagctaaaataaatacaatttctgaatttgcatgagtctacatatgctctaagaactgaaattgaaaacattattttgttttacttatttatatgtgtagaaaatagtgaatcgaattatctgtgtatttcatagaatagtacatatttatatacaaagctaggagactaggaaataggaaactaccaacaaaataggaaactactaaatacaagttaccctaattcttttacacctaatatacagctaattctctaacactccccctcaagctggagcatagatgttaatcatgcccagcttgttacaaagatagtcaatccgcaccccattcaaagcttttgtaaaa

SEQ ID NO: 295568 - DNA, 7760 bp, Cannabis indica
tacaaaaaatctataaaacttattaaagtcgttttttaaatttttttttaaaaaaagattagtgaaaataaaatatatatttattatttattatttttttttgaaaaagttattttttttattttataaagatatgataaatatcttattcaaattaatacaatatttatataaaaataatattgatgaaaaatgtttagattaatgaaaaaaaaatgttatatattaatgttaatggatgttcaaattactttttattttattgatttaatttctcattttttaatcatatttttgtgtaagtaggattcacctagtaaactagttgacaattctccttctcttcgtctatatgtttctacatcttttttttttcttctttattttatactattcaaaatagttttataacaaaaaaataattgctttattacttcaattttttttaactagtgaggtgctttttatgtatacaggatgcaaatataattacttagactatacgtaaataataattttttattacttaaaaatataaattataagtaacatgataattaagttgtttttttattgtatttttaaaattaatatttaaaattctagcattcattaagataaatatgattaaatattctcatacacaacaaaatacattttacaagtttttttacaatcatattcttcttaataatattcattttaataagattatttttaactctgggtaaacaaacttaaattacgcatactattttacaaataataatgtgtgtagaggctaaaattgggcttagcccaatatcacatgcgatgttttcaaacaatgttcaaataaaattggattgggctattaaactaattgtaatagtacaatcccggtactaggcctaacagacccaaaacaatatagtcatgttagatattaacgttgcctatgacctaacattgaggtcacaataatctgacccgtttataagattgagttgttactcacctaacaatttcagaagtggtcaatcaaattgagcacgtaactatcagttctctcataaaatgggagaagagaaattccaaaggagaacggtggttcgtgagtaaagtctttccatgaacgcttataagagctactctcagtcactgggagaggtagatcaatctcagtcatttcaacacttctcacttattgttcactctcttattttctctaaaactacgtacttatttccgcaatcaagataggtggtaacttagttcggtcatttttctcgtctttttactacattgttaacagctttgttgacttgactatcagggtcccttcagtcgacaccatttcgatgtcctaaggttttccgattactctcttctttgttttacaagttgtcggtgtccacgtacgatcatcctcgattgattgtaaattttagcatctacgatgtgcattcaactttagctattgtagcggatggaatctacaattacgaaattcaggcaaaagtaaccaaaaagaataaaggagacaagagttctattaggaggaagtgtcaaagactctaatttgattgtaaaaagttaatagaaataatataagtaaatgatgatgggtgagtgattaactagctagtgaaagttggatgactggctatgacaagtggggggtacacatttacacccgaagtccaaaattcactcggcctgaaacctgaaaaacccaaaaaaactggattacaatttagtaaatcgggtctagtttacttttgttcatcactggttgaattcaggttttcttaatccaaaactcgaaaaaattgagttacacctgaactcacccgaaactcggatatatgtaatttttttatacattttctgaaaacatgaaacttaaaaacaaaaaaaaaaaaaaaaatctaaataataatatatcattttttattttctttttcttcttttattttttgtcttagcattttttttggttttttttatgaaaaaatatataaaaataaaaaatttcaaaaaaaaaaaaaagaaagaaaaaaggttagcccaatccaaacccggtcaaaatctacctggactcggttcaaccagaacccgacccacctgcacctaaaacccaaaaacccagtcacacaaatgggttgtcaaattatgaattgttaaagtaagcgagctgtccaaaaatttagacaataaacatataatgtccttaaacaacacatcaaaagagctagagcttcaatttgtaacattgaaaaactacacaacaactcattaacatatcaagaatggtccacagacatcaacaaaacaaaataaaacaaagaaaagagaattaatcccctagtaatgatattaaaaactaataaaaaaaaactcaatagttagaagataacaactttcaaacaaattatatttaaataaatttatcagcaaagtgtctgtaacagtaagtcctccacaaaattgaccaacaaaataacaataaataaaactctattactaaatattttaatgaaaaaataaacaatgtgaataaagatggtaaaacaatccatattataatatcaagacttaaacttatttgtaaaagccatgagtacaaaataaaacactactcttatccattgatcaaaccacaaatctaccttaaatatttaaggagcaagctacacaaaataacacaaaaaccataaaaaaacaatcaaaactatatataaaaaaaaaatagtgcaaaaaactagcataatcttactatcatatatacttaaaactataaatagaggaacaaattaataagaaaaatatgacaagtaaatttgtaagacaaaactcagatgtgcagtacaatatttgagtgtgttacaaattacaatcattactctaaataataatgggagtgtttttaacaaaactttgtggtgtgaatataatttccatttgaaaataggctaaagtgcaaattacacaataataaaagaaaaagggtattttgcaaagaagtcctcaaaaaaacagttattaatattattttcatttatttatttgatttttgataataataagattggtcgcccacttagttggcttcccatttgagtgagtttcggcattctatctatgttctcttctctgctctctcttctcttctcttctcttctcttctctatactaaatctcataatccaaatcaatgaatgaacgatcatcatcataagcagcaacaacaacaacatcttcatcttcatcttcatcttaactaatacactactttgcaaatgatgaggtttggttatatgaattctttgttttgttttgttatgatttgggatctcttagatgtagatcttatgttgtttttcatatgaatttcaattatgtgtgtttcaaaacagatatcagagagtaataagtccagattgtgttcctttgagtaatgggaatggaaccaagaagcccatcaacagagaacaagacacaatcaccagattcagatccccttcttcttcttcatcaacacaacaagaccttacttttcaacaatccattgaacaaccccatcatcatcatcatcatcatcatcatcatcatgatagcagttcaagtccaagtcctagccgagggagtggagatatgctgttgcaatggggtcaaaagaagaggtcaagggtctcaagaactgagatccataagaacctaaacatggaagactcttcttcttcactttctgctgtttctcttgttcaagttgtcaggcaaagaagactacctaatcactctggatcaactccaaagaagttgttaaattccaatattatgccaccacctcctactcctcctccgcttccttcttcttcctcatcatccaatggaaccagagctagaaaagaagtacttctttctcacaggtagactgccaaaatctccatctcatcttctttttctttaatgggtttttagtttctttcttcaattcttgttttgggttttgattgatttgaggaatgagaaagaagaaggtgaaaaaaggtttaaactttaaaaacaatattgtgtatatgtaagcaaaagattcagtctttatgtttaattaaattatcttttgttctggttctggttatggatccaatcaaatcacacccaaatctctattttgaaaaatgatttgatgtgttttgttgtgttgggttatatgcccattcccatacctcacctcacctcaacagctatatgctatctgttatgctaagctatacaaaaagcccctaaaatgttgttttggtctacaccttgttgcccttttctttcttcttctttttttagccacacaattttacctttctaccctttcaaatctgaaaaaaaattcaccttgtcttgtaacttgttgttgataatatataagtagtaaaatagcagtactactgtactgttctttttttagaatatgtatatttctttaaaaaaaaattatttttatttatatttttatatatagatatatttgtatgggatgattgatgatgccctgtccttttctcttctgatattttcaaaccactccctaatttctttcaaaatcgtttctttctttttttatataatatttatttaacatttttttacttaaaaagaaaaaaagtttgatttttattaatgagtaatttttatatatataaaaaataataatagaaaaatgtatatgtaaggtttaaagttttaagaggaaggttgttatgtttttaaatttaggtgggtattaatttgtgtactaaaaatgcaaatctgtctttgtttgtagttgtaaagtttcaaactttaatacctttctactatattctctttcttccttccttcccctttgaactccttttctttctttcctaaaaccaatagaaagaacgtgttttgtgttgtgttgttaacaacataaatcaattgtaataataatgagcaggaacttggaagatcgaagtggaacaaatgggtcaccctcaagaatctgtggtggtggtagtggtagatctacagttgggaaatctgagaagaaagtgtcttcttcttgtttggcaaggttgggcaatgataaggtctgtgatagactcaattccaatcatgtccactcaacaacaactgtaacagaacatcatcatcatcatcttcatgatcataataatagtgttgtagttgaaaaggtgaatgttgaagctttggaatggccaagaatatttcttgctttatcaagaaaagagaaagaagatgattttcttgctatgaaagggacaaagcttcctcaaaggcctaagaagaggcctaagaatgttgacagagctcttcaggttagaaacaagattcaattcaaatcaattcaattgtgaattcaatgattgtgtttattgatttcttgtttgttttttggtagtattgtttcccagggatgtggttatctgatttgacaaggaataggtatgaggttagggagaagaagtgtgtgaagaaggtaatcgcttgctcttttccttaatgaattttatattgatatattttcttgaataatgaaacaatggaggagtccaccaccacactaccaccactaaagtagtattattagctgtatgtagagatagaataatgaacaatggagggcctcttttattatgctcaactgcagtgaaaccaatagaataataatattaatttgtgttttgtggttgtgacttgtgtggttattgattgattggtgcagcaaaagcagagaagagggctcaaaggaatggaaagcttggacagtgattctgagtagtagtagtagtagacatgacacagtcagacacctcacatgtagattaggcacatccattagattagattcttcttcttcttaagcacatattttctttctttctttctttttgtattaattagccaaagtagttgtagtagtagaagaagatgttaagagtgataatagtgaggagaaaaagctctctttctctacaaagttctgaggtgggaatgaaaaagagaagatcaagtttcacctctctctctctcctaatgtcagccatcatcatcatcaccaggcatgagcatgattctgttggggttgttggtcaggggacatttttttcttcctttcaattttccttgtaaaaaaagctctggttatcatgctcatcatgttgttttgtccccctaatcaatcaaatattataccaccaggcaaaagatgctgttctacttcatttatgtaatcatttttatatttaatttagcccacaattaaaataaagattaaagagtctaattttcttaaatacagagccatgaaagaaagtttaacaaataaataaaataaataatattcaatctcaaaccagtgtaagtatatgtaaaagctcaaaactttcttcagtttcaaatggaaacaaattgtgccatgttagcagctaaacaaagtttcttcttttttccctactaaacaattaacatgttacaaaccacctgtgagtgaaatcatcaatggcatcatcctcttcccttccttacttccaactggcccgtccttccttcagactctgcaatcaatcgaaattcattggttggttagaaacacttttaacaacaccaatgtaaaagcataaactctgactgctttgcttcattagagatgttcgttacaaaccagtcgcctgaaagatgcgttattgccccccgctttcttggaatcctctgaacccggcttagcacgatccaaagcctgtatatttggaaagttaaacagtttcatctaactttgaatgttaaaactataagtgatattcctcaatacttcttcatgataatgattcagataacttaaggtcaacatcaatatgtagagaaaatgagacaattctaactaacaacaaagacaaatttgggttgcttcttaaaagcatgacatcatcaaccaatggcttacacatcactatcctaatttcttataggataaccttacaataaccctttaaatttacataaatgtctgttctgttaaagctcccagcactggttttgaagcttgatggtattttgttttttcagattattgattgtatttgatgaaattatgagaaagtgaatagctttaaaagcaaaagtgtaaatatttctttagtcttaaagctcttaagaaagatgatgggtcaattatgagtaaaaagcactatatgatggattgcaaataagttgcctatgaatttgatcatgtactacagggcttttaaacaagttgtgctttcttatagcgctgttcctagatgtcacctcaaacatatcaatcagctaataataatgatgaccccatgaacgagctgcaaatcacagtcaactagctcaaacaacacaagtaaaagcacacacacattgatctaagacaaacaacatgttaggttgataagccccgagatcttccgatcaagaacacaacaaaacagtagcaataataggagtagaacaatagccaaaacaatagaaattgtgtattgaaagtatgagaaactcaattacaaagtaagggagcccttaggcccctttgaagcaactagagatttactcaaaacattgcatatccaccaatcttcctaagtattctatatatactattgtaatctcactcaaacactcttcttaatacaatgacccaattacccttttatttaatatatgttaaaacaccaccctaatcctaggtcctaacattaccggccgcccga

SEQ ID NO: 295569 - DNA, 5696 bp, Cannabis indica
acttgtaatagtgtttgtaaatattttgggatcccaactattttaaaactttaaatatattacaagtttattttctttctgtttaatataaaagtttaaattctgcgctatttttattagtaatcccgattaggggattagggtttcataagtgttttggatagcgtgcatgattatttagggtgttacataacgattcgcttcccgtccattgacagactcttccatgaaagacttcggtgtttccatattatttctttttaggatgtccatagcatattgatattgagacagaaacagagtgtcacctgatctttgtgcctgaaacccgaggaaataactaactgaaccaagggttttcaaagaaaatttagcttgtagatcattgataactttgctaacaacctttgagctagcacgagtaattagaatgtcatcaacatatatcagaattagaagaagacttcaattttgattgctaaaaaataggttgttatcatatacaaaatttgtgaaaccccatgcaagtaaggcacttttgagcttatcataccaagatttaggtgcctgtcttaagccatacgaaccttcctttagttgacacacataagtgggatagttaggatcctcaaaaccttgtggtttgtgcatgtaaaccaccggttctaaatcctcatttaaaagggcattattaatgtcaatttgttgtatttccaagccataagtaactgcaagagtaaacattattcgaatagtgcttgctttgacaacaaggctaaatgtatcaaaataatttactccaacagtttgttgaaagccctttgcaaccaatcgagcttttagtctttctacagtaccatctacccttagttttatcctttacacccatttgttatctataacatgcatgccatgatgatagggaactaagacccatgtgttatttttcttaagagcataatattattctcccatagccttgttccagaaaggattactcaaggccattttaagagaggtaggttctttaagataacactcataattttgtaactcagctgcaagaattttgggtttgtaaatacctaatttggatcttgtagtcataggatgagatgatgttgttggaggtgcagtttcgacaatgggaaggggtgcagtagtgtgatggacagtgggtggaggttgatgatcttgatttgtagtggatggaccaggaacatatggctcatgctgctgcattgtgtgagccatgtgaggggaggaagtaggttgttgcacaggttgctgcactagttgtacaagttgctgcactggttgtgtatgctaatgtattggggattttgggtaagattagacacatcagatggtatagaaatatattggacagtagaacatggtgatgttgagatggaatttgtagagaacagttgcgactaagggaaacataatttaccaaatgtgacacttcgagcaatgtatattctaccagatggatgcaaacatttataccctttatgatgtggactgtaacctaagaaaacacacattgaagttctaaaatcaaacttatgtttattgtatggtcttaggagagaaaaacatgcacaaccaaaggttttcaaaagaactgtgctctggtttggagtgaaacatgttctcatagggagagatgtattggttcttctgtatgggaagtctgttgatgaggtaagtggatgaaacaaaggcatcccaccagaaagataagggtaatttggcttgagcaagcaatgtgagccccatatcagttatgtgcctaagttttctcttaacccgtccttgtcgttggtgtgtatgtggacaagggtgtctaaagatgatacctaaatcataaagaagaggttttaggggtctatactctcctccccagtcagtctgcacaaattttatcttagtattaaactgctttacaacatagttattgaagtgtttaaagacatttgaggtttctgattttgtagtaaggggaaaggtccatgaaaactttgtaaaatcatcaatgaaacaaatgtaataaaaccttcaggggaaggatggggagatagcccccaaagatctgtgtgaactatatcaaagggagcattagtactgttttgagaagaatgaaaggaatattgattaagttttccatattgacatgcatgacaaattgacatttcagaggtagtaatattgagaaagttgagaactttattgggaacatgttgattggggtggccaagtctactatgccacaatgatacaagctaagaatttttacaagaattaaaaatattattagcagaattgctattacattgggaagtagacataacattagcttgacacaaagaagtaatgtttgttccaacatgtgctttattgtactgaattggcatattgttgtgtgagtgaagttgggagctatctgataaagaccatctttaggggcaccctgaagaagagaaatcttcgattgattgtccttggcaaaacacaaatcaggagtaaattcaacagtggcattgttgtcttgagtaaattttgaggtactaatcaaattttttgttatggctggaacatgaagtatatttataaggtgaagagattttctagcagcaagagtactattaccaatgctatgtatagagagaggagaaccattacctacaacaatattttatttgcctttttaggagctttgctggtgcagattgttattgtcttgagtgaaatggtaagaagcaccactgtcaaggtaccaagcttcatctgtaatgtagcctgttgaagcaacaagggcttgaggttggttggggccagaggtggtatcattctcatctgcgccattgtatgatattgaaccttctgtaacacctctgaaccgtgtgaccagctcgaccacaaagttgacagatgggttgattgccattcgaataacctctgccaccaccattagttgatcaaccaccataggatcctcttccacgtcctggagagttgtttgaatttccacgaccattggcagtgggagggccaaattggttcttcttgaattaggcataattggttgtggctccatttagatcaatggtggcatgagcttgttttgcttcaattcgaatttcatgactctagagcataagctgaagctcagcaagagtgagattgtctcttgaggtcagattgacaacaacaacttcatactctgttcctagaccagtaagaacatagaagatcagttgttcatccgagattgggtttcctgcagcacgaagaccatctgtaagattcttcatcttgagtagatattcatcgatggccaatgattctttcttggtggattgaagctggttcatcagatgaatttgtcgagctcgagatgcagttccaaacagttgctcaagtgtgttccagatttcagaggaagtagcacaattgaccacatgcccgatcattgattaaaaaatagttgatattaaccaagaaagaagaaactgatcaagacgcatccatctattgatttcaggatttcttaccatggtttggattctggagcttagtgaatccttgcctaaggccgattttgattgaggagaattccttcacgatcatgtgctctaattgcaagaagaacttgagatctccaaaataaatagttgttttgatttagtcgcagtggtggaacgaacagtgtagttggaataacggactggagagctgcagcactagaataggtttccatggaagttcaccatcggctctgataccaagttgagctaagaaacagagtgatgaagttgagaaaaaaaagagaaaaatgaatctttatttcattgaattaattagttattagctacagatacaagtatttatatcgactcatatacaagagctgaccaactaattactctataacagaacaatcctaactgtatgtctaaccaacttcctaaccgttttctttttcaatatcaacaaatataataaaaataaagtatttttaatttaattttttaaaataatatatgaaattcttgtactcaactaaatattataattcaattaataagaatataattacatattatcttacaacgaaacataatttacatatttctttgcgattatatttttctattaaaaattattttaaaagtagtagtgctttattttttatcataactgaattatgttttcttgagtcattgtgaggataagcccacgggccagtgtagttcattgtaaccgaatattagtttgtagttaactgattgtaacttactagttcataaggtaatttacttatatataatttacatgcacataactacttaatacccatatgcagatatacaggcttttgtattcattggcaccaattaagtacaatgatattcatatgttctaactagctagtggaatttgagaataattattaaactcttttaaaagtactatataacatgaatatatatatatatatatttgtcaaatataatttaaattttaagtgatcgatcgtcctatataataattaatattaatgaactggcagcccatcaaaacgatcatccattgtttatgagtatgataaaagaaaagactgccaaaaaacaaaagggagagagaaggtttgattgccttccaagtttaacttcaaaataaaaagttctatatgtatacatattttttttttttgaaggaaatatatgtatacatatttatatatatagtggggtgtgtgaaattgacggccatatgatcactaatttctttatgattgatgattatacaaatatagatatatttgtttttcaatatggtgattatatgtatcgtatcattcatactatagagtatgtgtatacacttcttcaaaatgatcgtttcattaatagattttttttatcagttttctgtatatattatttaagattacgtttaaatttttaaaaaatttagaataatttataaagtcaaaaataaagtttaaatatcttgttgcactcgagattgttttttttatacgcgtggtcagtaactttttgagtcttcttttcagtattgtaataaactattcgaaattttctaaaaaatttacatatattcatatatggttacaacatacacgatcataaaataaaatcaaactaaaaaaatttagaatgccaaaatcaataaaaggtctactagaacacccctttatacgggtgtatgacataaatttctctaccatatactaggagtcaaggacagactcacagagatgcgaggcgcggggtagtcgctctcttgaaaaaaaaaattgaaaaaaaaaaaacatatgcattttagttaaggtttttttcagttttaatcaaaaaagttacaatattattaaaatactttcatccagccaaataaatatacaacccaaataaaaaaattatacaaataccactaacacacaccttcaactcacgatccacgcttcttaggattgaaaccttcgtctgatgcaacagttgggcaactacccagtaaaacacaactgaaaaaaaaatccaaccagaaagagaaccaccattaattccagcaaattcacctgagaaaacgaccgaaatcaatcaaaatagggactgtttagaattcataaaaaaaaaattacaaaaaaactattatgaaactaaaat

SEQ ID NO: 295570 - DNA, 2809 bp, Cannabis indica
ataagaatgtatagtcataaaaaaaagctgcaaattttctcaataaaaaagattgaatattaatatatatattgttgaatattaataataaatgtgttataaataatgtgagttatgagaatgcatatgtacataataataataatggaatagaagttataagaataaatagacactcataaataaaaatatagataaagatacacaaatcttagaaaaaccgtaaaaatagaaaaatgacaatattaaaatgatagaatgtcatgtcacataccccaacaacacaattatatagatatatagatttgctttcacattaatgtaatagtcttttctaaaaaaaaactccaactttcatgtaaatttttattggttttttgaaaaagggggtttatttttcaaatgtatcatagataaggaaatccatatctatcgattttcgaacccaacttaattgtttcttgagaaattaaaatatagtaggtgaaatctagcatgacaagcaattaaagtacagtggtatcacaaaatagaaatgaatcccaagttttaagatttgaggaatattgctcacattatacagacactacacatgttaaaatcataagaaaggttatccgaattatacgaataatagcagaccggtacatatgttgaagctcaattcaattatatatatgtatatccatgcctagaccgtttgatattattatagtaaaccatttatttaaccaccatatttactgtaatccaactctgtagatatcacttttttttaaaaaaaaattgcaacaaaataaatgtgaagatagatatgatgttatttgtgtcaaattaacctggcacatgacttggctagaaaagttaacaactcttatttcctcgagtatagtattaattttaataattaatgtgtatatatatatatttatatataggggagttggatagggagaatacaaatacaaatagtcactgttgtcgttgatgttgagcatgtttcctcttaataaaatcctcgaccattctctccagagtacttaaatccttgaactcaacgggcttgggtggactatctttgattggtggtatcatgacatacgaaacaccatgtcgttctgacccactcatcaatagtggttgtttcttggacacgtgacccattcttctattttccaccagtacgctccaatattaaatgatgatcaagatcgagattatggtcatggtcatgatgataataagcagctttggcacttgaactactactcaaaaagtttgtgtggtcggagtagtttttcttctgaccaggcactgtcgtttgactagttccgcagttattgatactcacaaacgcaagagacgaaagcttgataatgtttgccaccaaaagcagggatttctcacagatagatttcttcttattttggacttttgaagatgatgatgaggatgaggatttgcgagccatggctatatagttggatatggtagtaattgtatgatgatgatccgagagtgctttggggtagtcggagtaacttatttccaacgaacacttcgaaaatattagaatgaagagttggggttaattgctgttataaacattagagtggttttgataaaattatttatttggagaattttacgaaccaatttagtcaaaatgttctgtggggtacgtacaggcattcaattggccagggatttgaaattccactaatacttaaaggtgaaaaagccaagaaagaaaaaaagaaaggtgcaccccaccttttaattttgagggaattaaaggttccaataaatctcttgtcgttaatatatacatatatgtttaatatacaaatatcttggttcccgttaatgcagttttttcaagattctgtcatgactcaggagaaagctggtgattatccacgaagggatagaaggaagaaaattttaaacaaacttattgtaataaagattatcagaatattagtttgcaaatcaattttataagtgacatttatgcttgtgtatcttatataaattatacttagatgttaacagatggcattcttgatatggtttgctttttttttttttttttccctatatagtgtatataatcaaatgagatgagtatatatatagttcaacatcaagttttgcgtacacaaaaatttatattcatatttgttttgcatagatcctataagcaaccaaaaaagtagccaagagaactgattccatttgagttgagttgcttcaagtgtcttcatctgtggtaaagttagtgctgattagtttatacttacacacattgattatcacatgataagtcaagttagcccacagaataaacaaagattctttgttataattattttctcttgcttttgctttcttcattgtacttattttgtattcaataatttctctttcgtttcttatttaaacctggagcttggtatttagaatctctcaaagtgtgtaccagtatttgttccaaattatgcttctttaaaaaaatattagttttttaatgtaacaccggctatccccgactttataaatataattaactccacgtgtgacttttctctatactgaattaggcacaactattataatttatatatatatatatatatatatactagcaaaaagctacgtgcgagacacgtatactaaattttatgctaatttttttctatgttatttgaaagttatacaattaaaaattaaagaaaaaatgttattagttattcggtgagattattattattatgtgtataggaataaatcacaaattaattaatct

SEQ ID NO: 295571 - DNA, 5885 bp, Cannabis indica
agcttaataattttttttattttttattttgagcccccaaaaggtgtggacttagcacgggcctagcccgcctaagcccaggaccgcctctgaacaaaggctatccaagctacaatgtcccaagttagagggaagctgaacaaatgagtaatgtcccttactcaaatgtaattggattagtcatgtatttataatggtatgcgcaagacatgagttggcacatctcatgagagttttgagcaaatattgattgctagagttgcatacacctatgcaaaagagaactcttacagtgtataaagtgatcttggaccatgacaatgatcttctcaatgctataccgaagggagaggaggttatggcagccataaatgatatgggtaaagacaaggccccggggcctgacggtctaccgccaagcttctatatacaccactgggacacggttaaggatgacctcattgagatggtaattcacttcttcactcacttggaattgcctagcttcattaatgatacttccttggtgctggttccgaagaaggattcaccctccactgtcaatgactatcgccctattgccctttgcaatgtggcgtataagataatttcgaagatcctagcctcaaggatgcgataccttcttccgagaatcgtatctcccaaccaagcggcgtttgtaaagggtagacacatcgcagagaacaccatgattgctcgagaaattgtccactcaatgggtaagaagagaggtaagcggggcttcatgcttatcaagttggatttagagaaggcctatgataaactggattgggacttcgtcacctctgtgcttctccaactcggatttagtaatactttcactaactgggtcaaagcttgtatatcggtggctgaaatcaagcttcttcttaacggatcgacggtgggcaagttccatcccgagaggggtctaagacaaggagactcgctctctccgtctctttatattgtggctgccgaggcactctcccgcctccttttaagtaaagaaaaccatggacttctcaaagggttcaagctggctcgtaatggtactccagtcactcatttgatgtttgcggatgatatcattctttttggtgaggcttcagtccgagaggcaagaacactgctagagtgcttaaactcctactgtcaattctctgggcaataaattagctacccaaagtcctcagtgttcttctcaaggggagtctcaagtagaaaagcccaagtaattgcggaaactttggggatgaagtgtatgaacagtagggcctcttacctgggacttcccctgtttagatcagtcaagagatcggaagacactcaacacctagtggatcgggtcctcaaaaggattcagggatggaaagttaaacttttatcaagtgcggggaagacttgtctaatcaaatctgttgggaacgtctgtgcaagccgaagactgctggggggttggggtttcgtaccacggaaactatgaataaagccttccttatgaaatgggcttggaaattcttaacggatgaagattgcctttggcgccagcttatgagagacaaatacactagaaaccaaaattttcttcaaatggaggctaagacatccgacactatcctatggaaagcaatcttacggatgcgcgaggatcttcaacggggaatttgcaggaaaattggcaatggaaactccacatccatttggttcgacccctgggttccgggagaaattcgccaaccgtctccccgtgttgagtccacgggaggcgtgagtttggtaagtaacttcatctcggatggccaatggaaggaggatatggttagacaatggtttagagaagaagattccagaagaattctcaatatcaacctgccaagaggagtgaccaatgattcctggctttggcttcctgaaccgagtggaaacttctctgttagctcagcctataaacttctaaagaatattggcagcggggtggaaggagatataaaatggagactcctttgggggtctaaaattcataataggctcaaaatgctatggtggcgaattctatccaattgccttccaaccagggaaagacttggaatttccatacccttaccggatttacgatgtcctatctgctcctcctcaactgagagtagtctacaccttttttgggaatgcaattttgcgaaggcagtttggttcggttgtatttggagcttgcgaaccactagtacctcagctagctcgtgggaggagtggctagattggttccagcattctgataacagaccagctaaccttgatcttaatcaattcttgggaggtgatgctttcatctttgatagcatttggaatgagcgtaatagcatcattcatgaagggagatcatccccaattgaagtcatcattaaactcataaacttacggcttcatgaacttgtcccttcttgtactcccagagctgtagagcaaacttgttggaaccccccctcctgagggctggttgacatgcaactcggatgttgccattggccggtaccattcggcaggagcagctgtattcagagatgcttcgggggctattctcaatattgttaccttccgtgcaaccaattgtgaccccttgtctggtgaggttgctgcgatccatgaaggtgctgctgcggctgttcaattcggttacaggaacgttgtgtttcaatcggactcccttggtgctgtcaatgccatccgcagcaatccgatggaaactaacaagctgcaattcaacattcaagataaggttgcaagttttttcactctttctcgcagcctcaatctttgggaagtccaatggattcccagatcttgcaactgtgtgacccactcggcggctcattgggcaaatcggcacaacatatttggtgttcttgatttggccacttttgatgatttcctgcagctgtccactgcagatggtcatgttttaagttaattcggctgtttttctgtttattctgtgttgttttctagcttctttgtttgttgttctgcttctgttgtttttcgtctcccctatactctgttgtgcctctgctagtttctggctaggcggttcgtttggcctttggccttgtgttgttgtctttgtttggttttgttgtaaccgttcaccaaaaaaaaaaaaagatagccagagttgcatacccttatgcaaaaatcttatgtttcatgatagaataaaacatgtggagataaagtgtcattttatttaggagaagacgttactcaggaattggtgaaaattgagaaggtgtctattgaagaaaactcaattgatatgaaaaccaaaaattttcactcttaacaagttcaaacattgaatgagcttgttaggaattgacaaaggaggataagttttaagcacctatcgagctataagacccacaaggactaagaggatatctaatcaggtttgcaagagtgaattcaagtggaatattgtttgtaaactcactatatgccaatctgtcaaataaatatataactcagtcaacttaaaagtcaatcatccaagatttctcaacaaaccaaaactgtcaaaccgttatgacagtttcatttcctttttcagatgctaaagctcgagctacctgctgggttgtagcaagaatcaaacttcgattatggaataagattgactgagcaattcttgttgcgagcttgaaataatatggaattagctatgggttgggttggtggcacgtccaacacactgctaccacaatgcatgcactatacttaagaatattttgttcacatactcaaacttattattaaatattttgttaagaatcatgagattccatctcaaaactaatggtgatgagtggagtaactcatgttagtatatatgactcaatactttactatttattcaatgtgggacaatgtctacattaatagtggtggtgattaagagcatctccaagatgctctgaaggatgtttgatgacatggatacttttttaacattttttaattaatgcaaaaagaatactacaaaagaatgtcataccatagcatcttttacattttctcttctttatttatttttattattttatcgtaaagtaagaaaatttgtttatttatatattaaataataatatatttgtattttaataatttttagagatgcttattattggatcataagagaaaatgttaaaaataatgtgaaagagaaataaaatataataatataattttaaatagtgtgaaagttttgacacttttaaaaaacactactattggagatcctctaatatgtatcaatttcactatgatcaagtacaaggtggtacttctctagacactactagtagctaatattagctatgttctataataaagagcattgttattaggcaatagcagtggtgcccaacaccttatatagaatattttttaaaagttattttcttaagttatatgagactcaacactcttaattataccaatagcagtatgacactgaaagggtgctagacaccaatagtacttttaacaattttctataataaacaactattaatagttgatgtgacataatttgattggaataaaaaaagactctttagggagtctatatacaagaaaattcccactaatttatgtacatatatttatgatcatatataatgcaactttgaaatccataccatacatgtaggtgtacctaccacacaatgaatctaatcattatattcttttatgcattttgattataaagggcctagttagttacatatctagctgaatttgagaaataatttaattaattaattaattctcatgagaaaataggtagagctatggtatagcaatcatttgagatcatcatattcatctcattatcatcatcatcaccatgtctccagtttcatggttgaagaagaagcttattaggcgtaaactaagaaaacctagaatcaataataacactcttctcaaccaatctcattatgttgacacattgtccctccctctggttctttctcttttttctctctatactcttcattttgatataaaacactttgtatttctcctatatatttgtatattaaaaactatatacatttaatattttataggttgatgatagtgatgatcaagaactcgatcgtatagcagtgtcagatctacgacgtgcttattggaaaaactccgaggatatcatttcagacgattcacggttcgtttttcaatactacttgtatgaaaattttatggtaggattattttaaattttttataacatagtatgttttgttttgtaattattttagatatggatcttattattttttttaataaaattttgaattatttatagtgccgaaaatagattttaaataatttatttcatataaaatagattcaaaaaatattcttttgatatttttgacacatagatatacaacaatcgaattattttaaaataattgtgtactttttgtggttattttggaaccattcgcaaattaatacatttatattgacctctagattaggttttataagaattcaggataaattaatttaaaataattagtatttttgtcaatttataacattaacaaagttttctgaaaagatattattacgtaacagttatattttcaacttatagtttatacactacaaaaaaaatcttacttttagccataacaaaatttgtgattaaaaataaaaacattataactaattataaattacaattcatatgttgtgactaaaatgtccgtggctaaaagtattagtcataaaagttacaatttattgtgacaatgtatttttagtcataatatttgttgtgactaaaa

SEQ ID NO: 295572 - DNA, 3209 bp, Cannabis indica
ctacatattaggaaaatttatatcttttttattgatggttgttaaaaaaaaacgaaaacataatttaacaaattagttatatagtagttaacaaatttaataaaagttgtttaataaatatagaaacagcgaaggaaagaaatttgtgttctaataatcagataaattgtattattttgtaattttaaagaaaaattcataaatttaaaagtttctatatttaatttttttaaaaaaaaaattaagcattaacggaatgtttctctaaaaatttgtatcatttctttatctttgatcgtggcgtctagtagttactcaataatggagttggaggatctttatgctagtgtcgagattgaaggagaagatgatgttatcactacgtttgattttgaagaatctaaaactgagatattgctcatgctgagttatgtattgttggaaaggttcctcacagccagagcaattgattacgatgccatgcgccatatgatggcttctctttggcaaccgagagggtatgtatgtgaagcaactggaaccaaatcgattcctatttcaattttatcacgaaattgatttgaatcgagtcgttgaaaggagtccgtggacctttaaccatttacaatttgtttttacaagattgaaaccagcagatgatccacgtctagtaccttttaactcccttgatatatgagtacaagttcatggcctccaatatgggtttttatctgaagttgttcttcaaagggcgggtagtttcatagggacatttgttctgacccaaagaattttcgaggtatttggagagactatatgcgtgttaggctcacctttgatgttactgttccattaaagagaagaatgaagttaaggcgtacaactggagaggaaggtttttgggcaatgttcaagtatgaattctttcctacattctgctttatttgcgaaatacttggccactccgaaaagttctgtctgaagcaattcgatactccgacagatcaaattattcaaccttatggagcatggatgagagcccaaccccgtcgacgacatcatcttatcggaagacaatggttgcgcaacagagatgatgatgattcagagtactctggtggatccatcacgggtatgaacaggcagcaaagcaccaatcaatctcgtataatcagagaacaaattgcaagagaccagggagcattaaaccagcttggcatcaatcacagcaggtcaaaatgaattatggaatctgaagtagttatgaggcctttaaattgaaatattttcattaactcaggagcttatcaattggatagtcttgatgaggaattggaggaaaatctgattgtggactctaagaggagacacacaaaatctgagaggaattctaagtctattgattcggcctaaaatgactcaattgtgtcgaataatgctggacttactaatgaagttatggaaaaagatattagtggaataaatgaacagagagccaatttttaaatgggctacaaaaatgaattattggtgggctctagttcctaggcccaccgttcactatgattatattaagctggaattgttgtgggcttgggaacccatagacttttcaatttcctgtggaccttgtgctccaaaagaaacccaactttctttttctttgtgaaactattagtaatggtgttgttcttgaaaggtttcgagtgaaactgggctttaaaggcatgtattcagttgatgcaaggggccatagtggaagaatttctatgctttggagaaacaatgctgaggcccaattactccaatattctattaacttcatagacatccaaatcgagttgcctcattcaataccctagagacttactggcctctatggagaaccaaacaaagagcatcggcaacaaacatggaacctcattcgtaacttgaagcagtcatcgacccttccttgatgcattattgggaacctgaacaatgtcacaagccatgctgataaactaggaggtaacaactacccccaaagattaattgatggttttaatcaaactctgtccaattgtagtctaattgatcttggcctcatcgtatacccgtatacatgggagagtggaaaagcaacttctaattggatcgaggtccaactcgaccgtgctttggtaagccatagttggtctgattttttcacttcagcttagttaattaatcttgaaataactgctcagaccaccgccctttactgctacagccttcagttcagcatttttttattccagtccgttaatttaggttcgaaaatgcatgattgcatgaaccattatgctttcaagtggtcaaggaagtttgggagctccatgacaaggatcttctgggcaaaagtgtgcctggcaggtcccatatggagctaacatctataagctgcagatggtccatgaagcctctggtcgggtcaataacatgttagccagagaatataggagtaacgccttacaagagaagctccacaagtaatcccacaaggaagataagactcgaggtaggcctagccaggtgattaacctaccagccggaaacaaccttgtcaagagtaatggaaaaggctacacgagccttggtttcttcttcaacaagcttctacaaatatcttgaactgaatcctacaaattaagattaggccagtctatttgatattaaaacagattcaacagaccgtaactgcaccctagaatataggaatatttgccctttaatcactccttttacgaagccaaatgtaacaactcctcccttataaatagtgaactagttcacaaggggaaggggactagacttgcaatcgttctcacacttctaagagcattttgctgaaagatattctctgtaaacactgtgagagccgtagctagaatttattttatcttccgtagtgatcagcacgatattatctcacaggcaatacaactaaaatggagtaggtcattacctatatacaaagggtcgaacctctataaattctgtttttttttttctatttatttattattcctaactccttattggagattaatcagtgattatttactttaaacgtgtcaaatttttcaaattttttggtactattgtagatttcattgagtaataaccgattaaaaatttaaggtagagtcaatttagctatttttctagtcgacaaacccaaaaataac

SEQ ID NO: 295573 - DNA, 4982 bp, Cannabis indica
gaaatcgaggtaagatttggcataacttcttcatctggttttaagagagagttgggatttggagaaagagagagaaagagttggtacttttaaagagagaaaacaggggagaggacggataatgcaattttctttactggatatgtgtaacttgaaggagttttggtacattggaatatatatacatgtactttgtgtacatgtttgagaagcaggtgccaaaagaagacatgggttttgtgtttggatctctatatctttgttcataaaaccatggtggatccgcggaacacagtaaccttcttggtcttctccttattcttcttattgtctctatttgaacccacatttcagcagcagcagagttcaccgcgaatttcaacctctgagctagccgctttgctccagctcagatcgtccttggggttgagaagcaaagattggcccaggaaagtcgacccttgcgctttctggaaaggcatcaaatgcgagaatggcagcgttgtgtcgattaacatttctgggttcaagagaactcggcttggccgcctaaacccacaattctcggtccaaggtttggccaatctaacgttattaacgacctttaacgcttcgagtttcttgctccctggctcaataccgaattggttcggcgaccggttaccggcgctccaagtgcttgatctccgttcttgctccgtaattggttcgattccttttagccttggaaacttgaccactctaactagtctctttctgtctcgtaataaccttactgggattgttcccgctagtttgggccagttgtctcggcttacggttcttgatcttgctcagaattcgcttgtgggatctattccttcttcttttaccagtctaaggaacctttctgttcttgatatttcttccaattccttacttgggtcaattcctctgggcattgggaccctgtatgagctgcgagttttgaatctttcgagcaataacttgtcttcttcaatacctgctcagcttggagaccttgccagcttggttgaccttgatcttagctttaattctttgtcgggttccttgccttcggatttcagagggctaagggggttgcggagaatgatacttgggaacaatttccttggtgggtcgttgacaaacaatctgtttcctactccaattcggttggagtatgttgttcttagtcacaacaacttcactggttctctccctaatgtgctttggtcagcacccggtttgcgttttcttgatgtctcaagcaataacttaagtggtctattgcctaattccagcttgaacgccaatgctactgctagagtacttaatgtttcccagaatttattttacggtagtccaacgccaggacttagaaggttcagttctgttgatctgtcttggaactttttagaaggcgatgttttggactacacacctgctaatgcatctattgaaagcaattgcttccagaatttgagtaatcaaaggactgtttcagaatgtgaatcattctacgcagacaagggtctgcgatatgaaccgccgagctctgctcaacctcctgctattcctgagactcctaagaagaagagcaataataggaagaaggtgattattttggcagcggttcttggtggggttggtcttattttgcttttagctatattttgtgtattaattctcttttgtgtccggaagagaggtactactactcaaagaggagttggtgttggaccagttcccaccagcagcaccccacctcctggaacatcagttaactattcgagcgtgggagatgcttttacctttcagcaacttgtccaagcgacaggtgacttcagtgactcaaacctcatgaagaatggccactcaggagatgtctttagaggtgtactggaaagtggaatacctgtagtaatcaaaaagattaacttgtccacagttaaaaaggagactcacatggttgaattggagttcttcagtaaagtttcacatgcgagatttgttccctttttgggacactgcttagaaaacgagaacgagaagttcctggtttataagtatttgccaaatggggacttgtcaagttcattattcaagaaaaccaatacagaagacggcttacagtcattggattggatcacgagattgaaaattgcattaggagcagcggagggtctctcttatcttcaccacgaatgcaatccacctcttgtgcacaggtatttttaaactctttctacatgcatgctcctcctgtgcgttcaacttgagataagttttggtatattaactatcatcagatgtgtaattagtgaagattaatttaaacttgatttatcttaactcattgccattgcaacatttacacggagtagaagaaaatagaacaaatccttagcgtgaataatgattattttgatttgtgtatcattattttatccttgagtgacttagcagtttatattacattgaagtttgctctccttagagatatgcatggtcttacaattgtgacaatgtgtctttactacaattattgtatttgttattttcaaatagaagcatatgttatccctagagatgtgtccttgataaatagtagtccatagtaataacattgttttctgggttactgaagagatgttcaagcaagtagtatacttcttgatgataaatttgaagtccggctagggagcttgagtgaggtttgccctcaagaaggagatactcatcagagcaagatcaccagattgctgcgtttgccacagtaagtaatctttttataactttgtttatatgtttccactctctttgtccttatttgtaaggacacccatatgaacattctctctttacttcgcagaaaagaaaagaacaaactcgttttagtattttgacagatactttagttagatattttattattttagatgaattatgttcatttttcagtcaccagcaaagctgcttagtggaatataaatatatgtaaatgattcagattcagtctctaatctctgtccaatgcccttcacattccttttttttatttatttaatctcgtatacatctgtggtctactaagtaagatgccaactgtatgatataatgacgagcataatatctatattttcaagtaaaaatttcccaaaaggcatttatgtaatcctagaattatttgtattccatgccagccaacagagaggatattatctatttgcttttaatattattctgttgttgcttaactgacttcaccttttaccaggttatacttgcttgtttgttatttttattttattttgtaaggtattcttattatttttaagagaagatatcgtcttatttctcttctctctataatgcaggtcttctgagcaaggtacttctggtacgtactcatttagtcattaaacattaatatattctcaaaagatctgttcccttaaatttttcaaaacacaaatagatatatgctgttcttgtcgtagaaactcttcattataaaataccttcttaagccattttgtatatgtttagcaacccggtattgttcaagttttagaatcgagtagcataaatatacagaacaatgtaaaatgccttaaatagcaagaaaattctgtttttcctgatgaggcttttatcaatacgtctacatatatattatttgtggtttttcttatagaaactgagagtagatagttcggcttggattctatttaatgtttccaagcatatagatccaaactcttcttcttttctccttttctatttggaggtgatttgcttgcaccttgatgcttattttctttatccatcattaggaatttgaaaatttccgttataatctgtttgagctttctaatgaaaatagaaagggattatcaagagcaaactcaccatctaaacatttaattgatcaaattatgttgtattatgtctggtctattcaatatgaatattcgtcctaaggtttatgcttctctgaaacgccaaatgccaggtacagcaacagcaatatgtgcgtatgatgtttactgctttggaaaggtcttgctcgagttggtaacaggtaaactgggtattagtgcttctggtgacggccaaatcaaggaatggttagaccaaacactaccttgcattagtatatatgacaaggaacttgtgacaaaaatagtggatccgtctttaatagttgatgatgacctactggaggaagtatgggcaatggctgttgttgcacggtcctgtctaaatccaaagccttcaaggcgtcccctaatgagatacatcctcaaggctctggagaacccgttgaaggttgtaagagaagaaaattcaggctctgcgaggctcagaactacctcgtctagagggtcgtggaatgctgctttgtttggtagttggcgtagcatgtcagatgttacagtcattccggcaacggcatcttcaacaaaattggaagcagggagtggtttaaagcattcaggaacgacaggttctcagggaagtgggcagaacggtgggggtgatcattcttcctcgtatagacggcattctagggagatattccctgaaccatctagtgtacaagatgtagaaagagcggatcaggactagtagagagtgacacatgttataaattgttcttgattctttgtcaataatacaacaggcttcctattttgagtgcctgctttggtaccccagctttgtcttcatcttggaagtcaagatggcgtttcatacagatttttgttctcgagagtggttgaaaaggcttgcgcacatatatacctagctttttagcagggaagatttgaagtttacatcagtctgagatttagctgaacttgtgtgtgggatgaatctggtagagtgaggagacaagggtcagggtctgggggcctcttatttgtttgacagcttgtttatggcaaaaacaagcctacaatttttatgcgatt

SEQ ID NO: 295574 - DNA, 3660 bp, Cannabis indica
  modified_base (3588)..(3588): a, c, t, g, unknown or other
agcatataggataattctccttttttttaatttagtttatatttgatttcattctattcctatttctattcttatattctcgttctcatttctatatttttatttttttcaaccaaacgcaaccctagtgctcgattgggaggtcacattgcctcagagggatttcagcaaatatttgtgggtggggttaaagctctcatggttatgttcagagaaaagagctaaatcccataacagaaggtgttttactttgaaaatttgtgtgaaccaggatagaagttgaataagggctataatgtgtgttttcatatgccaatattggattcataaatgaacaaacatttccatttgatgtataactaaaagggtactcataaaaatcaaatgttgattgcaccaaatttggccttatgggaatttgtccatcttactaattacttcttaggaatgatttgatgaaaaaaatgaccaatagagaaaacagagagaacccatcaaaaccaaaatctaaaaagaggtatgacaataatactaatcctgtttagagatgatacataagactattaaggacatttatagcttcatcaatcagactattaatagattaattcttttctccattgcaatagatcaaagaggtagatatatttacatttctcaaacttatcatcattacaaaaccacccaaaaacaaatgttaaatttgcagttatgagatctcaaacaaatcccataaatacaaatcaacataacatataagtttcatggccaaaccaggtcaacacaaactcttgacacctgtaaattcttgtcatgatcagacacaacatcatagctctttctggtctctttcatggcagaagaagatgcagtagcaaaggcagaagcacaagaagaagaagaagaagatgatgatgaagaagaagaagagagctttacccagaaatctggatcttcattatgatgactaacaagttcagataacaaaagcaaaagagaagccataaaaaatgaacaacacaaacaagcaaaagtgtatatttctttgtttctttgttttgtatttgtgaatttgatatgtgaagttattatgtatttataggtaaaaaagggttattataaattataataaagagaaatgagaaatagcccattggaatgttgtcgttttgtgtaaaaagagtaaatgatgtcccctggttttgagtcacacaggtaggaagaaaacaaggggtttcattgtaaataggtgtcaaaaccattatgagagatgagcctatttgacacttaaccagcctaacaacattatattattgcctatgtttctaaacttttgttactgttaaaaattatggttggatttaagaatttttgtacaatttcgtttaattttaataactaataattattcatgtattaaattatgttccttagattttgatatctactaaattatatcattcaaactttgacatgtaccaaattttactctttgaactttgattcatgttagattttttttttactaaaattggatataagtccttaaattcaacaatctcaataatttaatgagaatttttaacagtcttaaaagtttagagaacatgatttgacacatatcaaagtttggaagacaaaagtcctaattagacttatattatataatattttataattggttaacaaattttttataaaggaaattatacattttatgaatttttatattattttaagggaaaattaaaaaaaaaaaaaaaagaatggaaaatcagtaagggtaaccaagtaccattatggtaaattaccaaaagggataactaggtaccttatgttgttatttttattttttttctaaaattttctcataaaatattttttttttaaaatccatatttttacaaatttatattttaaaaactataaaaataaaatttctccttttttatattgtttattaaattaaaatacaagaaactcaatattaaaatataccaataatagtatgtaacattttataatatttgtcaccttaagtatcttgaaaatacatatagaggactctagagaaaaattagttagtcctttaaaaaagagtgaaaaaatataggattctcctcggttgggtaggccctaagtataggcctagctcgtcttagcttaaggttatgcctagtccgttttaacctaagatcgaccttgtctttagtatttcttttatgagatagtattactattagacattagtattacaaagtattgtttttatgagtagttagcggtctttgtgaatatttggtggttttttataataattattaaattaaatatataaaatttaagatatattttttttaatctagtacttatgggatagatgaggtataaaaagatgggtacatgagtgactaaaaaagacagttgggaaaatagagggaagtgaataagcacatagttacataaagtagattagtagcattaatattaggtgtggcggtgaccaaacaagagaacccagaaaaataaaataaatgaccaataacataaatacaaatacaataaaaggtgatatagtgagtgttgaagaagtaagcaagtatggcatttttccagcctaaaaaggagaaaaaatagctttcattcaaagtgtgttgtgtcatgtcaagtgtggtgtacgctcaccctctttggcttcttacccttattaatgtatattttgagaaatgttaatttggatagcaagagtgacatactgttattgatacaatttaatattgaatctcgtacattataatttaataagaatattgttattggacactaatgatacttactattggagaatattatcttacatagattaaatataaaattattaagtcatatataagaatatatactacttcactcatcattaagtagttttgaaatggttagccaaatagtacaaagacgctagagatccgatcaagatttgttaaatttaactgtaagtgccaattgtgtttaccattgtatatgtacacgtgacatctttttattggcctaaacaattttaataatttaaacaatataaaaattgttttaaaattaaaaataaaacaattctcaataaaatatttatttaacaaaaaagctaagggaaatttgattttctatacttacatatacttaatatttttttatctaaacacataacatttaatatttgtgggatatgacacattttaaaatatccctaaaataccctcatttacattaccgccttccctctctcttcttctctctttgttataaacaaaaaaaaaattaaaaaaaaattaaaagtagggcatcgggccctacatcgagccagtcatctgaccatcgggccctacatcgggccaatcctataaaatgaaaaaaattaaaaaaaaataaagtgggcatctgaccatcgggccgaccatcgggccgtacatcgggtcagtcctataaatagaatttttttttaaaaaaatccaaaatgggcatcagaccatcggcccctacatcgggccatgcatcggaccatcaggccttcatcttcaagctcatatcaaaccngaaaatcggattttctacccagaaagatcacagaccctagatctactccatctaaccctaaatctaatcaag

SEQ ID NO: 295575 - DNA, 2089 bp, Cannabis indica
tacaataaagtcaatagagattacaaactatgaaaccaacaaaagtatcatatcacaccacatgatgtgtttgctaagaaaccaaattaccaaaatcctggcagaaacaaaatcaacaattggtttctaggctaataattctctcgaaactcgaaacttcattctctgccgggaacaacaaaaccaatttcgtatgtgtataaatctctcagctgggcctgctggggaggaggggttacaagaattagttggtatccaaatgctggaaagagctctcaagaccgatcacaagattatttccttgattattaaaagggccaacatgacgaaacacatgatgacgagaaccgaagcacacattaccatccctccttgtttttgtgttctctcagcctgtaaatttagaaagactcagagaggttcgacataaatttaagctgaagtaaaatcgtatatggcgggtggggatgacaaaaaaagaccttttgtagttgcttgaggccctcctcgactgttgttgcaacattctgaatattgtagtctatcctatcaacaatggtaccctgtttgtggaaagaaattcgattagtgacaaaggattttcggtttgaatgtagcatgctatgttttctcaaggttgatagtagcgtatctaacctggtctatcacaagtaccgaaagatccttcataatctgagcaagctcatttacagatcccaccacctgtaccgaagtaaacatgagaaattaaataaaaacaaagccttactgatgagagaacacatattgcagaaatgatcgcttgcctgttggatctctcgctctctttctactgagaatgcctcgctctttttaagctttgcaagttgatgctcattgaacatctgttgaaaataattgttatactaattttagctttcaactcaaagtctcaaatcgaaggaatttggtcttatatttgaaaaggttaatgagatctaaaaacaatataaagaaattttcagcataccatgtcatccaaatcgtcgtcttctactctagatctacttccatttagattcatctctatatcaactccatcaccctgcatcaaaccaattgcaagaatattttttgagctttataagtaatatacaattcatgtcttaacaaaacgggatatattcactagatactagatgcaggaacatacacattgaaaaacaattacatactgaaaacatacataaacttgcataagatttaatgatctcggtcaatgcaagttaaaccatagctcctacctacataagaaaataaattgatgaatataaatattctccactaacctctttttgcagcctgaggcgcttcaaataagcggactgtttcttcctaagctccaccgataggttctgcaggtcagtagcaagagagcgctgcagcaaaaacatgcaaacataaccagagttcatattcatcagaatattctcttaattttggataatatttagactttattgtgtttccatagacagtttaccaaagtgcaacatcctaaattctctccactgttgagacaggaaatgataatgaaactatgtttgcaaatatgcaaaagaatgaagaatgatgcaaccacccctggaatggagccaaattttttcagcaagctccagacattatgtgtaacttttaatttaataatagttttttcttgatgatataaatatggctacaagtccttatagactactagcatgttaaagattcaataaatatctattacctaaagcgcccacaattttattgcttgtaaaattagacatgttgaccctaaataactcaattgattgtttcttataaataaataactcaactgaaataactatgacaggaaaacaaaaactatgaaccatacaaactactggtgacatctacttcagggtccgaaacaatttacaataaagcaggtatacgtgaaaaattaaaaccccacaaactatgaaattgagccaaagaaaaattaatattgttctgccaaaactaattttaattaaatgaaattgcttgaatgcttgaaacaaagttatacctgcacattttttct

SEQ ID NO: 295576 - DNA, 2460 bp, Cannabis indica
ctatatgaactatatatgtctaatacatatttggttttattgataatggcatatatattttcagaactgttgatagcgtaattattggttatgccaaaggaaaagttacatgcttcttaggaaatcccaagttgatacttgatttggtaagtgcaatttattagagagcaacttattatgttcttaaattaagactttggattataaacatgaaataagtaataaagcatgattaattgcctattaagttaattaagtcaaacgagatcaataacatactttcataaatataataatttagaacaataagcgtgtttaaaaaaactaatcaagaaaactgaacatgattatcttataattaataatatttgtgtttaattgcaatagctaataataatattctaattaaaaatatatgtataaatcgattattatatcttattgttgattgatactcctgataaatattatttcgaatatttttttttctcagatcaatgccattttttatggccatacaagctcaagataaaaaggactcgggaattatttaccaagttggatcttcaatgcgaaatcctataaatatttctcagatttacaactcgagctttcgttacttcactgaaaatccattgattagcaagattgacaaaaaacccatcagagttggcaagctcacattttttaaaaccttgactactttccaaatctacctcactattcgattcatcttacctttgaaggtacgtaaaaaattaatttcttctatattatattttcgacaaacaaaattaatatttaattagaatttttcaaaccaaactcacgtgtgtaatagtcagtttgaattttattttcgacaaacaaaattaatatttaaaatttttcaagaatttgaaagatttgctatatcttaacattgtatgcatttaacaaaatgaaaaaaaaaatattattattaataagaaatgtaatattaattatatttatacagatatggtacctaattagtagagtaatatggtatggagatagcaaggacaagtatagtgaatacatgaagaagattaattcagtaattcatttggtacaactttacaaaccatatgtcctattcaatggcatgtaagtttaattatatatattttccctcaattttattcttatatatataccaatattaattattttataaatatatattatgtttagatttgatgatttaaacttggaaaggctaagacaaaatgcaaaggatgaaagtgaagatgaagcattattattaaattgtgatccaaagtgtattgtttgggaagattacatgatcaacactcatattcctggcctcttaaactatgtttattacaaataattattatatgtattaagcttaatcataacactactctactatatatatctatactatcatattgtgtttatttttatatattattgaaaccatatttctataatattatgttgtattttattactttgtttatttgaagatatatataatatctgtgtactgttcgagttagtcccatcaaatatatataatggttttcttgaaatattttaattactatataatgaaaattagtatatatatatatatatatatatataaatataatatgtttttagtaacatggttttacttttaataatgtataattatatatatatatatataatttagaaataatatataataataatcttgtagtaaatatgaaaactcaaatatatataagcatacgtactatgggatatgtgtttcattatttacaataaatatgtaaacatatataaattaattaataagcatcttatatacaagttaatagatgatgaaaaaaaaaaaatcactataaaaaattttacttttagtcacaacaaaacttgtgactaaaactaaaaaaattgtgactaattataaattatagttcctatgttgtgactaaaaaatctttggctaaaagtattagtcacaaaaattacaatttattgtgactaaaactaaattagtaacaacttgtaactaaatactgtgttttagtcacaagtaacattttgttgtgactaaaagtcacattttaattataaaaaaattatgttatgactaaaaagttatcactaaaaatagcagttttttgtagtgaatacaaacgcttataaatatgccatgttattggctattcattcacattgggctgaaataatgattctgctggaaaagttctcattacaagagagaatatgagaattacaatcaaaatactcaaaataaaaatataagtatttcatcaaaaatacaagaaagctaaaaaagaaaaagaagaataataacacacacaaagcttgaccaagactcaaggacctttgtcctataaaagtcatttcctccctcatatggacacttagggaaactctagaaatgctcttaatgat

SEQ ID NO: 295577 - DNA, 5503 bp, Cannabis indica
agtgactattaaccatcctattatgattgttgaaaaatattaggcacacactattaaaagaattctaaagtatttatctttcaataaatatatttcttactttttttattaggtttttataaaaaaaaataataaataataaaatccaaacaatgttttcgagagcatcaaccaaacactttttcttttaaaaaactatataaaagaaattgttgttctcatatttgaaattttgaaaacaaaaacaaaagcaatgtcaaacaaccttttagccattggaaaacactaaacaagacatatgcattatttagacatatttgcaacaaatttttcaatatatagtcctcgtaatctagatgtttgtattgtttatttatttgaacaaaatattaaatgcaagaatacattattagtttttaattaaatagccaatttaaatttgatttggttttttggtgtatcatttttcaattggttggtgagactattggcattgtaatataataggatattcaagtcccaaaaatgtattttattagcaaaacaaaatacttttatcaaaacatattattttgacttgaatgtttgtttacaacaaaggcaatcaagaaatgaaaccaaaaaacactctcatgacatcatttgctaccaagcaagtacaaaagctaaccaacttaccctacaaagaccacccttaagaaaacctataattcccaagtaagttatccacataaattttactaatattttccatttagcaaccacatgaatttttcatgtattaagctttccaaaaaaaaagtaagatcaaaattttccctcatcgaaatcagtataatataataatcgagaatacaatcgatactattgcgcttcgctcttgccccaatttggaatgttagcagtagcttcattcaccatcttaacaagggttacctgcatatagaaaaaacattatgaattaaaaatgttcttgtacaatttgacaccaaataaaacattatgaggccaaaacattttatgactttatcattattttggctattgtgacattcatttatgatagtagttccatgctatactataaaatgtttaaacaaaatttagttacagaaataattacattcttaaatacataccacactttcgggaacaccgggaggtggaagggagaggtttctcggtggtggtccacgtaaatacgaccgtttgtcaaatcgccactccccgaacttaccgtatgttaattcaccctaaataatatgaaggaagattagatgcaagtacacatatcaaaccatacacttagttatcaactgaacaagaacaaaaatcattacagggaaaggtgctttaaaagataacataaaaatttacctttaagttgtagtcacatccataggtataatgaataatgaacttgttagcaatatctaaatcccaagggggctgaaaatttaacaaagaaacgattctttaaacgagacatgaaaggtgaacatataatttagaatatagagatttgcaagattagctaccgaacctgaagcataaaatccttgcggagaatatgctgcacccggtgtaaagccgatgccacagcataagcatacctttgtgaaacaaagggaaatacgcgtaaacaattgagacagagtattgaatgtgttcgggaaaattattttgcaaaatctcataaaaaagaagctattgtacttacatttctagtacccatccgaaagctttatctgtctcgggatcatctttcatcctcaatgaaacattcatccatgtaggagcaatcttttccagcaactcctgaaatattaaatccaaaagatcataagaatttacaaaagagatatagactggctgatccacaagagcaaattgtgacatgactagaactacagcaaaagacttaccttttgaataatgacaggggaatttccaattggatcaacatttgtcactgggcccatttcctcgggataaaacttccttatgatgttctcgtgttgagcaggtgtgatatagaaaaatggaaaggcagcaggataacctccatgagccaaattaggtagagggttcacgaatatgtgatcgggttctgccatcaaaatgtaactggagcaacaaaataagaaagaggttcgaactctcagcaaaaaaaagaaaaaatgttcactaaattcaatatcgtcagatgagcaaaaactcactcttcttcaatggtagccttctccagccactgaacaaaggcccacggtctgtttaagacaatatatccctggaaagaaattatgcagggaaacaatttcgacaaaatagacacagaaatgcatgaatggaatgccatgaaacagaaagtaacacacttgaacttgacaagtctcccgtgtaaagcttattctagtataagcttctggtgtctactcagatggaactggaatcttcgtagttgcaactctgggattgcggttactaaaagctaacaattaaatactttctgatttcgatgaggaatgaagtcacaatcttcataatatcatattctgattagaagagtgggagacgacagtcacgacacaagaagcaaagactatgtgacaaacacaacacaagaagtttcccgacaaattattgaagacctgtgtttttttctcttattaaacaacaaggaatctccatatccatttcatatgtacaatttcgcctattcctaatcttccaaactctttaggcttactagttttttcgaaagcaaccatgacaaggaataagatcctttgattggcaaagaaccaacctgacatgcacccttgagccccaatggcacattaaaggcagcactataaattcttagcaagatggagattgttaattgtttggtcaattatcacaagtagctgccgatattgttggtacttggccaaatctcaacaatatcatttttgagtcaattgttggctgttcactctcaaagtcaacaatagtgattgaacattctcttcactgaagcttcaacaccagcaactgcaacaaaatatatagttgactttgagccaacaactaacagagggggaagccgataaagttcagggcatggtagcatgaagagaagataacaagattaactttcttgaacccaacttaagtaacataacgcaaatctatattaaactgttaccgtattcctaacttaagtagcagcagcaacatatagtgttggccttttcaaattgttactgcataccgaactcaagtaacataaattcaattccacattagtcctctcaaccctcctttttcccacttctcccttcctaccaaacacattctaaaatgcactgggctttcgccccctcatttccaaaaaggaacgaatatgcatttgatttcatgtcgcacatgaataacaaaatacatttatgtaaattatggtgtgcatatgaagaatacgagcctattaggctattagcaactagactaacttcaagaattttcttgccccataaaagagcaccattgctgtaaagtattcagagtatatcgtggtaactaacaattgtgaatgaaaacacaacgacatatttccattctaataatttctgtttgctcaatttgtgactaccaattaatcaatgttcataacaatataagcatagagaaaaaagaaagaaaaaacaccaaacaaagagtataaaagtcttactcggtctagacctgcaggaaggggatcgactacgacagtaggaatttcatccatcaaattgtcaggatttcccgagtgcaaaattcgagtgaatcctcccatctcagattcaggcataaccttttgttttgtataccaatagtacattattcgacactgccatgtgctatatggagcatcagttgctgttaaagcaacgtggaataatgacttcgagttccccacacgtctcacattcttaggcctcgcaacaatggggtcagacaagagcatgccatctgaatagtcacctactaaactaccagtagatctatagcggattattgtagttaacaaattataagtggcaaaggaaaaaacaatagccaaaagaatcaaaagtactggcgaagctcgtgccatggatttccactcgaattgttgttaatttaagtaaaggaacttagattttaccaaactcataacagaaaagtctagcaaagttcccttttcattacagcaaaatggcacctggttctcaggacatgtaatccctatctaggccaatattttcagacttattcgaaatggttcctacaaaaaatgcaaactccaataagtaaaggaacaattgtaacataattcaatactagattagcatgtcattgtagaaataaataaataaaatcaatattatgcaaaaacttcttagaaattcatactaaacatactcagatgtatcaaaacaagtccaaattagagaccataacacagcagaaactggtgttatcacaatgtgttggattaaagcaagcaagttaaatcgaggagagatatgaaggttgacctgatgaaataaagctacttaaagtcaacacagatcaatacaaacaaaaatctaaaaagagttaagaaaaataatttgacataattacagaggttaaactccttaaaatccacaaaaacttaaaagggtcatctttgaaaatgggaaaaaaaagtcaactcgaatgaaaaatgaagaacaagattaataaaagtttgaatttgaaacaaatggagcagagggtgttaccgaacaagccagcatataattttgaaatggaatgaagaccatacaaattgtagggacattggaatgtgaatataagcaaaacttaatatattcattaataaatgcacacaaaattgaaacttcctgagatgagacaaaatacaataataataaataatgaaaaccccaccaaaattaaataaagaaaacccagaaaaaatcgttgacccaaaacaaattagtgttctaatgcacatgcgagcttaaaataaaaagagaaagagagaaccttgacatgtgcacatggagatgaagatgcagagagagagggatttagaattgggtacttggatgagaggagagagaagggagaaagaggagagagagatgtttgggaagttggtacttgtttagagttttagatttgtttcagttttcagtttcatgaaatgactgacaacctttacacatgtcttaaactcttgcaaatcttctaaaaatcacttccttcttttttccacttgtaataataattttaattaaaaaaaatatattatttccggtaaattttaataaatatatatttaaattatttaatagttgtctacaaattttggtacctttatattattaaaatacatgtggggtactttgtgtttttaataatatttatttagtatcttgtatttttacattatactttgataccttaaattcaacttttttttataaaattttatcaatacaattaaatt

SEQ ID NO: 295578 - DNA, 1223 bp, Cannabis indica
aaaaaaaaaaaactactttgaagtgtaaaaatgaaaaagccaccaaaaataacaatattacaaaaaaaaatgagtataaatatacagtctaataaaaaaaattacacaaatactttttacacacactttcaacccatacaatcaacacttcttggaattaaaactttcgtgcgatgcaatgaggtcggcaacgataaaataattctaatagacgaaaaagcaccattaattctagcgacgtcacgtaagaaaaagaacaaactcaaatcataaaacaatcataactgatagaagaaaaatttgtaaaaaaactggtatgaaacattaattcaaccccaatttctatttcaaattcaataaaactaatactactaaattcaatttacatcataaaatatatatgactaaatatatatcactacattaggtaatattataattagatgggcaaaagcaatcacaactagaatagataattctaaaagactaaaacgtagtagatttcattcgctctgatatttttgtgcgatttggtacacctaaagctatacttagcgatcaagacaattatttttacaaaaagagtatataagcattgtttcgacgttatagtgtaacttataagatggtagttgcttatcacccctcaagccaatgtacaagtagaggtttctaatcatgaagtcaaattgattcttgaaaaggttgtgaatccaaactggataaattggagtacaatgccttgtgggtttatcggactgcatacaaaacatgatattggtcttaccgtaataaactgaatacattcacttgcgtagctctaattttcacaacataacaattcaaaataattgatccaatttgcactatcgcagaatgggtcaaaatgaattgaaatagttctatggatttaactagattcaaagtatgaaatctgtacttaatgtagatcagatgcgcactaaaagtaaaatagtgtgattggatcgaatcaacaccatatatatttattaagtgtatcaatattttgtgtttatgaagttatgtttatatttgatatacagagttattattttattcactcaactatatatggtggttatataaaagcaggatatgagccacgcagcctatatgcagtgcagtgcgtcatttttattgggaaatttgaaattatatgcttaaaattaatttatctactaaaaatatgctagcatattttg

SEQ ID NO: 295579 - DNA, 8050 bp, Cannabis indica
ttgccagcgcttttcattttatgttggtaaaagttctaatactaacattgatttgccaacacatcacaattgaattctattttaccagcgcaatactaatttttgccgtattggcaaaaatgacatttcttatagtgaatatagaaccactcttatatatagctacaaaaaaatatcaatattattctgaataatattcaaaatatctccttttgtattatatatactacctatagtagtgtaccatcacaattttctcttcatttatatttataaaaaataattttggaaaaagaaatatatagattaacaaagtcatattgcatcaaacatgtataagacattattatattccatatgttaaaaaaaacatgagacattacaattctcaaaaacacaatcaaagtatataagacattccacgttcatcacatacaaaaagaccaaaaaaagatgtttcaaaaaatgtatatagtttttcccctttatatatattaatgtattttctttacctttttcctttatttgttacataaaagtgttttaaggtagtatatgtagctagtattcagaaaaataatacatataggaaagttccatgatataattaataatctagtttcaaaactagccctaattactattaacacatgaattagggctaataattaattttaattgcaagatgatcatctaataacataacttcatatataatcacaaatgtttccttttatgatcataattaattaatcaacaattaatataccattaacaataataatatatatttttttctaattaagaagaagaagaattaatgataaggcttacaattgtttcttattcttgatcatagcttgtttattattatgcatccaaaccttgaaaacctgtctttttactcccacatccgagcaaaacacttgaacctcttcctcatcatgcttttgaattttccaacccaatttctcagcaaactccatcatcttctctttttgctcttcactaaacttagtccgaaaccgcttcttcgacgaattaaccccgcccggccccggccccgagtagtactgatgatgatgctgatgatgctgccccctcattcctccgcctacgtaattcgattgtaacgcgttcagatcttcgctagaagactctgccgccaaaccaccaccaccaccgccaaatgccatcataactggcggaacgaatcccgctccgccagctgtcatctgcggtggtagaggcgatgaaagaccatgtaatgtaaacggatgatgatgatgatgggattggtgacggtgataatgttgagctggtggtattataactaaagattttcttctatctcgagactcgcttcctccgccgccgccgccgccgtcgatttctttccggtgaaaatttctgtgacaatcgcaggcggcgcatttcatggcatcaaccgttccttcttctccgctcggcatgaattctccgcagccgtctagaacgtggcggcccgagctggctgcgtggttctttagacattctctgtatcgaatcggagaagaagaaactgctgccaaggcggaggcggaaacggaggcggaggcgttcactgtagtagtgttgagatttgatccgctagtagcaactgggtatgggttgattggatctgggtcggtttgatgatgatgatgatgatctttactaattatattatttctgggtttatttggttttggtctataagagatgttatattggttattactatgattagggaaattagctagggtttgatgatgaggagaagatgggttgatcaaactattattattattattattattattattattatgggttaataataatttttgtgatcctactggggaagaagaattgggtgagttataatccagacttgaattagtagttgtagtagtagtagtagtgtttagcattatccctttttctttataatctaattcttcatcatcatcatcatctgatcttattacttccattaataataaatctcataccttaatattactcttcccttttgcccttcttttgaaaaaaatatctatgtaggaaggagaggagagagagatatagagagagagaggagggggggattgtttttgttaaccctaattagaaatgaacaataaaataaaagaaaagaaaaatcaatctaatcctatatttataaataataataatatataatataagactagctagctaattaccaaagggggtcgggatgatgatgattattattattattattataaatattattcctttttttatattttgtaattttgatatgacgttttgtgtgctaacccaccaactttctccactgattttatataattcaaacctcttgtgttaatatatacgtaagctaaagccaatagtagtagtagtgtttaatttttggcagatgggtttggatttggataaaataaataacgaaattaattctaataaaaataaaaacttccacatgactcaaacagaatagcttgtgggtcctaccaaagctgaaaaaaataattacctgataagttaagatgtagatttgaagagagacaaagctgtaattgcaccacaaatatcaagtaaaccaatattattagttattttaactaattaagatttagggtggtgatgatcataataaatataaagagagagaggatgaaaaagatggggtatgggaatggaaatggaaatggggtgtatatattatagagaggtgagagaaaatattggagtttttgttttagtgtttcccagcagccatccaatattaagggcataaaaatccatagcaataataataagaagaaaaaaaaaaaggaagagttgggttggtgtaattaaaatggattgtagtagtagaagacaatataagagtaagtatattaaatatttgagtctttctttctagaattaacaaccaaccgacagcctcatgttagtcttctcacacaccctgcacccctggtccatactctcttaatattctcaaaaccctaaaaaataattattattctcttatattattaccaggactattactgatcaattttcatatccagaaatacatattgaaatttaaaaaaaaaaaaaatgtcatggcagttttcactatagttataataccatataaatttaaaaaaaaaattcgattacaataatgctgaaaataaattggaataccataaatattatttttaaaaaatttacaaaaaataatattataattataacgaatattactattaaaaaatatctcaatatataatttcaaaggtgaaaattaagtaaaaacactactctattattattattgttattattattattatagtaccatatgatgtgtatgtagctgaactgacatttctctggtttggttgcttaattttcgttgctcggaatcttgctgcaacttcaaattcccagatcaattaaagaatattttattatacactaaaacccaattagtgtgactctaaatctcaattaacattaataagagaaagagaaagagtttgtggggtgagggaactaaagtagagaatgctggtccacaccacaccacaccattttttattttattttattttattttagtgtttttgtgtcagattctctaattcagtctctttttctctctctacagtagtacgagggggctgggtagttttttttttgggtgcgcctgagccaaattctactgcaaaaaatgactttatctttagtgttgtgcctttctcttcattctaacatatagtaattaagtaacttcttaattaacatcattatctccttctaatttatgtttatatatgcatgtttgttgtaagtgttaaataaatgtgataattataatatattctaaatatttctcaattagttgtggattatcctaattttttttggcttccagatagttagaatcttaatttttatgctaatctacgtacattgtatataattacatgagttgattttttttttcttgactaagtgcaactacgaatggaaattaggcgtaatagactgttcgtctcacctctatttctgcatattttctatatatattaaaaaaaaaatatataattatttaaaaataaatagaaatataaataatgatacataaaaattataatattatacatcaaataattataatatttaaaattattttgagctgtaatattgttattagtacacagtttagtataaaatctcttttttttagaatgactacttgagaaattgccaaaatattttgtaaataattatgttaataattagtctatttaatagaaaattataatttcaatgatattgactttttaaactatatactctcttatttgcttacattgattgtgcataattatcactgtttggaatattaatttattactttttcttattattggtacagtgtcatcaaagtagatagatatgttctttttttattattttatttttatgcttatgtactatttgactattacctccactcttccacatttgaggtcagtagtatagtgttttctcataagtgaccccaacatttttagctacctacattaaagctttttgaaatttcctttgccgactcttcttcattaagccttaattattatttatgtttatttttgattaataaatttttgtattttatgttacatgaaattattgatttttttttgacctactagctaggctgctgattacctgcctattctcctagagtgagggtaatactgagatttatattgccctagctctttagatatttgaatgtgaaatttctaacctaattatgcatggtaatttattccatagattttggaatcaaattctacactccttcaatgtgaaggtttttttatttttttattttacaatattagaacattttaatatactttcattcacacacgtttaactgtgtaattcttatgagagcaaatatataaataggttaattacggcataacttctaatattttaactttgcttgcacttaactctcaaaattaaaattttaacagtaaaaccatcaaaactagaaaactattagcaatttacactttttatctattttagatgttaaatgccatgttggactgtctatatgtacatttacgtggatacgatatacacatggtataattttattggtccacataaaaaattatttaaaaaataaaaaaaataatttgaaattaaaaaaatatatatagtttttgataattatttttgccaaaagtatattttgaatgagagaaattattttattattctaaattgatattaaaaaatatttggggtcctaaaatgttaattgacattttatttttacatcaaaaatttaatttaataatagaatagaaaagagaagaaattgtataaaacaaaaattagaaaaccctaatttgaaaacctaactcatctctttctcctctcttctacttgcggtagccataccataaaccaaccatcgccgatgtcggtggtccaaacggaccacacctccatccttgcagcccttggaaaaaaccaaaaatccccatatctctctccgccttctcgctgttttcaccctcgctcgaactctctttctatccatctctctcaattttttcgttggggccactctcgtctgatgaagggctaaacggaggctgacttccacgagccacaaaaccccaagaacttatgtccactgatccctctctcgttctcggaccctttctctcccgtcatgttgagctcggcccaacgccggagggtgtcttcagccatcaatagaagaagtggaagtcgtgaatggcttcaccatcacttggaggtcttaaccccgtgatcccgagctgtgtgcccttagggttttttgggtctgaggacggtgatgtgtggtcctcttagggcatggttgatttgagcacgacagtcccgttgtgcaagtggctgctgcacaaatgcagagagaagagagagagagaatgtcaagtgaggatgaaagaaaaagggaattaagttttctaattagggttgttatcgtttataatttatacccttcaaactaaatttatttttaagtatttttttacaattttttaaataattttttatgttgactaataaaattgtaccacgtgtatattgtctccacgtagatgtacacatgaatagtccaatatggcatttaacatttaaaatagatgaaaatagtaaattgttaacagtttcctagttttggaggttttatcgccaaaatttgagtttttggggttaagtgtcagcaaagtaaaagtattgaaggttatatcgcaatcagccctatataaatatgaagtacaatataagagattttcttttagtagtatactcgcacccaagtacacatttacactatgtttggtagtagggttgcctgggtagggcagtcgaggctattgctcaatgctcctatatcccagaggtttattttaaagtttttcgtttaacatcagtctataaggtttttcatattttttttgctagaaaaataatttaataacgtatttgaattaattttatttataaaataaaagtttcatttttaaagggtaaatactattttggaccttgtattttgcaaaagttatcaattggaccctctattttattaaatgacaaaatggcctccgtattttttaaattgtacaaataggatcctgaactaattttttgtcaaaataaaacttaataataatctgatatgaagatattatgtcaaaattagttacattttttttttgtatctttttgtattagaaattgtcttaaagttggttatatatattaaaaaaataaaattgttaaaaattaagtttatggttttatttttacagtttaaaaaatatggggtctatttttttcctacaaaacaaaaagtctaattggtaacttttacaaaaatggtatttatttttttttttaattttaacgtaagccccataaaaataaaaattagagacaatcctatttagtagagaggatataaatagaggatgctaattttaacatctattttcttctctatccttcaaacttcacttttaatagtactctcctttcttaattgtataattatgatgatatttagtgcattaatgcgaatatgattacactcacttaagtatgaagtttaatattcttttctcctcactactcactcctctcatgtaaatatatagatctatatgtataaatatacaatattatacaagattttccaaagtaagctttgataagcccgggtgtcatatattgatttggaatgaacatttctaattttgatggggtggattcaatgttcatttgttttttaatgagtattattgatgaagcatctagtagtctttttcatttttaaactaattaaattatgtaaatgtgttgtgtggccacgtttgaatgtgttacctttttcttctcttagcctgacacaagggcttatatttatatgtatatgacaaattgggaaacaaattaaagccttaagtcaatatatattatattttgtttatttttattcccataattgggaaactaattaatcgtggtagatcaggaatatctcgtgacctacttataatctttcttaattcaattcttaatattatctaacctaatattaataaagccaccaccaccactaaactaaaccgatgttctagctacttcaggaactcaaaatatcaatttccaagacacattatattattattattattaattaattaattaattaaactattattattattttaaagtaaataacattttaaattctgtattttacaaaaattaacgattgaactctctttttctttttaaatgacaaaatagataataaattttctaaattaaaatggtagaaaatagtacgataaactgatttatcatggggttccatctcaaaacaaattggcagtggagtagccaatgttcttatatatggctcaattct

SEQ ID NO: 295580 - DNA, 3740 bp, Cannabis indica
ttatttttttaaaaaataatattctgattcttgtttttttgccatgtatctctattatttaatgtacagatatttagaacctcttgcaattgcattggatagagaaaaatggtcacttgttcaatttctcatgtcatcatcatattctggatttggcatctccagcttgcaacaggtaaatcactgtgcagtttttctctcttttttcttactaggtgttctttagtgcatggctgcatgcttattatctttgtaggtcattgctgtgtattatgattctagtttaagaacatgttgcattcagcctttcagagacagctagtcggttatgttttcctatataaattttgaagatattcattttgcaatctcaataccaagtgcactctgtctgagtgctcttttgcttgttttgtaaattactttatttcaatagcaaaagtcaggaacttaattgctcatgtttgacatttacttctagtactaaccaaaagcacttgcttgaggtgaaaattatacgtggtacaagaagaaatctactgtgcttaagaaacaagtcaagaattttacagtcggtgtattgatgcagtggatcagattgattaaagccaagtccatggcaaagaagggggaaaccccaaaataggaataaaaaactctttcatttgtaaatttcaatattaatcaatgtttctcaatacagttaattttttgggcttttctatatccccaataaagctagcaaaatgaaaagtggcatactagactgtaacaaactactactctagatatccttcagctattatcttgcagtaataggctatagttatttgagtctttagcgtttttgattcattagtctgcaactagccatcttgcatgttttaggtttttatttcactcatagcaaagtaattttctgcataccatttccagccatatctgcttttatctcttgagtgtctggtttgctgtacagtagatctacttctttgtcttatttaccaagctattatcacctttttatcattaaggacgctatggaggttgatcaactaataagtcatcttataaacaaagaagactccgagggtgttgttctacttggtcatagtactggctgccaggtttgtgctataattcttaacttaaactacttgtgaagtaaaatttaaaattcattgatgaagttcaaattttttgtggtataatatttttttggtttcaactctaggatattgtgcattacatggggacaaatgctgcatgctctcgagctgtccgtgctgccattttgcaggtgctaatcaactccttgttcgctgtttttgtttggatctgtgtttcttataagaacaactattttgctctgctgctaagagaacgaaattagtatctctgtgagaagatctgttcatagttaattgtatgcatatttaagagcctgtacggagggagggggaagtgggaagatagtgagtaaaggaattattggatgtattttggataggatgattgtttggtaagaattatttttagggggaacagatttatgaatgaatattacattctcaatttttagtttgaacaaatttttactctctcgatattggagagattttagaagagaattttatactcatataatagatgtgtcatttaacaataaaagatttcctcttccgtttcaccagacaagtgaaaggctgttgttcgtctctcattcatctcataccaaacataataagggaagagtattctctttattttctatcatgtgtttagttgaaggggaaatgcaacagtatgatgacacattttagccatgatgatgtgcgcttggataccactagtgctagttgatgtgtattttgtggaatattacagaataattttcagattatttttcacttacattatttgactccttataattggcacatagaggttcttatcgatagtacaacatccttttcttgtcttgtttgttgcctattgttttcacttacaaatagctttgtctaaaagctttcccggaaaggttcttattgtatatataaaatcctttctcgtcatgttggttgcctattgttttcacttacaaatagctttgtcaaaatactttcctggaatgaaacggtcaggccccagtaagtgatcgagaatacagagcaactctcccagaaacagctggtatgattgacttggcttcgtccatgataagggaaggccgtggttcagaactaatgcctagggaagcagatccaactgccccaataactgccattaggttagtatcctctttttttttttccacccacaccatgtattactttgtaggatttcaattgctttgtagttctttctacttttgcttatttggaaggtttttcagtataaatatgatgtatttttactttatctcactcatgatatattggaagctagaaaattttcaaattcacatgccagagttcatttttctaatgcaactttctccttcctaaagaactaatgtccttgcaggtatcactccctgtgctcatacatgggagatgatgacatgttcagttcggaccttagtgatgaccaactgagaacgagacttggacacatgtctaacacaccttgccaagtaaaatctccttttttctttgtgtttgtgagtatgttttgcaaaaaagaaaaagaaaggaaaaagctgccaatacatagttcaacatacatggaaaatttgtagtttcagtttaggcaacttgttcacttaaaacacataaaaaggaataaaagtagtccaaattttactacccatctcgattggaaattatttgaaaattaaatcctaaaattttataaattaactatttctactctcatgctttgtttccttcctgaaatttcaaccccaaacagtaaatatggccaataaagataaatctttgttagggtctccatgtagcttactaccaacattttttttttgcaggtaatattttcgatggcagacgagtatgtgccagactacgtggacaaaaaggcattggtggaaaggttaaaagaaaaaaatggaatcatttccagttcccttttactacatgattttatgtcacaacaattattgtggagggaaaactttattttaaaatgtgattgattgtttttatttttgacagattgtgcaaagcaatggggggagcagaaaaagttgaagtggaatatggaaatcactccctctcaaacagagtagatgaagctgtcaaagcaatcattgactttgttaagagagatggccccaagggttgggatgatccctggaattagtttttagctttggtttggtaatgtaatactaatatgcccttgctgtaactttccactattctctttctactgcttttgatttgttatcttattgttttaaacgttttgcctaattcaattgtgcagattttttttgtcctatctcttcaatgtgtttatttaatttgtttcaatttcattggattagtgatctgattggtgaggtggtgtcatctcattaatttagtgggaacttttttttttctattatttcttttccatcatgcttaggctttctcatcaaaggttggagttattttgttgatgggttttgtcgtgtcacatctaatctgttttaggtctattcagattcgatccaattatatattcgatgttaaattttgggaaatttacaaaaatattggaatttaggttaactt

SEQ ID NO: 295581 - DNA, 2326 bp, Cannabis indica
aaggaacatctgaagcttgagatcaagaccatcgggtatgtggaactggagcaggagcccccttcgatctaggaagtggaggttacgagcatgactgaggattttcacgatacctagtcggagttgggagtggatttgggccagttgaatgaagcatagctggtaaactctgggattaaatcttggggaggaagtcgaggtggctaattttcaaacgttagccaagaatattggagcaaattcaaggctaatcaggttaggaccccctcaactagacttgaattcactgaaccactaaaacatggagatcgttggattgcaaaaattgatatagaagaggttgaatctgaagctgctctatggaaaagctctgtaatatgtgttgtcctcagggtcaatccccctttttgtgtctctgaagggtttatcaaaaggatttcggggaattcaagcatagatcgtatcgtgaggatgcattcaggctttacactatttagctttagagatgaagagactagagatgttgttttggaaattaaggtcatacactttgacaaaaaatcggttgtggttagatcttggtcctcttacttggactctttgaagatggtaaaaaatgtccctatttggatttgtcttaatggtctttaattgtaatacttgggaaggaatactctaagtgctcttgtgagtactatagggaacctgataatgattgataaagttatcagagatcgctcaatgatcaaatttgctagggtacttgttgatgtgtctattttcaataagcctcctactagtatcaactttgtcattgaaagaaactaattattggagcaagctattgaatacgagtggttgcctacttcttgtgctgcttgtgggctattgggacacaatatcaacacatgtcccaaagacaaaggtctggtctggactagaaaagctttatcgaatccaggcaaagggaaagagattgagaacaagcctttggaggaaaaaactaatctgactgctattagtaaccctgctacagatcctattactgtagatgagtagaaagagcataagaagaagccagagaaaatggaagagatgaacactgaggttgataaagctgaacttcaagaagttgttatgcaatagaatttctcagatggtcaatggatcactcccagcagaaaaggaacaaagaaacaatctagctcaaaaaccgatttgccagatgctattatagcaaacacgtataaggctctacgggaacctttgaccttgaatgctccttgttcttcttctcttatcaatggagtggtgtaatatcctttgctggaacgtaagaggtatgaataaagtcaataagcgataatctatcttagatgtttatcgtttgaataagattgagattgccttacttttggaaactaaagttcgtgatgagaaaataaattgtatggtgcacactaattttcttaattgggatttttatttgagtactactactgaaggccgcattttgcttctttggcaaaagccttttgttcaggttgaaatcttggatgaaagtgatcagcttattcagtgtaagattagagtggtgggactgaattcagattttattcttactgcgatttatggtaagaacacaattacaaaaagaaaagatttatggggcaaacttggtggctttaagcatattcagctttcgtggctggttttacgggactttaatgccatgttcaacataaaagatagaactgggggtagagaggtgacccttgctagaatctttgatgcccgaaattggctctcgttgggtcaggtggatgctttaaaatgtacgggaaccaattacacttggtcaaataagcatgaacaaggagttagagtttattctaaacttgacagggttttaaaaatgagagctggttggacctcttccctgccactgagagtgtgtttaactgggaaacttactaagaccatagctattatgttatcaaaaagttggagataggaaaattcggcaccaaacctttcaaattctttaatttttggatggaccattccaaatatgaagaggctttttttgccaactggtgcaaaccaattgctagaaaaggattggctaagatcatgggtaaactcaatagattgaagcattgtctgaagggcttcaataaagtggaaattggggatgtttctcaaagcttttttaaagccaaggagaactacattaatgcccagaactgccttgttgctaatccttatgcttctttacaggttgctgagaacgattctaaggagatatttgttggaaatttatttt

SEQ ID NO: 295582 - DNA, 7367 bp, Cannabis indica
gatcacaacatgaaagcctacgaaaatgacaagggaaatactagaaaattcgcccttgataaggaactggcggcggcggagaaggcggttaaggttgtgaaggtgaggcaagacggcaaaggagacttcaagacgatcaccgaggcggttaaaagtattccgtctgggaacacaggaagagtgatagtgtggattggtggtggagtttatcgtgaacatataatggtggataggtctaagtcctttgtcacattttatggagacgagaataatgtacctgttatcacttttgacggcacagcagagaagtttggaacatggaatagtgccaccgttgctattgagtctaactactttgttgctgctaatattgcatttgtggtaagtacaaattcatacatttatcccattcacttttaattatatatataattttagagaaatgctaaaggattcttaattggttattgttcataagataataagtagggatgacatgatttgaatctgtgacattttgtactcaaaacaaatgcgctaccgaactgcactacatccctttcaattggtctatagtgtcattgtagaaaattgcgggttcgattcctgctatccgcttgtgcttacttgatttcttatctctattcactattcctagcatttttttttaatttttaaactaaatattaaatacaaattcaaataatattgattttttttcatctgaataaaaatattatattaaaattaaagtataccagtggtgtctagcatcttcttaagtgtaaatatcactattgatcccactaactattgagtcctatataatttaatgtaataatttttaaagaatatcgttaaccaatcacaaaacgacacgtttagaatgtgttagacactactaatgcctaatagcaatgctcttaattttatggtaaatactattttggacccaagattttgttttagttattgattagtttttttcgttattttgttaaatgataaatttgaccatgtattttttaaaatagtattaaatagtactttaaattgattttttatcaaaataaaatttaataataacttgttgtagaagtgttattataaaattgcttacgttttctgcatttgttcttgtcaggatttatcttcaagttagttatgttaaaaaaattgtcaaaaatcaaattccggtcttatttataccttttatagagaatctaatcaataatttttgtaaaatacatatctaaaatagtattaaatactctaaatttgtaaaacaattggtatgattaattaaattgatgaatttatgatagaattcggctccaaaaccgaagggaaaactgaatggagaacaagcagtggcactaaggatatcaggagacaaagcagctttccacaactgcaaatttgtaggcttccaagacaccttatgcgatgacaagggcagacatttcttcagggattgctatgttgaaggcaccgtagatttcatcttcggcaatggacaatcactttacttggtactaataaatatcaatattaaaattatgatactaattagtaacaagctcaagctagtgttactaatttataactaacctagttaattaattatatattgatgatgtgtttaactagaacacaaccataagatcggttgcaaagctgacaggggttatcacagcccaagcaagatcaaaggtatctgaagatagtgggttcacttttgttcattgcaaaatcatagctgatggtgatacttacttgggtcgggcttggaaagatatgccaagagttatctttgcatatacctatatgggcaatcatattgatgttaatggatggtctaatggcatgtggcctatccaatcacagggaaaaaataagtacgtattatatatatcattattatatatgtatttattaatgatctttttaataaataatctaagaatatatagaatttaaacatttttatatatgtatatagggatgtgtattatggggagtacaagtgcatgggacctggagcgagcacctctggccgtgtcaagtatgcaaagctattaaccgatgaacaaatcaaacctttcatgagtatgacttacattcaaggcaacaaatggcttatcccacttcccaaccttaaacattaattaagtcctctctccaattatatgtgctattattatattatatctatataagctttatatatgaatcttgaacatatttaatagcacttgtgaaatttttatttttatatcttatatgtatcattataaatcaatgagacttataatgttcattctcacattattcaaattttcattctaactaaattaatcactacgttcaagtacacaagatgttatatatcgttaccattagacaattagatcgacacaaaaaaatacgaaaaagaattatacttgagaaagctcagctcaaatcatagctgagagagaacttattcatttataggcaatgattataagatgattacaacggaaagaaattgataggtggcatagtacaatcattgagaaaaataaaatgcataacaaaatgtgttgtaaataaatgtgttataacagagggatccatttgaaagcttgggatgataagatttgcctccccaaatctagaggtggccttaaatttcgtaaactttatgagttgtatacggcctttctagccaaatgggggtggaacttattatgcgggagtcagtctctctgctgtgaaatcctgagagccaagtatctcaaaggaaaggaatttttgaattgtaagcacagaactcagattccagttttcaaaaaatatggtcaaagatggtgaccttttgagaggagcttgtaaagtcatgactgatagcaaggataccaatatttaggaggatccgtgtgtgacccatggtaaaactttttaccgcaagtccaatggttaccctgagtgtggcctgagaaaggtggcagacctcttgattgtcacaagaaactgagacattcagaatcttaatttcatgtttaacagtgaaactatttctactattctgaaagggggtagaccctctggtcaaggaaaaaataaatgggtcttgacaaaagaacgtaatgggaaattctctttcaaattggcctatcttattcaagtcttacatagagctgaagcgtgtgaggttgccccttctatgtggcataagctctggaattgtataatcttggagaggcataagatcctttggtggtgtattctgtctgaagcccttctgaccagggttattcttggtaagagactacatgttgaggatgttaattgccccttgtatggagtggaggaagaacattgaagaacttatttctcatatgcgatctggcattgcatttgtggagatcttcgccgtgggatatttttccagtggttaattcaggcatccgtatgtgaaactaggtcaagtttatttaaagtcttgataataagggcattaatgttgatgaggtctttatctatgcttatgtagttgttgacactttggcgagcccaaaacaataaggtacatattcataagctccttaatgtgaaatagtgtcttgactcttttgttattcttatgcagacttgagagctactcttatcgtcgctccttctcctttttgggtggaggattggcgccctccttcttaagattggatcaaactaaattgtgatgttaaagtggtactcaaaagctcgtgtatagcaattgtgttgctagaaactatttgggtgaggtgatttgggttagcacgacaaacttggcttttttggatgctctttgtggagaggcaaaaacgtgttgcttggcgatcattttggcaaagctcaaagattacgagtttatcattgtggagagtgaggatagtcatcaattctctcaatcgcaaggagattttctaagagattaagaattattcttctttttgctataagctttctactacttttgttggttgtgtgttttcttacattttcaaaacttgtaattttgctgctcataatatggctaagtgggcttttacccacaaacagtttggtagcttgcatgtatcatctattccagcagacttattttgtaatgaccatgaagtctaatttatgtttcaatgaatgcttatcttaaaaaaaaaaaaaaaaaagacgccttgtaaataaaaaataactatttataattaataaatatatatatatgaaacaccaagagtttttacttagttttgtagttaaaatctacatactccacgagtcattattatttttgagtatttctttatgatgtacttagattacaagaggataactatgaatattcactcaatcttatagggtctctctttcccaaaatgatcgatccatttccccttaggttatgtccctatttatagggttcttactatgactgttattcttttgcaatcttatccaggtaaccgatcaagaaacatggacaatccccatgtttcatgtatataacatgtggatgaaataaaaaatcgttgataaccatcttttgatcttatttggaaatagtcttttgttgtcgaggtgacatgttccaagtatggcttgtatctctcaatggtgttcaaggatagttggttgcattttgtgagaaatgctagttaagatgttatttttgctatagcctttcacaacaactcttagacttagtcttctaagattctaaaataagttgcactttccttttttcccttaatctttcaacatgttaatgagttacaagctcttcaagaactctttatctaccctttccagtgatacatttttgatctgttacactagagaggaattctatctttatcatctggccatacgttgcttatctcgctgtcttactgccaatatgtaatgcgagattgatattattcattattaattatctctctgagacaattcatttgctactgagttttctaaaatttgtgtctaatttttcacatgtcatgtccatatttatggttcaaaatatggacataatataatggaaaggtaccaaaaggaaaaacaaaaaatagaaccttttgtgaaccttctacacctaaataccattagtgactaatcctctgtattactcatctaagcatgtatcttaacaccacccgtcaaatgcaggggtgagcttatcactccaaatttatctgtcatcatttttaaattttggatgagtgaaagctttagtgaggtaatctgctatctgttcttgagtggagatatgtttgacttcaattttcctttgtagcaccttgtcacgaaaaaaatgtacatcaagtttaatgtgcttcgttcgggcatgatacacaggatttgaggccaaagcattggcactcatgttatcacaccagatgactggtatggaaggctgagtaaagtgaatttctttaagtagagactcaagccaggtgattttagctgccacttgagccaaggctctgtactcaaactcagtgcttgagcaagcaataatagagtactttttagatgaccaagcaaccaaggtatctccaaaatacacataatatccttctattgactatctgtcatcgggatagcaagcccaaacggcatcacaatatcttgtgatggctaatttgtcattatacttgatgtgaatgccatggtgcattgtccctttgagatatcacaacactctcttagcagcaatccagtgtgttgttattagacattttaagaactgactgagcttgttgactgcaaacgtaatatctcgtcttgggtgtgtgaggtattacagatctccgataacacttctatattgtgaatagttagccaattctttactttcatacagagacaaaggtcttcctcctgtcatgggggttggatatggtttaatgtttgtcatatctaggcgcttcaataaattggttacatactttccttgtgataggtacattcatgtttcatctctgaaaacctctattcctaaaaagaagttcaaagctccaagatctttctgttcaaacactttgtgtaatctagaaatgaagctactcaattgaaggtcattgttccctgtgatgactatgtcatcaacataaatgagaaccattataacaaaccttggtatctttattaggaaaagagaagtgtctactcttgagttgacaaaatttcacttgagcaatgtttgtttcagttgttcataccaggctcgaggagcctattttagcccgtacaaagatttctcaagcttacaaacatagtgtggcttttctttattttcaaaaccttgaggttgctccatataaacatcctcttcaagcttgccattcaaaaaggcattgttgatgtcgagttgtcttacatcccaaccatttgtcactgttatggtaagaacaaccctgattgttgaggctttgacaacagggctaaagatttcgcaaaattcaagaccatgtttttgattaaaacctttagcaacaagtcttgctttgatcctttagaaattggcatatgcattaagctttttctttgaacacccacttgtttccaacaatattcatgtctgctcttctaggaacaagtatccatgtcttattttttatcaggacaaagaactcctcagacatggctctattccatcctttatgtaagagagcctccaagaaagaactaggttctaatgtgttatgatgcctttttgtctatgttgaatacattttgggtttaaaggttccaaccttagacctagttatcatgtgatcacctgtttgaggaaccagttcaagcacacgagcttgttgttcaaaagtaatatcctcttatgtgcctattgtctcttgatcaattgtactcgtttgagcaaagtccaaataaaagtcattagtgagatatacctgatttgtgtgtgaaaaacttggcctcacagatggtggatatgcttgagttggctctgaatgatctgcatcagtagaagttgagtggttgagaatgtcaaattgtttatctatctgtggtgagttgtaatttgaagtaggttagtgtatgggaagagaaaaccaggagcttcaagacgacacactaacattaggttctatttatagttatttataggaaacctaatacaaatagaaattccctttcattgaaaatgacatgtgtagatatatagagtctcccgttagaacttaagcatttgtaccctttatgcacttaatgataccaaaaattcacacatttaatggagtgaaactaaaatttatggctttgtgttacaaaaattatgaacagtacgcaattgcacgtaatcaagtagtaaactcacacaggtg

SEQ ID NO: 295583 - DNA, 960 bp, Cannabis indica
attttaatagttgccgaaaacctcggtcaacaatactcgaactgcaattcagacagtgagaaaaggcagcaccaccatggttgaataccttcgtcagaagaaagcttgggctgacagtttagctcttgcaggggacccttaccctgaaaatcatcttatagctaatgttttatctgggttagatgctaactatctgcctattgtcttgcaaattgaagctcgcactagcactacatggcagcaactgcaagaactcctactaagtttcgacagtaagattgaacgcctccaaaatctcaatggcgttcccaaaaccacaacatcaccaacagcaaatctggctgacagaacacctcatggaggccgaggaagaggacaaaccagttatccgaacaacaccagtggccgtggcagtcactccaacaattctcgtggtggaaacaaccgaggaagaggccgtggaaggttcaacaacaacagcaactccagaccaacatgccaagtttgtggtaaatttggacattcggctgctgtgtgttacaatagatacgatgaagcttacatgggaaccgatccacacaacaatcaaactcagaataaaccaggtccctctgcgtacatcgccactcctgaagttgtcgacagcgaggtgtggtatgctgacagtggagcaagcaaccacgtcacatccgatggtagcaacatgaatcaaaaacgtgaatatggtggtaaggacaccttgaccataggtgatggtcactcattgaccattacacacactggatctggtttgttacctacaaatgaacccttcaaatctttgtttttaaaagatgtcttgcttgtacctgccattgctaaaaatcttataagcatctctagacttgtttcagacaataacatattaatcgaatttgactctaatgcttgttttgtgaaggacaaggtcacaaggaaggt

SEQ ID NO: 295584 - DNA, 7672 bp, Cannabis indica
gttagtgctattaagtatatgtaattatgttattgtttgtttgaattcgtttaagttgttttaggatataatttttttgtatgatatttcgtaggttgaatattgttgctcataatattatcaaataggttttgagtttagatatcactggtaaagtttcctttattctttgatttgtaataaccaatgagtctaacttcttttaatatattagacatcttcttcttttaaaaaaaatgatttagattatcgcccccattattaatattttatgatttttttttggcgtttaaaatacttagagattgttggatttataaatttttgtccaatttcatctaattttactaattcaatgattgttaatgtactaaatcatgctcaccgaactttgatatctattaaatcaggtccctcaaactttgacatgtgtcaaatcatgtccccttaactatccatgctaaacttttcttactaaaattagacaaaaaattcttaaatctaacaatctcaataatttagagtgaatttttaacaatctttaaagtttaaaaaatataatttagtacatgtaaaaattcgaggggccaataaaatacattttacaaaacaaaataaaaagacaaacgacatgtcggtagccttgtccatactaaaaacgacatgtcgtacaagcctgtaaagtcaagtcaaaataccgtggtccctcaaacgacataccgtttagggagctcaattccgggtcgggtcccgtattgtcttcggatcatctataaaatgaggaccagagaaagagaaagccaacagagacttctggaacttcgataaaaagtcaatagagaactagttttctctcttccctgagctctgaccttgaggccgacccaccatcatcatcgctcttttctctcaggttcgttttcatgcctgctttagggtttagggtgtttttccctttttttctaatggtgaaagtatgattttttgattcaatttcgttgttttggtgttctttttgggctttcttggatttcatatctgtaaacaatttcttttaccagtttagtagccctcttttctttctagggtttgtattttagatttcttttctagtggaagatagtaaggaaaactggcaaattatgaatttaggtttagggtttgcaggattataaagcttggatgttgattgttgataattttctgatatgtctgctttagggtttgtttttccgttttttctaatggtaaaagtatgatcttttgattcaatttcgtagtttttgatttctattttggctttcttgaatttcatttatgcaaacaatttctttactttattttctagggtttatggtttagatttcttgcccaagactagggttaaagcttaattacttttctagtggaagatagtaaagaaaactagcaaattatgagtttttatttgtgattggtttaggtttagagtttgcaggattaaaaagcttggaaattgaatatagataattttctgatgtgtctgctttagggtttgttttccctttaattcaatgttaaaagtttaaccttgtaattcaatttcgtagtttggtgttctgttttggctttcttgaatttcatttcgaaaattacttttctagttatgtttttttatttttaaagttgaagatagtaaagaaagctagcaaattatgagttttttttttatttgcttgatttaggattaaaaagattggaaattgatatataaaaattttatgttgtttttcccagagatttaacacacttggtgggagctgttgaggtcggttcttttgaattaagactctcattcttttccaaataaggtaagagacgaagcaaattgtttaagttcatatcggctgaattactctttgttataggatttctcagtccatattagttttaacatctttcttagctacccatcaattgttcataattcaaacccatatcagtaatcttattgaagaaccaagatactcaattttccaaaacccttttctgaaaatgttcttatgacaaagccctttgttaattatcaatatatttgattagtgataaactttatttagtgttctcttattttgtatctttctatcaactaagactgttttagctgttgtgactttaattctgtcatgaatttgtttattatcatagttatattatttgtttgagggttctagctttgatttttctcttcttaaagtaatgctttttaataaccgaattcaaaatttttgggcgatagaactaacagtgttttttctcttttgtgagatgcaattccggctatcatcaaacataatgcagatattctactggtttttttatttaaatggacaccaagaaattcatccagctggttgaggaaaagaagaaacgagctttggagaagatggaagccccgttgaaatgggagcaaaaattggaagctgctatgaagactagggctgatgctgatgccaaagagagaaaaacgaaggtgaagcataaaagacgatctgtatcgaagtctgattcggagacagacagtgacttggatagtagcgatggggggaggaagtctagcaaaagaaaccatcacaagaagcaccggaagcatgcccactctgaagagaagaaatcgaagagaaaatcaaagagacgatctttgagtcccagtagcagcagcagcagtgaagaatatgattattattctgaagaagataggaagaggaagaagcgaagccacaagaaacataggcatcacgattccaattccgattcttcaagtggtgaggatgatgaagtaagtaggaagagaagtcatggtaagcgccacagacatcatcacagatcagatttcggtgctcgtgatttatctagcgatgaggaaaatggcagaatgcgaaagagaagacacacgaagcagcatcataaacaccatcgccattcagactccacctcttctgattcttggagttacgaggatgatgcaactaagattgagaaaaaacatcataaacatcatcgacgttcccacagtgttgactcagatgcccacggacacaggagagcacatcatcacaagcgtcactcgcatcatcacaaactcgaccccgagaagaaacttcaaaccgaaattaatgaagacagaaatggcactactaatgaaattgctcccgaggttctaggatgaagtgaatacagtagtgaatttctcaggcttctttctgatttaccattaagtcaaatagtaaactgataaaactatctataaccctatcatttgattgacatttttttctttattaagtttacttggattcatctgatttctaccaaaattttactatgcttcttagctttttctggattgatcatataaattcctttaatttgtatagagaaatgctaagatggtgtaatgttattggtgcaaatcaatataagaaactaccacaggcactataagcattgttctttttgaatacttgtattgattcataaagactgtcaccaaataaaggtgaaatttggtagtgtgtgcaaaaaatatgattgtaggaaaaggtaaaattggaaaattcaattatacaatgatttctacatcgatgaaaactattggcattgtaggccactcactagccacactactataacttcataatgtaaagttctaactcttaatattaagattacttattgtgatttccgagctgagatatattctatactcaacatttggaacaaataaatactattataacaataagacacatttttggatggtcaaaaattttttagtattttgtcagttgatacaccctcttcaacaagaattgaggtaatttcctgcaaaatccaaagagaaaaaggtaaattagatattaattgtgtttctttaataaagaagaaatggtaaaagagaaaacccattaaccctttatattatcaccacaacataactgaatgaaactacttaatgtgaacattgaagaaataggttaacaaagttttaaaaaataaagcataatcagaaatctaatttgatgataacccaacaaattgtagaccattcaagtgtttaataggtaataaaaaggaaaatattttccacaagttcataaaattttcttacaatttccatttttgttagaaaccaaacaagagataatggaattcatcctaaaagaatctctccttatcttgttgtaacccccatgcaaattccctggtaatgtcagcatttttgttttcaattttcactgaccaaattgatttctctagtcacttttgccaatatataaatgaaatattattatagatggttaaatctatagactacaactaagaaaagatagaagatttgggcgaactcatctttaaacacttgtaacaaactcagttttcgtaccccccctataccccgcaccaacttgagactcaccaacaagaagcagaaacaaaattttaacaaatcaaccaaaagcgaaacaaagacaaacctctgtcatctgcttctgtccacagagtactaccccagtggagcgagggttaaaaatttgcttggctcttttaaaagctgcctgcaaacgcagtcaaaataacaaagtgttaatttgttcatgaaattaaattaagaccgaaaatcttcaaatggaaagcatgatttatcatagtcatacctgcacataaccagtttcacctttccaatcatcacctggttgtgataaaactggcaccacactaacaccagaagattcccactccttaaatctatcctgtatgaagatgaattgaaatttcaaaaccatattccactaagcagaccaaccatgctgattcaacaaaaaaaaaaaaaaaaacttttagatgaacctgataagccattctctgaaggtttcttgccccataatataatctgacatcagatcggttgccagcactaaatcctgactctatcagagaccggataggactgcattcaaaaatttaagtacatcagtattttacattggcaataatttaatgcctgtatctcaactctatatgatcaatttgagaaaaatcatactcaacaatgagatcgttatatctgacaagtgctctgttaacaatttatttatattgacacatagcctttcgagtagaagattgtaatcatagctgaggaaagtaaagtacgtattattcggtttagtgagtcacagatgactttcaagcttcatcatgcataagaaataagaataaaacaatcttttttcaagtgcagggaatcagtctgctcgagtagaaaaggtttagaatatttgtaccaaaagcaattctagtttctaggaaaatggcaataaaatgtagggaaaatcctagaaaatgtaaaatacaatagaaaaaagcatatgttttggaagtgaaaatgaagagattgctcaaagggtacataaatattcagttgtaagtaccaaattggtaatcaaataagcaaaacccaattcaggcaaaaactaattagaagtcataaaccaaataatataaacacttaaatgagatatgaagtattaaggaatgcattgcaattataatttcagatcaagttagaggttatagcaacaatattttttagttttctaagaatgtccctgttctgtattccttgtggattaattgtgtatgctattacgatagatataaactttgtttggttagaagataggaattagaatttttgcccttgaactttcacatgtactaaatcatgccccatgactattcaggccgttaaaaatctcctgaaaatattcaaatttttggatttaaagacttacctccaatttcatttgtgtgctaacaattccaatagttcgaaaaaaaaattagggcaaaaatcctaattattctgatttttgccagagtatttacatactaatgaaattatcattactcttaatgaaattttcattgcttcaaaaatgcaattgcaattgaataaagtaaattgcatcattgccaaaccaaattaaaagaacacaattcaccaccatttcagctgattgtaactacaaaaagcttctacttcaagacccatttcaagcaacaaaacatccaatctaacttcaatttcaaatttcaaatttagttgtgaaattcttcaaactaacaatgtgaaatactaaaatttgtgaaacccatgaagtccgcacagtgtaaatctatgatcgttttgcgccaccattaaatgttatttcgctaataaaaaaactcacttatgatcttgttcatggttttaccatttcagttgattgtaactgcaaaaagcttctagatttgaattcaaaacccaattcaagcaacaaaacatataatctaacttcaatttcaaatttcaatcactaaatttttgttcttgttcagaaaatcaatactatatgaatatttatatatatatataaggttttacctaattccagatccagtagcaaagataagaacagtaggaaactccttcggaggttgaattcgatcaacatcgaatccatttcccataaccggtccaatctcaacaacatcacctctcttaagccgacaaagaagttccgccgtcgaaccctccacactcttcaccaaaaactcaaaaactcccttagccgaacccaaacccggcggcgaagcgatcgccagaaacgaaggcttatccgattcaggaaccctaagctgaaggtactgaccggctcgtgtatgagaagaagctaggtcaggcgaatcggagaggtcaatggtgacgtggaagagagattcagcagccgattcgacgaaggagagaggcgctggtgtccaaactgtggtatcttgacgtacagcagcggcgacggcgaggctagcgaagcggcgacggtggtggttgtggcgtagcgttaggtggcgcacgatagacatgggaggaaggaaggggttaaagtgcgcatgggtgcgtaggggaagcggagctggtgagaaagctattgacatttttcttttttttcttttttttttaaatttatttatttatttatttgagttcggctcggctgaagcttcgaagttcgaacacgtaaatggcggcggcgaagggaataaggggatgaccggtaaagaggtttgtgtgtgtgtgtgagagaggggtattatggtcattttctattgattgagatccacgtggcaaattctgaatggtgtcctggattggtggagagataagttgttgaattaatttttttagatagtgattaaaattagttatgaacacaccattaaaatgaaaattagttatgaacatcttcgaactaggaacatttattgtctaactgaagtagggtgtgtcatttacacttgaaaaaagaaaaaacaaaaatagggtttcaaaaaattcgaatatgactagggccgagttagtgtttcattaatctaaaacaattatatatttttttaaaaaataaaaaataaattcctatatatcatttttatggactgcccaatccgaactcagtcaaaatccacctagactcagttcaacccgaactagacccacccgcacctaaaagctgaaaatttagtcacacttgaaaataagcgtgttagggctcgtttggaacgccgtattaagtcgtattgtattgtattatat

SEQ ID NO: 295585 - DNA, 4357 bp, Cannabis indica
agtcgtgtaagatgtgttagtcgcacacgatcttacactcagtggcgctttttgcagacatggcttggtacctagggctgggtaaccgggaggtacaaaaatgctgatgttttgtgctaacaagccctggggagctgcacttttatgacggtgttagcctctcttccttgacatcccaggaagagaagaaacaatctattagtgcagtagaatttcctgcggtgatacctgtgagtgatccaaccatcaatgtagcaaaatttattaaggtccctcctgggaagaactcatcaaacatatctgaagaggtattactttcttttttcttcatctcagaagtggttcatacatctaattcttttgttcacatgtctcactaaataatcttattcctctttattagataaactcaattatgagaacaggctcaatgtcatccccagctgatggagcgaagtggccactaactgggggggtgcctagtcagttgtctactactaaggataaaaagacggagagactgtatctagctgggtattcagatggatctgttaggatatgggatgccactttaccagtctttatcttttgttcttcttttagaagggcaggtaagaatagaactggattattttttatcaatattatgagaaaaaatatgtattcttggcatcaaatcagatcatatgacttgcaggtgcaaagtattgaaatcgctggttcaggtgctcccatctcagagttggatttctgcttcctgactttaagtttggctattggcaatgaatgtggtctggtcagatatctgaagtttcgtattttagtcttgtaataattttttgtcttccattttcactcctaatgatatttatcttgacttgtataggttcgtatttataatcttaaaggatgcttagatggaggaaacttccacttcgtcacagattctaaacatgaaggtaaagtgtaaatgacacccatcactgtgattgtatcttattgattttcaactagggcttaagataccatctttctattctggaaaatatgttgactttctgaatgttgttttcttcataaccacactgaaatcaattcaacaatatcacacttcacgatttataaatgactaattaacttatagattttgaatatcaaaatgaacaaaatgtttctcaaagctgttggagaagggccatagtcaattcaactgcgtattcgttattttattgtgatgtattccaacatatagaaaggtgctctgttcattatacagtataaactcgataattagataaggaatccacttaaaatattaattaatagtttttaaactctagaatatattcttatgcctttgcagaaaaatcatatattgttatttgtttcttcttatgtcgacttgaatcttacctcttcttacttttttgaaagatcttaagaagctttgatatctgaagttctgtatttcagactttagtcttgtattttagaaattattcatagtcattttttctttgagtacttctttgtgtgtatttctcttggcaaaagaaagtatttggaacttaattgtagatggtaaaacgaaatattaaaaaaaaaatcgattgttgagttcattgattaaaatgttaatcaatcgataaattagtcattttatttggtccaagcttattagtgtatagaagttttactgtatatcctaccacatagtatacctattggttgtttaatttgttttgagaagattttattaaaagtccttttattctcaaaagctgatgtagatgcattttctgcacagttcacagtttgtctcaaggaaaagaggttcagtgtagtgctgtttttgctcttgctacttcccctgttcaaacattagagtttgtgcattctggagctaaacttgctgttggatataaatgtggccgtgtgagtataagctatttattcaccttgcgtaattatttatatataggatgcaactacgatggggtatgctaaattgtgcatatggtgaggtacgatctaattaagacacttaagagtgcccaaatcagggttgaaatagtttgtagcatgcttgtctgtttttttattctcatgcgtgaaaaacgaccctgatttaggtactgtaaattgtccgaaggatttttcgaaaatttgtagagaacccattatgactacaatgagaaccatcataaaaagaatatgagaagtgcttcaattagaccgtgccccactgtagaataatttcagagtacgccatttcatttgctgctgcattaatacaagggattctgaaatttattgttttttttttcaggttgcagtagttgacatgagttccttatcagttgtgttcctactaaatgatttatcatcctccaactctccagtgatttcaataagttggacagaaatggcgaattctcatagtccatcaaagaactcagaaacaaacgcttctcagccttctcttaactctgcaagggaagtgatgttcatcttaacaaaggatgcaaatattaatgtcattgacggcagtaatggtaattcgatcagtccacgaccagggaacttgaaaaaaaaatcaattgcagtttcaatgtatgtcataggcaagtattgttctcaaaacttagggtttctgaattttagtaacaattatcggttgaaaacatctgagagatttatgtctacttccagagggtatcatttctacttctaaggtatacaatgaaaagcagccagaagagagcttaaaggataaagctattccagaggggcctggtccagatggttctccgagtggaataacttcagatgaaagtgaacacaaccctttatccgatccttctaagaattcgggggaaaatttattggatacatttgttttgctttgttgtgaggattcatcacgcctgtactccacaaaatctgtaattcaggtgcctcttgaatcatttagtttcatttgcaatattctgtaggtttatgtataaatgctaagttggtaaaatcttttcagggaaacaataaatctatttacaaagtaaaacatgcaaaaccatgcatctggacttcaatttttaggaaagatgaaaatgttcagggattagtgttgctgtttcagactggagcagttgaaatcaggtgattaattttcgtttcccatttcttgcattccttcccagaatgacagcactgaaacaattgtgaagaactgaagacaactaataccttataacatattctcttctaattccgatgttttagtggcaaaccaacacatgcccctgtttttgtgatgccatatcatgttagcttttccatttattaatgatttgttgctgagtccaatgctttgcaggtcaataccagatttagaattggtgaaagaaagctccttgatgtctattctgaggtggaattttaaggcaaatatgaataagatgattagttcttccgataacggacagataacactggtattttttgctgaattccaagaacttgacactttacagataaattaaagtaagaaatacaagttaaatgtcaaatacctggttttgatgattctacaggcaaatggttgtgaagtggcattcatctctgttttagctagtgaaaatgattttaggtatcttttttgctgttttttgctagtgcttttatttattttattttagctagtgttcaacatattttcttttcctattgacaggatcccagagtctttgccctgtctccacgatcacgttcttgcagctgctgcagatgctgccgttagtcactcaataaatcagaagaaaaagccggttagagatacgatctcagcttccatgcatgcttaatttaatgaactattttgtcagtccataagtagatcaatatcttgctacagggtacagccccaggaattataggtggcattgtcaaaggtctgaaggttggaaaagtggaccacagtgtcgattctacaaaaagtcctaaatccacttttaatcaattagagggaatatttctcaagtctcagcatgcaacctctacttcatatgttgatcatcaagaagctgtggagcttaatataggtcttttgcatacgctaagttctttatgttttggaaaagtgtttcccattactatacttaccgtttgatttcttctttgttcagatgatattgagatagatgaacctctacctttagcatctagttcaatcgatgatcataaaaatataaagaaaggtatatcattatataactatatatatatatatatatatatatatatatatatatactcatggtattacttgcattatatggccacatagaacaaaaaaaac

SEQ ID NO: 295586 - DNA, 2057 bp, Cannabis indica
tacaactacgttttttttttttttttttttttttttttttttttttattgaaaaagtgagtttcttgatgaatggttttttgcgagtttcgctctaaccgatcgttgctggatatggacaaaaaacttaaaaattagtatacaaattttatttttatattcaaaatcagtttctcaatgaataaactagtttcgtaataaaataaaatatgaaaaaactaatttcttgatgaaggatctttgaggagaaatttatgtaaagattaaatatggattttaaaaattaaatttaatatcataaaataattttaaaaagataccataaaaaactgtcacatttaagtaaaaaaaattaaaaccttagtgtaaacttcccttagaaaaatagatttcaaagataagatacagtacacaagagccaccaaaaagcattctcaagactcaaaacataaaatcatttcctagtagcagttcaatttcaacaacttattaattataatcttcaaaataacatattcatatagtagtataacgttgcagagaaaccggccgttggcacaaccacgccgttcatattcaaaagagctataatcttgttcaaaatgttcacaaaaccatgtttgcataaccaagtttcaaagactcccatgactttttcacgtcacaaatcaccttctctgcctgttctttctttaacacacaaaccttgatcacttgatcctgttcagcagtgaccagtgcctgttttgatgtagctgctcggccagccaaatcttcaagcatcttactcagacgcgccttcttcgtcttcctttcggttagctgtctttcaaggacagttatttcatgatcaacagcctcaccttgtgtccttattggcaagaagtcagaatatatttgcttcatatctgtttttagatcatcgattttcttttcgttcaattggaccccccttaagtcttttttggctaattcatattgctcacaactttgaataaagtttgccacaaacttggttatctcatcaaccatctcttcaggaaaggcattgctactaagcagaattgaaagtgatttaatgagctcgaaatctctacctaattggatgacattatcaagatcaatatctaggcattgttttaagatatttcttgcataagtaatttcctcaacgggtcggatgtggtttataaggttagccgacttagttataaaattcttcccatccaattgattttgaatgtcaacaaacaaattgtcgtatttagaaaaaatggtttcttctgattctaccaatatcgacttctgaaacaatatgtcataaaaaaaatgataattaacaactatatatgaaaagaataaaaaaaataagtatttgtagatatatatattaaacatacacacatatatatacatacttgactaagcaatatcacctgatcagcttgttcgtttttcttttcgtattcttcttcagtatataacattacctgaagcagtgtaatgaaagaattatttgtgttaatttgttttagagaatgcttatatgtttttattttccgtagttggttacattttagaattcttaatgggtaattatagatttgttcaacctcttaggtatggttaaattgatttatcctatcctttatatatatatatatatgggtaataaggtaattatagaaggcataaaaatcagtttgtcataaaattaatgcaaaatatatttaactagctaagaatgtcaactcatcaacttcttcttctgcttctctttcttcttctttcttcttcttcttcttcatcatcttcttcttctcctccttcttctcctccttcttcttcttcatcatcttcttcttctccttcttcttcttcatcatcatcttcttctccttcttcttcttcttctccttcatcatcatcttcttcttctcctgcttcttcttctccttcatcatcatcatcttcttcttcttcttcttctcctgcttcttcttctccttcatcatcatcttcttcttcttcttctccttcatcatcatctcttcttct

SEQ ID NO: 295587 - DNA, 5614 bp, Cannabis indica
ataaacaatcattgaaataataaaattgaataaaattagacaaaagtccttaaattcaacaatctcaatagttcagggggcattttcaatgaccttaaaaagttcagggggcatgatttggtacatgtcaaagttcagggggcaaaaatcctaattagccttacattataatggattacaaaagttaaaaaagagaaaagcaaacaatgtaatagacctattcattactattacgattaccattacaataaaccaaacatcaccttagattattaatatcatattaccaaatccaaattattgctatatagaacaatgaggtatgtattcttaattattatttaattttattttttattctaaattatatacatgtaaatatttaaaatattctataaatttttaagaaatttaaattttattgtatcagaaaagaagttcaaacactttgtcagatacgtgtgtaaaataaagagattaaaatctagattattttgattttttttttttaaatttttatagtttttaaataattataatatacaccttaccataaaataattataatatacactaatatataaatttttttacataacaaactaaaaattttaaaaatattacaaaaatacattaataaagataaatttttacttttatgtttgaactcttttaactatttacaaaattatggatttcaatgaactattcaattttttgttattttataattattgtgagcgaggttgattttttattattttttagttactcttttatatacatattttttaaaaatttatattcttgtaaataaaaattgtaaatcttaaattgtaaacttaaattgtaaacaaagtataattttttttttttttaaaatctcaaaatattaaagttgaaaacatatatatacctaaacgaaaatgtattaatatatccaaaaaagcaccctaaaatatatcatgttctattcgataggtagatccaattacattatttataagaaacaatcaaaatgattgcagcctaaaaaggagcatgaacacgtgagactgaagcaaaattttaagagattgctcaaccgtaacggtgccgtaagtcctactcattgtctcttgtatgatgaaaagactattctgtccctaccactatgataattagtcttctgctaacaccgttaaaaggttccgttacctaattttagtttaggatggccagattggcatgccccaacccaccaatccaactagttttggtcccacctccttagctggcaactctaaccctggtcaactaaccacagttaaatttcaaaaaactaaccatggtctaaaacggccttccctgatttgaattgggctggtatatatattctcacaatgcgaagataaacttcaccactaccaaaggcgtcttgataaacgccgatctagggtttcattttctttctcctttttcttcttattctcagatttgttcttttcctcaatctgtgaaaatgagagagtgcatttcgatccacatcggtcaggccggtattcaggtcggaaactcttgctgggagctgtactgcctcgagcatggaattcaggtaaaaaaaatgatcatcaaatttttgattcatttgtgattgtgaaccctgattctcgatttgtatggttgttaatggaggtttttgtttcaatttcattttagcccgatggacaaatgcccggtgacaaaaccgtcggaggaggagatgatgccttcaacacattcttcagtgaaactggcgccggaaagcacgttccacgtgccgtgtttgttgatctggagccaacagttattgacgaggtgaggaccggaacataccgccagcttttccatccagagcaactcattagcggcaaagaagatgctgccaacaacttcgcccgtggccattataccagtaattcatcagttttctttctccgattttaatttcttgattcgactcgtgtatgcaatttacttatgaattttcctcttgcgttgttgttttttgttcagttgggaaagagattgttgatctctgtttggaccgaatccgaaagctcgctgataactgtactggtctccaaggctttttggtcttcaatgccgtcggtggaggtaccggatctgggcttggatcccttctgttggagcgtctctccgttgattacggaaagaaatcgaagttgggtttcaccgtttacccgtctccacaggtctccacatctgtggtggagccttacaacagtgttctctcgactcactcccttcttgaacacaccgatgtggccgtgcttctcgataacgaagccatctacgatatctgccgtcgatccctagacatcgaacgacccacttacaccaacctcaaccgcctcgtctcacaggttatctcatctctcactgcctctctacgtttcgatggagcactcaatgtcgatgtcacagagttccagaccaacctggttccatacccaaggatccatttcatgctctcgtcgtttgcccctgtgatctcggctgagaaagcctaccacgagcaactatccgtggctgagatcaccaacagcgctttcgagccatcttccatgatggccaaatgtgaccctcgccatgggaaatacatggcctgttgtttgatgtacaggggtgacgtcgttcccaaagatgttaacgccgcagtggccactatcaagaccaagaggacaattcagttcgtcgattggtgcccaactggattcaagtgcggtatcaattaccagccccccactgtggttccgggaggtgacttggccaaggtccagagagctgtttgtatgatctctaactcgaccagtgtggctgaagtgttctccaggattgaccacaagtttgatctcatgtatgctaagcgagcttttgttcactggtacgtgggtgagggcatggaggaaggtgagttctccgaggctcgtgaggaccttgctgctcttgagaaggattatgaagaagtgggtgctgagtctgctgagggtgacgatggtgatgatggcgaggagtactgatgtgtttgactatggtgtctaaaaacaatgtctattgggatttatatttctatcttgtatcgaacttgtttgctgttttgcttaattttgtgtgtatatgattaatatctgcacaaactatgctctgcagcatcacctatcctatgatttttatcctatcatataatattttgtctgtttcttttatctgattcatattattgttatgttttggccacatttgcaattggaggattgaaccagatataaagtcttaacaaatattatggaacgtagaaactcacgcttctttgatgtatctttttagagtttatggtttttgctggaacatttttgtgattgattagcagatgatgatcttattcaactcaattaggtggagatattttagtttgcgagagatttataactggggagagagaatgaatgaagagcaactaaagcatgggcaaaatagccatgtgtgacatagcaaagcagaaaattagatatggaaaagggtaaaaataaaagaactgcatcctctctctatgcaatatctacttcatggattagattcagtattggtcaacataaggttgaaacatctcaatcctcaaaggcaagggaattcgtgtgtgaactctatccgaccaatttaagcccccagacaagtacccagcactcatttggtgagttgtggagactgtaaccttgaaggagaccttaacagtagaattgaagacccacacttggggttttagtttagtgacataactacaccaaaggaggttctattattgctctataaatgagtttggagctccaacattcatgacgattctggtcactgtaatggaagtactcataatacttggaatggtgatggaaggcacattatcatctagaacagaaggttgttgaacaggagaccgcatagtgctacctgtaagctgagagatagcagagttgctatagtgcattacacaaaggtaatgaatgtagtcagctgatgcatttggatttataattactccttcgaagtccaatggatcagccagctttctaggagaccattcagcaaatattcgcaagcctgactagtcgtccatatgctgcactaaatcaatgttaaagcacctgtaacttttctgtttaagttttacatgtggaaaattcttttcatcaacaatggtgttggagtatgcagtcctgtgacatggataattggagccaaagctaaaatcctgttgttgctgagattattgaataagtgaaaacaggataataagtatcggttgtgacttgtggcaagtgctgatttaatgcctgaaacacggggagttgctattgaagttactgagtttatggcagatctgccatctgcagatgaatcatgagaagttgtaaccaagatgttcatacacggcgcagttatatgcaaagaaacaacaagaaaagaccaagagctttgtttaaatccacgtaagatcaatgtatatctctagtttacatatgttctctgctcaaactaactaagagattaatagttaatgtaactcgtaaatgtttccacagcttcaaaccatcttagcatttacacaaaatgggccaacatgaaaaagggatataccttaaggattgcttgacggctgttttggaagggttcaactttaccagggaaatctgtgcagaaaaatgatcccatttagttgattcaaaataacaaaatgtagactatcaattctttatttatgtaaaaaaatattacaatccaacaatttttctatatatttatatagaattatcttcccattattttggcaagcaagtcataatcagaatctgtaatcaaatcaggatcatggtgcttcttttccccagattgacaatatgaatctgaaacgaaaactgaacaaaagaaaatcttcgttttcatgtacttttgaagttaaaattgaattaccagtttcatagaatcataatgatatacattcatggaggatatggatgtaaaaaccaacattatagtcttagctgccaccattgttgccgttctccggctattcagaacaagaacaagccaagctaaaatgagcatggaggtagttagcggcacaattatgttgtctctgcttcacaatcacagagatgagagggttgatgttttaactgaaatcatgccattttctttgacaattttgagagattatgatttatacattgaattgtgtactttatcttgattattattatttattttaatttttttttgtctaaactctatatacatgcaagcttagaatatgttcggtgttatattttgacaccattgtagagtgttcaaaagttgctctagaatatggtcctcataccacactttttctctcttcaaaaattgatgacaacttcagaaaattttgctgtttttatcatagtaaatagccccaagtttgtaccacatataaatctgttagtgttaccttcacctttcacatgtagttgatttagagtgtttgtaattatataaatggccaaaataataagtagagattcttctttattatattatt

SEQ ID NO: 295588 - DNA, 3637 bp, Cannabis indica
tttatttagttaatttaaggaacatgcatgttttttactgatttgttttatttaattggtttttgtgtgtgagttattatcttagttgttttatttaatttgtatgtaaatgggatcttcttcttcttctcaagtgacggcaggcgaagagacacgaacctagacaaatctaggttgctcggactcagaagatgaaggcaactggtaagaaatatgataactaaaggcgttaaagtgtagcagtgtgatttttcctttttgcagttttttcgtctctttgattctttttcttaatttatttcttggctaaagtttttttgatttggattcgcaatgttgaggaattgattgggaatttaaaatatatatcttagttgttcgagagtttttttcttagattcaattattacttaaactaacttacttttggctgatcttgtgtttcataatgaattgattggatttgacattattttattctagataatgagttattgtagtggttttgattttgaatttttcatttacatatgagatttaatgatgataaaattagagagctaaagtgaaaatatgaggaaaatttagaggtgtttggttgtgttttcagttttcataacaaaagagagaattgtattttttttttcattttaaaatttaatagtatttggcacaagttttttaatctatttttcgatttttcttactaagaaaaaatttgatattctacaccataccatgacatgaacacaccctatcccggacccgactcggacatggactaggaccccagcccaaacctagacttagccccagattcagatcccagatccgaacccaactcagacccagacctggacaccgaacactagacctcgacccggaccccatacccggacctggactcggaccacagacccgaacttggactcgaaccccgaccaagacctggaccctggatctcgtaccctaaccttagacccaaacctgaacccaaacccagatcccaaactgggggctaggtccaaggtcgttagccaggtctaggtctaggatccgagtcctggtcttggtccgggtctagggtcaaggtttgggtctgagtctaggactaggttcggggttcaagatttgggctcggtccaagtttggggctaggtccgggttttgggtcaagattcgcggtctggctccgggttggggtccgagattcgggtcgaggatagggtctgggttcgagccaaggtctagggtctgggattcgggtcgaggttaagggtctgggtccgggtttggggaggatccaagtttgggtccgggttcgggttttgggtttgggtcgagattcgtccgagtctggtgtctgggtctgcgtctacgtccgggtcagagtctgagatccgggtctgggttcggggttcggggtccgaggtctgggtcaaggtcggggtctgggttcaatttccggtctagggtccgagtatatgagcaaaaatataaaatagaatatgttaaacaaagaaattgtttttgaatattgaaaataatattttgatgttttctgttttctagttttttaaaactcaatttgtagtaagtggccaaacttattaatttttaaaaactgttatttattttttaaaattgaaaacagtttttaaattatgaaaccaaacaaacccttaacccttaatttaaaagaaagtacttgaaagattcttttactgatacaagtactaccaccgaaacccattcacttattcagtgtgtggaacgaaattaattgtttgagataataattgtgtgatgcgaataattaatataaatcccaattctaatgagtttatttaaacaaatacgtgagcatgaattaagagacgaagcacagagacacttcaattctagtatgataaccagtttttcctctatagtaggacgtaattcatagatgattataattatagtaatattctcaataacgtacttgtttattatctgctaagatttattgacttgcttctcgacgtcatatatcattgaaaactttgttttgttttgaaatgcaaatggcatgcatctgtgctacttaacctagtgttatgattctcgtactatcataataataccccaaccagaaagtgtagttaagttaatgaagaacttacgtatttataatccaacataataattaataaaaaaaattcgtcttaattaatttatacgtgattgatcgattagtaaagtgcataccaagaacttttatcacataaaaaataataataagaacttaaaatatatataatatataaccgaaagagaaagctaacaatttgacatgcatgaactaacgcacatttgcgcacctcacaatacttgtggacaaaagcagagccaaacggtacatacaacataaatgtagatatagctcctatggctataacacatattttactaattagaacatgtcactataattcatgcatgtgtagtagaacaagaccattattataatatactctttttaaataataagttcaaaagcttcactttcaggtatgatagtctctcttcatccatcgacatgcacatatagacttaggtcattttcgtgcactcaaaccctatcgtttaaggaaaataacaacaaactgagaaataaaataataaaatcacccatttcgaagtcaggcaaacctgtttaaattctttctcatcttacgtggtaaacgccaacccaatccagttgaatcataaattagtttttatcagaatcttagcacgtatatagatgtagagctatattatacatttaaaaaatccttctctattttcaaattattttaatatttaaaaattatatatcaagtgatgaaagatttgggaagtggcatgaatatacgagttgttcgtcgtcttcttcgactaagataaataatatatcgatatcaatgccctgtacacatcacaatatagtgtgatactaaggacaagaaaatggaagaacataagattttttttttcttcttattaaataaatctgtgtgtttagacatcctggcacgtaattattatcaataagctttctcaagtaaattataagttcttaattatttaaatattaatcccaactctgtctgatcatgcaatttgtcgtgttatggttcgaatagaaatcaaagccagcttgaaatatttaacgcgaagctaatatgttataattattacaatcttattttattttcccctatcattattaacatttcaataatcaattaataggtagatactatatgatcccattaattgttatatttaaatcttcttactacagctgaaaagtaattgttatatttttgtccttagctagcaaaatgaaaatcacgcaaaggacagaaacgtaatttaatttaatagcagcaatcaaacacatataaataaataacggtagactagaaatagacctctaacagatagagctatagagctagcaaaacaacaaaattttgatgtgtgattggactaatttaatagtggttgcttaagcaatattaatttaaattattaacgagagcaaacaatttctaatgtagctttctttgtttggccgatgtgcgttaataaataaataaattatata

SEQ ID NO: 295589 - DNA, 1250 bp, Cannabis indica
tgaaatgacaatactaaccactccctttataatatataaagaatgaaaataacacgtggtaagctacggttactttgcaacgtatatcccaatcttgaaggacgcactcaatcacaacccaaggaaagtcatcgctctatcatcatcctctaaatctaatcgattatataaacctcgatacactacccacacaaaccccaaacgaagcttcactcctccataactgttcactacgcagagccaataacaatggatctccggagcacccttttcctctctcttctcctcactctctccttcatcgccatcgccgtaccttcggtaagaattctctctctcgacttaatctgtaattaattaataactattttatattttccgagcttgatatgaataatcacgttttgcaggattcggatccggattgtgtgtacaccgtctacgttcgtactggttcgatcctcaagggaggcacagactcaaaaatgacagtgaggttctacgactcgaatgggtacggagtccagatcaataatctggaggcgtggggcgggttaatgggtcctgggtacaactacttcgagaggggcaatctcgacattttcagcggacgcggtccttgcttgaccgctccgatctgtgctctgaacctaacctccgacgggaccggtcctcaccacgggtggtactgcaactaccttgaggtcacaaccacaggggctcacatcgactgcaatcagaagctctttaccatagagcagtggctggccaccgatacgtcgccgtatgagctgaccgctatccgagacgactgccccaaggatttgaacaaccatcgacgtgagatcaagactgcccatcattctcatgctttgacttccattgtatgagctggaaataaagggtgtgtttggacgtggcattagtcaaggccggtttgagagtaaattagtacaactgatcttggttatgttgttatggatatatagctgggttgggttaatgttgtccttggtatgtatggattagagacttaaatattgcctcctcttctatttttcttttattttgttgttttaatgtttgagattgatctgagtttgtgtaatatccgacccgcaaaagagaaattaataaataagagaggaatatttttggtctgataaaaataggggtaaattaatcaggtggcgtttggtaacattttttaatcagttttttgtttttaaaattaaaaaaatcaaaatatt

SEQ ID NO: 295590 - DNA, 1330 bp, Cannabis indica
ttttatatttatttgaaactatatgtaagagtgtaatttcctcttatataagttgggctgtgatgggctaatgtttaatgaaggccgcgctgatggacatgttgtgagtggatgcagaaaacgccgtcgatattattttccttgccctagcagtagccggccgagatagtttcagagattggagtttcaaaagtctgtttcagaatttaatttgagtcttttccaagcgaggtttccgtcattaactatggctaagccagagttttccagcactctcaaaagcctgaaggtaaaggagaaacacagaccttttcattttttgaacttcaattggaagttctctttttttttttcttattataagttttgttaatgtttcgagaaggagagacgaaaggaacagattgaattttttaattgggttttgcttaaatttatctggccattctttaatttcgttaatttattggtcaatttttgcaatttctggttcttagcttattatgttaattaatgtttgtgtcttctcccacagttcatgcaaagagcagcccagaaagaagaggtgataaaaaaagaagaggtcaaacctgccgagaattttacttcccctggtggtgttactaggaagtggtagttctctctctctctctttgtgattttcaaataattttaagcgttctgctaatttttattatctatttttacggccaatgtgccgttgtgattgcttgtcgatgtgaatgtaatggatttgtgcgagcttaaaacagaatccgtctttgtgtattgtaattaataattcaatgtaggatttgcttattttctgtgtgtgatttggtttcatcagaaaatttggaaagccctctttgtattatgatactggaactattaagtcctattagctctctaataccttaattcatattgaatcagaagttttccatagtaagctgttgtccaagattagggcattagctttgtggactagagtggggactcaaggtcccgtaaatactcttgaatagaggcattaatgtatttctttgaggttgccatttttttttttgaacatgaaatatcaacttcattgaaataaagtattcaaattacaaactggcattatagtctgccaggacatcaacatcatgaatgctacgatcagaatagaaacaagaatgtctagccacaaagtaggcgaccttatttgctgatcgtttaacaaaacgaagactaacattaggtagagaggataaaaaagatttacaatcatgggtaatcagccaaaaacagaagtcatctgttgttgactgaaaactgcttggacagt

SEQ ID NO: 295591 - DNA, 4732 bp, Cannabis indica
ttatccttgtgtacaccgtctactgtccacatggcactatttttattcggcccgcttaaaataaatatagtaaaaaacaataaaatttaaaataaattaatttaaaagaaaacttaaatcataaaattaaaaaaaaaatgtaactcaaccttatttaaaaaaataataaataatattattagaaattaaaaaatcattaaaagtttaataaaatacagaaagaattttgaaaaaaaaccttaattccctatcttcatctctcccattcacaatgtactccctctctctatctattcacctgtgcaacccctgttgggccgcctccagccaccaacgatcaaaacagaaccttgaatcaacacccctggtctcgaaaccccaaatcctaagcctcccttctctccccaatatctccttcaattgttctttcattgccattttcaatatctttggaagcgattacctattctaggttttgtttggaaggcaagaaaatggtagaatcttcgtcaggcgacccaaccttggaagtgagagcagatacgcagcgagctaaaccatgtggtggcaaagtggaagagggattgggcttggaatttctagccgaaaaggatttgagtctgctagagagcaggactcaaggtcattagagagaagagtatcaacaaaaccacagcaaccagcttcctctgctctttcccttgaactagtcgacactgccattaaaggttcctaaactctcagatctcaaaaccacaagttaaaatctgctcatcaattcttttcttattttttatttttcgtttattgattttcttattatggtattttgtttggttttgttctggatctgagattgtttttgcattttatttttgttttgtgttttttggttttgtggatctagatctgagattgtttggttttgcttggttttgtggttgatttgatctaataaatgcaatggcagtagtggtattgtagtggtgtggttgcggtggtagtgggtagtggtgtttgtatggtgggttggcgttggtagtgatggtattgcaatggtagttttggtggtggtggtattgatacgatgattgaagaagaaagaataaaagctggggaaaaagaaaaggaagaacgaagaggcatccgaaagaaaaaaaaactttttagtttatttatttattttttaatgatttaatttttaattttcttactttttataattaaattatgtagaccaataaaatggtgacacgtgtacattatgtctacctagacaatacagcatggtggttaacagctaaaagtggatggaaaagtgctaacagaacacgggtttaggaggttttgccgtcaaaaaatgagttttgaggattatttgctagtgaggtgacactatgaggaggttctgccgcaatttactcttttaaaaattgttactctaatatcaaataagagaacaaaaattttaaaagactattatatttactcaaaaagacttttgcacttgggtgttaagaataggttttttttaaaactagaatctccgcctagccctacaatatttggggaacaagaaaccatagcaattgctatataggtacccaggagagactcgaaccacagagcttgtgtgggagcaaacaacaccatttgagctacccctcttgggtggtgttaagaattgtttttgtacactaatacctctattcagtgatatctctcaattaggttgcaattaattcggccacgaagctattctatatagaggtttcatagtatatatattatgatctcgctgaatcgtgttaaaataacaaaaccacctaaaaatagtaagggtgcatagtgcagaaagattacctaccataagaattttgttttgacgctgtaattctctacataatgattcaagtttatctcgaacagcaacagctacaacaggcagggtgagaccaaaaaatttatcaattagacaaatacgttgctcatattcaaacatactataaaacatggaaaatttaatgtgaaatttattttatgaaaattagaaaccaaagccaacatacatttagataaatatagagctcaaggtgtaaccaaaatgttactataattatttcaacattacctgaatccctttcagcaataacttgttgatatttcaaagtgaactctaaaaactcttgttctgatttagaggtgcgcttcacagtcttacgcttggtctcactaatttcctgtataaaaaagaatccatcatacaaagcttaataaagaaaagtttgagagacatacacattacaccctatgaaaagatacaaataaaatttcttgtaaaagtaggtgatgacataataacagcaaactaggcccactaggcatgacaagcaaatcttcacacaaaaatgaagcaaatagaattttcttttcctagaataggatattgaaatatcattgattgctgagttcatggaatatatatgaaaaaaaaaaagaaccactttggttacagtctcaaaataatgaagttatttgatcaacacatttactaactttattatttaataagaaaaaaaaacctaacacaaactaatattattactttagtcttcagaacaacataggaatcaaacataaaaaagtactgacaggttttctgtttttcgaagcattggttgttggtgcacctgagtcgccttcactggctgcaatacaggaaaaaagaattaatgtgaagaagtcaaaaccaaaggaacaaaataattgatgaaacatgtgaatttaagcttaagagaagaatgtaaggatcagataactacgtgtctctgaacgttgacatttttctggaagttgttcctttttgccacagcattccgataccccaaccgaagcctctgaagatggtggagttgaatgtggaggggcaagtgtaccttctgtatgttccatagagtctttacttggtgcatcaactgaagtatcaaaactatctgattcagataatacaacaggaaaagttctcagtttttgtgtcttctctgtcctacccttactattctgaaactcacttgctgtggattcattcgagcaatctgtggcattaccctccttgtaactgggtaaaggtttctcctgttctaatgtaggagtttgtggagccagaggttctggcaagctctcaacaaatccatcaggcaatgaatccgcttcaggaagctgatttgcatccgggttttccatactatctattatttcaaaatccttgattagaattatcagaattcgataaccaagggtccactacatatcaaaagggaaatcagttgaaaaaaaatgagtcaactggttctgattttcaaatgctatgtcaaaatcaacctaattcgctcatcaattaaacaagcccaccaaccgaacataacccaactaacgtgaattcttgatacccaacctgatgagtttctacatttccatcatgaacacaaatctagactcttttaaacaagctatattaagaacaaattgaacataagatattttctcaaaaaaggaaaaaaaaaaatccacctttaccttttcacccaataaaggacacaaaataaaaagttagcataaccagcaaaatcaatttccaaattagtttaacttcaaaaatatattacgaccatatatctcattcagtttgccttaagaaaaacctaatttctgtgtagaatgtagattaaattcccaaagcgagtaaagagtctcaacatagacgcatgggtaccaggtcatgtaattgcgaatatttaaaagagagagaagttaccagatagcggagagaaagagagatgagagtggttcactcttacgcctatctgagatgagagatgagatccttggcaagaattatgaaatttatagtcagcagcaacatatatctcaactttatgttagcttcttaaagaaaaaaaaaacaatatttaaacagctagagaggcgatttacgaaatgggtcataaagcaatcaaacccacccataaccagtcctaaaaattctttgattttatatattttttattttttaaatgaagaatatgtcaccaaagtgaacagtgaacttaggctagcagatcagcataagaacgccattgattcaagctcaatcaacaaaattcaaaggctatctcaaccagttttatatttcacaaccttcaaatttaataccccaattttcttcgagaaaacgattcaaaaacacacatcaaaagatttgcatttcaactcaaattcaaacaaaacaatttaaacctagttcgtctgtcttttttgacaaaataaacccaggaggactaactttaaatatcaaacctagttaaaagcaacaataaaatggcataaaacccaaaaatttgagcacacgccttaacagaatgagcattcattttctgatctactataagcaataataccaatcaaaaaacgtcaattacttaaaacaagaaatgatttagacattgttgatcgtagttatgttacctttgaatatggatttgcagaaacagtgaaagcgagctatggagagagaaatgagagtgtggtgaaaaatcaaagaagacgaaagaaatgttttcgttgtaaaagaaatggaaatagtatttagacagcaaaacggcgccgtgctacacacatgttatgttcttttctaaaaaaaatgcatttataaataaaattgaagttagacctc

SEQ ID NO: 295592 - DNA, 12954 bp, Cannabis indica
ttctatagaattcgaatctcctctttccttcatatttttcgtccctatagtgaaagagtacatgcccacccatagcaagtcaagtactctatcatactgtgtaagactatgaagaatccaacacctgaaggagaattgagctcagatcttgataatactctatgatagaaaggaactaaggttaaagatctgagtggaaggagacatattattttgctgcaatcaatgtaaggtttcttaactttatatgtgtttaattctattgttttagagaattcatatttagggtgttaatcaacatacatgttagtaaatctagattctggtagaataatcctcaacaagatagtccattcaaatttttgctttcgcgtggatgttgaaaaatagaatgaacttatcagttgctttcaacacaaacctgttgagtgctgcgattctctcagctagactttagacgtttttgctcttgcttagggatgcatatctaagagggcctgattctttttcgaattggctttgatacagcaaaaacttacgataaagattagaaatttccctgaggaaaccccaagatgcatttttttgggttaaattttcttcctaacttctggatgatagaaaaggattcctctaagtctccaatgttctcctcaaaagtcttgggctttaccagcatatcattaatataaacttccatatttattcctaagagcttctccaagggtactcttattttttttagctaaaatagctaaaaagttaaaatagagagtcatttatattgttgttgctctaatcatactccatactttagttagtatttgattattttagcaatattttataactttaatctgtgaaatattaaataattttataaaataatataaaagtaatagtgttttgattaaatactaattttttttaacaaatagtagggagctccctatccattctctattatagagagctattttttgtatggttggagctcattaataagtctcactccttattttagctaaggagtgtatttagagaccatggttggagatgctctaagacatctttaaagttcactaaatgttagtgctccaaaactcttgagcccaaaaggtattacaaggtagtagtatgcacctttgtaagtctcgaagctagtgtgtgcttagtctgccacatacattttaatttgattgtatctgaagtatgcatccatgaagcttagaagtttgtactcgaacgtggcatctaccatttggtctatctctggaggtgggatatagtcttttacacatgctttattgaggtctgtgaagtccatacacattctctaagtcttatttggcttagggaccaaaaccaaattggcaagctaaaccaaatatatagcttccctaaggaactctattgaagtcaacttctcaacttccagcttcacaacttttgaacgtatcagacctagagatcttcatttctccttgacctgatcagcattcgagtctatgttcaaggtgtgacaaattatatgggaactgattcccatcatatctacatggctcaacaacaagatgtcttggtcctgctttagtgtagacatgatttgttcctttattgctggaggtaagttccaacccactgtaatgacttttgtgggatctgtctcattgatattcaatcattctttccacccccactaagggtccaattcatcttcttcccagattaccccatgtgctagttggacagtagcccaagatttaactcttccattcttttcgtatcatgaaaaatgatattgctgaaacactataacacttctgttcactctattaatctcctcttatcgttccaatacttccattgtcacatgggaacgtcatgtacaggtgtcaaatgaaagttaccactctaaaatccactaggaggggccgtccgagaatggcattataggcacttggacaatctaccacaaaagacgtgcagtacgttaatgcataggaaatatattacttctggctatacccccattcagcgtaactgggagttggatcttccccatgggtggtagagaatctctattaaagccttgaagctggatcgggcaaggcatacgatttgcttaaactaacccaatggcctgaaaagcagccttaaatagtatgttaaccgaactcccattatccacaaagatccaggatgctcttttgttgcaacctaagcctcgatcaccaattgatcattgtgggggaaacatacatgtttaacatcttcttccgtgaaggtaattggaaaatttaacatttgtggcttttgtactcattgagatacctttcttgagtgttcttggtgcttctagagatatgcatgccttcaaaaatagtggccacatgactgtccattgaaggtggagtggcacctaggggatattggttccctagtttgggagcttatgcatttttggcctggatgtttggaccccaaaggggactgtattctcagaggttgttggtaaaccactccatgaggaggatttattgctccacgctatccaggaattaccaattgtccctgggctaccctttgtcctagatagataatcaaaatccttatccacttggaaagatggccatccctgatgaggttttctatttcattcttcaaataatcacactcatttttgtatgctcgacatcaccatggtattcacacccttcatttgcatctcttttatttctacctcccgtgtacattggaggcgacttccagtaatgaactgtgtttcagctagctcggtagacattctcatttgtgtttactagattggtatattcgaaagactaggctttatacccttttctctctttcttcagagtttcattctagctttgactttttttttacttctcttactccaggactatcttacaactgactctgtaacttctgtttattggttaatttgtatttgttcgggacacttcatctagtctgtgcctctctaaaattaagaaaattttctacataggcacataccttgaggcagcatgtccgtagacagttggagttgtatattttgttatgggaggtagaatagatggaactgggagctgcgatgtatatgtaaaattactgacatattaattgaagttagagaagccacctcgaaggcttgagtgtaagaatcctccaacttaataaaaccttgggcctttgtcaagatgtttgacaaagtgtcacacctttgtctttgtatttcattccagaataggaatcctactaaaatccccaactgtagagccactaacttcatgtcatcattgacttttgtcttggcagtttcctccatcatccgttggatataggccttgaggctttccccaaattactacttgatgttggtcagtgagctgacctccatattaaagtcctcagcagctacaaattgcttctgaaacatggattataaatccttttagttttgaatagatccagatggcaaccttttctaccagtcttttgcggattcagacaaagtcaaatagaaacacagacacttcccatcatcatttacttgcgccacctgtattaatctattgtacttggacagatgggccttggggcccgtcctaacctcgtacaactccatttgcagtattcgaatttttttttggcagttgtgcctcaatgattcttttaacacatggctctagatcctcatcctttgagttggatacgactccactttgtatttaggccaagcaatttgtgagttttattaaaaaagtaatttgatcctctagccgtttggtgtgatcatttgcgagctcacgtccacgaattctatagttggtgttgtttcttaaattgcctccatgaggtcttgatttctcaccctttgatttgtcccgttttgtatttagatggtcctagaggtctattgttaacatgctatcttctaggtccaaatcttccacgtgaatgctctagttaacaaaatcactaaggcggtttttaaattctcgaatttttggctcttgtatctgagtatgagacccatcgttctacatgactttgtcccataaattgattggttggcttagccctggggcttgagcgtccctttctttctactggggttggttggctgctcttctattgtttcgtgtagcattgtgtgtgggttttctcgaaggatcatccattacaccctttctattatcatttgctggagtagatggcccaacccccgaatgattaaactttttagcaggagggtttctttcaaggaggttagcttgtgcctgtagttgtggcagagcttcttgcatctgggactagacttcctcttgatatgctaatatcctttgggtatccgcaagctcttgatgtagttgtactatttcaaggtcttacttgtattactctttttcataatccttgttgtggtcatccttagggtcatcttcttgaccttgctgctcatccttgttagtgggatcatcattgacgtgttcttcacagtgctggtcttctcaatgtggaagactacctacctccgacgctttcccatcctcacactcgcctgaccatttgttagggggagttggttcttgtcgttgttggcgacattatctctactgtctcgagcaagtggtttgacaactacttttagggtttcaaccattattgtagatgacaactacagtaagacttttttcaagctctcaatgaatacacaaaaatatttactgagtttttagaaatctattataaaataaattatgcttaacgaagaaataaattaaagaaggagaatcaatgatttttatgtgattggggcgttagtgagcctttgtccacgagttaatattattgagctagaagaacttcaaagtatttttacacgtgttcttgcgcctaagttcaagtttttttttttctgagaaataattttccaaccctttgcatgaagggataatgttttatttatagactagagtcgagtatgaatgaacctggacctagcagggtttaaaggtgtcaactaggaccactgatgggtaaaacaaaatatatatttactttggttcggttagctaaggcccattttacgtgataatgatcatccatacgtgtggggaccgtttggtggtgacatgtgttgtgcgcaaacatgcttctagtacaaagaatgtctagaatatgacattggataaaaaattggttaccttttggtggttcgcgcactcttcaggtctaacataggggacaaacctttcacatggtaggactctgtgtctagaaagtgccatgtaggatggtgtccacattcttctaggtgtctcttcaattacccgttccaaatgaacccattagagtatccagatacatcttgatggacctttcatcttctgaacaagatagcctttctcgggccaaagtggtctaatcttgtcacatctataatttggacttacatctggacatggatctgtaacctaactctgctgtgggttgctttattaatttgattgggccagggatggacccatcttggataattttaggccttgaaagtacacgtatcattaattcaaaaatacaaataacaagtagcattttgagtattttgggcatttggtggcattggtaagcttattcaaatctctacaaaattatgtttaacaaggaagtccaaatttagaatcattatatcttaaagttgagtcctagggagaatgcgaatttaggcattagagttataaaaaatttcaaacttagtcaagtttcagttatctgtgagataagagactttgatatcatatcaacacttctccttaaatctcaagatcaatgatcatcattggattttaagattagtagatctcattcatatattcaaatacaatatcaatgactcagattgaagactacactcaaaagtaattttggaaatattctaattacgatatttagttaaaatattattttattagtattttacaattaaattagacttaactatgattaagagaatcacattcatgcatggttaacttgaccatgacctaaattcattcctataaatagatggcattgctcattcattagttttacgttcaatttatctcttggctatcaagcttaaaagctctcaagctttaatactttttgtaattaccaagtgttgcttagaagtttttcctttaagtaagatacttgtaaataaaaattcaagtagattagcttattaagctaaaagagggtgaatcactaaaaaaaatattgtggtcatttttctatttttcattcttggttttcaattctctaaattttgtgttactatatttggtcatttttgctgtcagtatattattattatttataaaaagttaagaaaatggataccacaagattatgtaataacttgtctatccatcagagtatatatatttatgatttcaaattatatgcacaatttttctctccacaactctttctcactaaaacgcacggtattaaattattaaaactttcatttcacataacttttaaaatatgcttcatgcttagtacaaaatggatgtcgttggttttctttctttttggaccacagaaaaattataattgatacccaacaatgggcagcagtattgttcgagtcaatacaaaactccaaatttatttttcagcttctcattcaacataaatcccaaaacaattaaaaaaacagatatttatatgtccatccaaacaaacaacacaattcagcaacaataacaaatttagttatccctctcagtatctctccatcctcacaaaatcggttagccatttgggtctcacgcgattccttctcccacacacactcttctcttcgttgctttctttctgctggtttttcttctcaaccaaggtgagttcttcttcacgggttgggtcctcttcttgggttgagctctctatccagtctctaatgccctcccggattgcttccgagtctagttttattgggctcaagtcttgggctgggctatcacttctcccctcctcgaaaacaaccttgtcctcaaggttggtgatcttgtactgcttacataattcttggaaatcttcccatgttgcatcttccggcgagctaagtgaccattaaactaacacatgcttcaaagttttgttgttgatgctatgagaacgtgtggctgagattgcgattgggaccatcatagggcgattggctactgtaagttcagacagctggtagcttgtaaccggtagtggtccatggaacgactttagtaatgatacatgaaaggtagggtggatatgactataagccgacaactctaatgtgtaagctacttccccttgccttgcaaccactttacatggaccgaagtatcttctacataactttgagtttaaccgttttgctaccgtggactgacggtatggttgtagtttcaccaataccaaatctcctgactgaaactcgatatctcttctcttcttgttagcttgttgttgcattcaattatgagccttctgtaagtttactttcagctgctgcaataaggcatctcttgttagcagatcctcctctaccgcctgtatagtagttgtgcctcccgtgtaagacgaaatggacagtggtagttgcccataaacagcttgaagcagagtcattccaatcgaagaatgatggctggtattatagtgaaatcctgcccaagccagaaacttactccacttctttgggttgtctgttgtgaaggctcttagatactgctctatacctgtttgttacttcggtttgtccgtttgtctgtgggtggtatgcggagctaatcttcaactttgttcccatcaactcaaatagtttccgccagaatgcgcttgtaaaaatcgggtctctgttcgatacaatggatcttggcaccccatgaagctgcatcaccatgttggaaaaaaagctcagccacctttgttgctgaatagtggctgaacaaggtgccaaaatgggcgtatttagtaaaacgatcaaccaccactaatatattggtcaacccatttgagttgggtaagctaacaataaaatccattgccattactggctgtatgagtccataaggagcgtgaggtgagtatttaattgtctgacataccaaaaaagattgaacatactgcttcacatcatgtcgcatagctcgccaaaaaaaattagcactccaacggagcaaggtccgttttaccccagtatgtcctcccgttggtgaatcgtggaactctgacaacaagagcttttttagatttgaatgttgactaataaccaatcgatttttgtaatataacagcccgtctcggcatgtatagtcgttagcttctagtttttggtcttgtagttgcttgtgcagctgtcgaaggtctagacaagtgatattatctcgtctaacttcttccaaaaattcaaagcaccccgaagaaatttctgccaatagactcaattgttgaccctcatattgacaagatagagcgtctgctgctgcattattatgtcctgccttgtattcaatagtgaacgaaaatcccaaaagctttcgaagaaagtgttgctgctccggtgtttggatcacttgtgtgaggagttccctgaggcttttatggtctgtcctgataatgaactgcctacccaaaagatactggcgccacttggttactgcttctactactgctcttaattctcgaatataggctgatgctgccataaattttgaccctagtttcttgctgaaataggccaatagatgcccctcctgcattaaaattcctccaatacctatgttggaagcatccgtctccacgacaaacactttagaaaaatccggtaattgtaacaccggcgtatgagtcattgctgctttgagttgatcgaatgttgtggttgccgcaggtgtccacacaaaattatccttcttcaacatctccattaatggagctgcaatagtcgcataatgcgctacaaatagccgataatatcccgttaatcccaaaaatctccgcagctatttcaggttcttcagtatgggccattctgtcattgctacaatctttgatgggtctgccttaacactttgagctgaaactaagtgctccaaataattattggatgtttgaaacaattttcacttactccccttcgcgaaaaaacgacgatggttcacatgttcacatgagtgttaatcgcagatggttcacatgttcagccactgttttgccgtaaatcaaaatatcatcaaagaaaactattacaaaccgacgtaagtatggttggaagatctgattcattgcttcctggaaggtcgacggggcgttgctcaagccaaaaggcattacaaggaactcataatgaccctcgtgtgttcggaacacagtcttgtatacatctcttgcgtccatgcgtatatgatgatatccagctctcaaatctaacttagaaaaaaactgtagcaactcatcaatggtggggatagggaatctatccttgatggtcagctcatttaacgctccataatccacacaaaaatgccatgttctgtctttctttttaaccttgcaaaactggtgaagaatacgggcttctgcttggtctacagaacccatacgctctcatttcttgcaccagtttttctatgatatccttctgaaaataagggtatcggtatggtctcacattgactggtgctaatcccagttgaagaaatatacagtgatcgacgttgcgttgcggtggtaattttgttggttcttcaaacacgatgttaaattcccgaataagtcccttccctgctggtggcattaacttctcaaggcactctattttgttagtggctgctgcaatatctttctccgtggaacacaaattgtacagctcatggacctctccttcatgtagtaacacatgaaattgattggcggataattgttgagctgcgagttctgaattgcctactaactttaccgcctgccctttccattggaattccattgtcaactccttatggtcatgaacgcaaggtcctaatgtccccagccattccattcccaagacaacatctaagccccaaattagtaaaacatagagatccactgtaaattgatgtccctgcaataacaactccaccccgtgacacactttcaaacaaactagagaattaccattacccatatacactttgaatacctttgtctcttcacatggtattcccaaatggatcgctaatgattcttgtatgaaattgttattgctgcctgtatcaatgaggacccccaacgattccgttctgtgtttggcttgcaaccgaaatatccgcaaatttgacgagttagatagcgaattcaggctaacctctttgaatgttggatctcccaattcaccttcgttgatctcgtctaattgactaccctcatcttcacaatccccttcctgaccacacaaaatgagtactctactcttacacttgtgccctacgctatacttctcgtcacaagtgaagcatagaccacgttctcgtttttctttaatcttagctgttgaaagacatttgacaggcaaggatgaattcgaagcgttcatagatttcgctgattgtgatgatacttgcatattcgacactttggagagcattagtggtgtcgatacaggcggtcgtcccggccaacatgaatgatgcgtcgccgtacgacccatttagtcatcatatcgatcttcaaacatcttagccttcgccattgcttccgctaaatccaatggtttcgacagtgtcaactccctgcgaatttcaagcttcaatccccaaatgaaaaaaattaaagaatatgtgatctgccacctccgagattctagtcattagatcctcaaactcaacacaatattgctcaacagttcccctctgcatcagcttggaaatacgcctcagcgggtcctcataagctgaagtgccgaactttagttgcagtgcttacaagaaagcctcccaactaggaaatgaacctcccttttccatccattgaaaccatttggatgggactccctccaaatgaaatggtaccaccattaaccgtaatcgagcttcgacttgctgcaagtcaaaaacttgttaatcttgtaaatccaatcctctacattagttccgttgaagcgagccaccttcactcggagattcatcaaaagcagctgaagatcacgtccttcatcagaatccgtccttcatcagaatccgtccctcatcgaattgacgatcgcgcatcaccctgacccgaaccacctcctatctccattgatggatgaatcagaactaggatggacccaatagaaaattgagctagaaattccttcgtctcgaccttgtgctgctccagtaactcaaaaaatttccccaaattagcagcaaaaacggtatcgaagctgttcttcatgtcttaaaacagagccacgatctcttcgttcttcatggtgagtgcagtaccaatgaaagcaccagtgatacccaacaatgggtagcagtattattcgagtcaatacaaaactccaaattgctttttagcttctcattcaacataaatcccaaaataattacaaataggtatttatatgtccatccaaacaaacaacacaattcagcaacaataacaaattcggttatcctcttagcgtctctccatcctcacaaaatcggttagccatttgggtctcactcgattccttctcccacgcgcactcttctcttcgttgctttctttctgctggttttccttttcaaccaaggtgagttcttcttcacaagtcaggtcctcttcttggactgagctctctatcaagctcctaatgccctcctagattgcccctggtccagttctattggactcaagtcttggataacaataattctataatagtatttgttgtaattatatagatgatcatacaaatttttgcagaatttaaaatttattattgtatcaaaattagagttaaaataatctatcacacttttttttaatacatatgtgtaacgaccagggtcggccctgggcataggcgggctaggcccgtgcttagggcccactcattttagaggcccaaatgagaaaatgaccttttaaaaatactatttatttttatggtgaggatctaatttttttttttgtctatagcctatctcaatttaggaccggccctggcaacgagctagatgtttggaatctaatttcaaatcgtagatatttgaatagggacctcaacctcctcgtgagtgagatgtagttgacatttgaaaatagcatttagagatttgggtttggtgtagccaataaatgagtggtaagcaataaaatccttaaacatgcatggagcaccctggcctggggaacaaatggttgccagtcactttccttcccatttgatcattaatgtatttattatggtcctttcaaatattgaaaatgactcattgattcttaccaactgtaaatccaaatatcggaaattctcatgtttttataaataaaggtataataagctaatcacatatttttcattattatatattcctatcaccagcttcaaattcatgtctcataaattattacagatcatataaagtgtgtgtttcagtagtttgatgacattctactacaattattttaataggccgtgatgttttggtgttcctaattaattaaggaataattacataggtaccattttttgtaaaatatttatatttttacgtttaaagaatgtttttttatatttttacggttttctaaaaaataacacgaaaacaacataaaatcagcaagaaaacaacataaaagtaatatcaaaataacaacaaaaaaataacaaaaaataacatacatataacaaaaaattaacaacaaatgaac

SEQ ID NO: 295593 - DNA, 4941 bp, Cannabis indica
gcatcctgaacctgaagaaagaagctctagtgttgtgaatgatcatgtgaggaatatcagtttgacaaatatcaaagttgaagaaactagcctgacgacacagccaggatctgctgctaacatgaatggggaagagaaactagtgaaagctaaagaccctatagatcagactatttcagtgaaaaatgtgttaaaaccagctggatctcttgcccttaatgttgggtttgatgtgcctattaaggatagaactgaagtgaaggttgaaccagaagttgctgctttacaagaaaacagcaagtcattactgaatttgaaagaacagtttgttctagctttgtcaagcaaaagtagtggaagccagcatcaggagactttggaacctgttccacagaatttgtcttcgagtaaagaaagaagcagcagctattgcaaaggcgatgctggtgaagtaaatgtccatagggctcatctttgtgccaatcgggctaactgggatttgaataccccaatggatacatgggagagttctttgaatgatgcagttattagtcaaacatctgctggtggaatggtcccagctggtcgaagagaagatgaacagccattgataggacttgctatcacttctgaaaagctatcaagtatagagagtaagaatgtaactgatttctcccggctgtctagccataaagacaaacctggtgactctcttcatttacaacttagtccgtcttgtcttaacttccccattcaagaaccttcaactgcatcccctaagttagatacaaacaaagttattcctatgacaagcatgcctagagttgttttgccaagtatcaacattgggaagggtattattagacctgtaaaatcagagccagttgaggagagagttaaggtggagacacatggtgctgaatcctttagtttggcctcattagacagttcagtggcatcttctgtaaacgggttgccattaaaattaaatgaacaaatggtagaaggcacagataaacacttttcatgtgcagttagatgtaaaactgcagatatcccgtgccccatagagaattcttcttttctgactgagaataaaaattcaactgcagcagttatgtgtaaaaacacagaggtagctagccctgtcaggaatccttcttcatctgcagagtataaaccttctgatgaaacaagtaaaactgcagagagtatttgctctgttatgaattcttcctttcatactgcgttgggcatgggcggtgaacatataaatcaatcagaaagatttagttctactagtgcaatgcatctcgaagcttgtgaaagtagtgggaagtttacactagataaggctgctacgtcagtgagtattgatgttaatgtagacactacaaatcctgaacgtagtaaggttgatgattctaagaagtgtggatcaaaagtcgctaatgatctacctttgcgtggagatggtgagggttctgcgagtgatgatgaaaagattaatatttcagctgaaacaggagactcttatagttctgattatgagtcagatggtaatcacgctatagatatgagtattgatatggaattggatagtgattatgaagatggtgagatcagagaaccaattgagcatatagcagttgaggtaactgagggcaagaaaggacaatcggatcatgttgataatagttttcttaacagagaagtggtgggtacaatgggatttatcaataatgcagaccatgcttttgagggaaaagagtcaaaatgtgatagtactgaaatagataagaagggtgttgaagaagcttctggtgtacctcatagcattaagtgtgagagtggatttgataaagatgcttcttttcaagaatcattgactgttgaaagctcagctagcggagcttttttagatgagactaacaatgctgcaattagtataccccctagcgaatcagtgaagagagatgtgcaggagtgtcaagacacaaatcttgaacaagctgcatgtggaggtgaagtaactcaaccaactattgcacaaggaactgatctgagacttgatagtgatgaactagtacaacagagtgacacagctttggccaaatcctctttgtactttgataatgcagggaaggatgttgatagtggaacccatcgtagccgcatgattaatttgccccgatcgtctggctcatcttcccctggtaggaacagaaacttttctgggaggggaatgccttttagagcaggaagagagagattttctgatgtgacaaatgaacgggacatagtatattttcgagggaggtgaatgttttattttgctttcttttctctttctttgattacatttacatgttattcagttttcgctggcttttttttttccactcttttcccgatttgtgttaattgctttttttttcccttttcagagaggaaaattacggtgatgacacccacaagttttttagggagaggcaccatgatcagacaactaggaactctagattcaattatgttcgtggcagaggtaggattaataatcgaataaacacctttcgaggtgatcgagattctgatcgtaactttgcttcagaatttcccaacagtcaacaagagtatcgagttcctagacataaatatgaatcgtctgatgttgatcatgaatatagtacttacaatgtcactcaagatggaggctttgttggttctggtcgtggaggtaggaagcatttaaatgatgaaggaccattcggtcgtcggattccctcaaggaatcagtctcctggtgcagggcctgcaggtcgtggtaggcatatggtaagaagaatgccaagaaatattagtcctagatgtgttggtgaggatgattccgagatggtcaggcataggcgaaatgacaagtttgcaagaagtttccaatatgatgatatagatcctcctgagttctcgcgaccccaacctccatttgagggagtagatggtcagttctcccaaggaaacaggaacttcccctcggtccagagaaaagttatgcaccgttcagttcgttcaaaatctcctgtaagtggtagaaaccgttcacctgggccatggtcatctcccaggagaagatctccatatgggttttctggacatccagatttggcacaaaggactccattttacagaatagacaggatgagatcccctgatcgccgctgttttgctggagaagtggtggttagaaggcatgacatgagagggatggattcaggtcgcggtcatgggcacccagggtctgttatgcctaacagaagcccgtccgatcgcattgcaatcagagaaagaagatttggtggtttagatcctcaagaaaggcctgaaagtgatgatttctttggtggtcgtttgcatgaacttggtagcgatgttaatggtgaagaaagaaggtttggtgagagacgtggacctgtccgtccatataggactccgtttaatgtggacgatgtgattgatagagatttccacattaggattaagaatagacctggtaatgcacctagacgaatgagaaatattgaggagcaagaagcaaattacaggcagggtggtcagatgtggcacaataatgaatttgatgagatgtcacgagttaaaaggaaaagattttgatttaatttggccgctggccttagttttggatccattctgcatgtgaagatagagcctggttcttattaactaattatgcttcaagacattttgcttgttaaaacacaaagcaagctgcatggatcctagactgaatgctttgcggcatatgattataattgaattgtcatgtaaattgacaagtttcttttctgactaatctcgacatgattgaactgagagtttcatgtggcaaattttgtacactcctaggtatggttgtaaagtactatcttactggtggtcatttatgaagaatggctgttctgctcatagcttttgcgcttggcagacaaaaacttgcaggtatgcacaacttgaatctgttagcactccactaaagttcaaaggctttatgccataatggaatctgttagaaagttcataatttcatgttagttttttctgcttcagtttcttttcgtgtagcaagtagactgctcggtttctctctggcatgttatttgtttctgcctcaaagatgagaagtatcttgaacttcatttacatgctatcctttaatttggcaggtaatgtaagtgagtagatagttttgggcagtttggtgatggggaaggatgtgaagttgattcttacagattgccttttggtatgcattgtagactttgtagtgattagttgtcccggtaaacaatccattatagatcttgtaggagaataattaatgactacattatctataagtttaaagattcaaatattggaatatcagtggaaacacgagatgggcacatttaatctacattgttggcgaattcatgtgcttcctgaatcgtaataaactggctgtaatttcatatcactagttaagaaaaaggatattgaaatgcttatctctgtcttcgctgctctacatgcccccttcatttcaaaagttgcttcatgtgattattcattcgccttaaatgagatgatgctaattgcttacgatgcaaccttggtgttgtgtttgttgggtaccatgaattgggaaactttagttctgggtatacttttttttctcaacacaagctgaaaagtttggtggcatgacgagttgagtaattttgatgaaatcaatccaagctcatttggttttattaaaattcacgaaggttctggccattgtcttgctgaatgggtaaataattacaagttggacatgatatatatatctatatatatattttttttttgataacatggacctcattattttcattatcaatctct

SEQ ID NO: 295594 - DNA, 5019 bp, Cannabis indica
tttttttcttaaaaaataaaattgaaaatgtattttaagatttgagatagaagtgaccaatcatgacaatttataaaccttttaaaaagttgagttcattacaaaaaatctaaaaaagcttaaaaaaatatatatatatatatattagaccctttttttggccctgtgcaatagtcacaccatacaaattgaccctgactttaaatggtgtggtgcattattggtgtattttaacacttatagtttccttagtaattgctatttggcaccataactataaggtatcaaaaaatatatcaatattttaacagaacccaataacatgataggtggatgtgatgcttgatacaaagtgtgtcttaaccttgataaaaataatattcaaataggaatataataaaaagaataataatattatctagcaataaaatatttgaaaatttaatttttcaaactataaactgtttaaaaaaaatttaaaatttataagtagttcaacatatctatactatgaaaaaattgaaaatccttgaagtgctattagattatataaatcatttgtggaataatacaactttctaattaaaacgaaaaaaaaaattaaaaaatttgggtgccaaaatagttaaggatattggagagaaaaccattttgaaccattatatttaattattccattattataaataaagtaatatattaatttattttgttttaataatttgaattgatattaggtctcaggttttcgtggctagtattaaaaatcgtaagcttcctattccagagaattcagatgaactatatgagattggagaagacaaagaagctgcaatattaaataaccatcaagaattccttcaaagaacagaccaattcaagtactactctaactactactagatcaatatcattatttaagattaatttattaagcatatattaattaattaatgcttgatttattataattattagtgcttggaccgagcagcagtgataaggacagatggtataacaggaaaatggagagtgtgcacagttactgaagttgaagaaacaaagatattagttagaatgcttcccattatactaagcacagtcttcatgaacacatgcttggcacaactccaaacattctcagttcaacaaggcaccacaatggacacaaccatcaatggctttgaagttccagcagcctcaatcccagtcatcccactcctcttcatgttcattctcatcccaatttatgacaagatcttcgtccccattgctcgaagaattactggcattcccacaggtattcgccaccttcagcgcataggagtaggcctagtcctctcagctatttctatgactgtagcgggaatagtagaaaagaagagaaagaatgttgccattgagcatggcatggtcgatagcctcgctcccttaccaataagtttgctctggctagggtttcaatatgcgatatttggagcagcggatatgtttactttggtgggtttgcttgaattcttctacgctgaaagctcggcaggaatgaagtctctgagcacagcaatctcttggtgctctttcgcctttgggtactacttgagcacggttgtggtggagattgtgaacaaggtgagtggtggatggttagccaataataatctcaacagggataagttggaatatttctactggctgttggctgggttgagtgtggtgaattttggagtttatgtgttgtgtgcatcttggtatagatacaaaaagttggaagtaccagtggtcgagaaaaatgatgtcttgaaggaaattaaaccttgatatgtaataaacataaataccatatggacttgtactgcaagtacttacaataacttttctgaacacaagattatataaaatttaattatgttttgagaagttacaacatgtgattaaaaatgttgcctttgcatgcatctaagtcagaaacttgaggaaagagaatcaagagatcatcaaagctctgatctgatataaatgatcaattcacagttgtggagattcactcactggagttgtgtgtttaaagaaaatgcactccatcctagtcaattacattatacatataactacacaatactctcaattcgaatttcagggtaacatatcaaaaccaatgaacttctaagttgtatccatccccctgttctagtgagacaaccaagtgctagaaattcgaatgatacactctttttttcaataattttatatgcaaaacatgtagataagagagataagcattattggacatgaccagcaatcacatcagcacaatttccctggaactcaaagaattcccattaattgggcctcttcatcaaacaattaattctacgtataagaaatgccacttaatgtgctggcaaaaatttagtattgcgttggtaaaatagagtttacttctgatgtgttggcaaaaggaattggcaaaacaacgttggtattagaacttttgccaacacaaaatgaaaagcacgggcaaaaataatttttcccagcgtgtaaatacactggtaaaagttagattttagccactacaaatatgcgttggtaaaattttgacatttttgccagcgcagtttgcgaaatgcgttggtattacttttaccagtacagtaacgaactgcgctggtaaaagtgacatttcttgtagtcacagaaaacgtactaagcttaaatcatcacaatctaacagtaaatactttaatttttctttcattgataacaaattagcctatttacaacaggcagtagtgactaatatgagtttattttacaactaacatgtacagataagccttttacaatcatcaccaaacaagagaacaaggctcgctctcatctttcgtctatataaaacttcccaatttgaagaataaaaagaaggaaaaaaaagacaaaatatgttacaaggaagattaagcctaccatttaacatccagtgttaaagcctcggatggaacaaggggagatgggaacttggtaaatgagatgttggacaaattgctccatgcaactgtatctgccacagcaaaaggtactacttccttcactataaggagcttcaacctctctgcttcaactcttgccactatttcaaacaaaaccctttcaacattgggttttgttctccacccatctttggctttgtcagtatggttgcttcttaaattcttttctagctcaagctggaagcgaataagagctgaagctttgatatttcctcgaaaaagacccactaaaccatttagccgtttaccaaagtagcttcttaaaactttttccagcatgactattctagaactcaaagaatcaataggagaatctcgcctcttgtacatatgagactcagagccataacacttatcagccaacaactcaatcgtctctttcgacataaaattggtatcaatgtgagcataaggatttcgagttctgtatgcaactaattcagaagacccataaacttgaatctgcattaaaggtctgcaaaatgagtgccaaatgggcaaaaacgcacttttcttcttctcagtcacatgacttccgtttactggtatactgagattagatacatgaaaggcagagacttgacgagcttttcttacttcaactgtgatgccttcaccgactataattcggttaaagccaccatgtgtacggttcacctgaaaaccaaaatcaaaaaggtcaacaatattataaacaagcctaagagaattaatgaagtaacacattttacaatttacaagaagaacaaattagaaattaaaagaaaaagatatgatattgatgtagtgtaaatcataagataaagatactttaaagacatcttttgctaatctcaaagcatagtgacactactagcattgaagatgttaaagtcattaatgtacttcttcaagtgtatggaatggaagaatcttaaatgtatacatttgcaggtccaaatgagattcttcaacatgttaaatgaaacgaaacaactggaaaaaaagaaagttaaaaatcaagacttgcaaatcaactcaacatcaacaaaataaagggtattcatgcgtaccggcaaaaacagagaagggttatcagaaccaccgacccgcaattcaaggggtccctccactttgaaggtgtcaagtacagtcaaagaagtaatattattaagcaaatacccaaaacgatgagacctctgattcctgaacttcttccatgaggccacttcatcggagaaattggccgacaagtgagtcttgccgagtccaacccgaaccgattagcagccccaaacctaagcttcttaagatccaatctggaaaccttaatgtcctccaactcccaactgaacttggaagagatttggttcaagacatcctggaaaagcataagaaggaaagtgagatggagatagaagatctgaggagaggaggttgatgaaatcgcgtacctgtaagagaagggtgtcgtttgaggatggaaaagcgtttgggtttggattagaagtgaatgcaagtacaagtgattggtggaggaagagaattaagataaggaggagatgtcgagggagctggagctgcttgggtagaaggcgattcaccatcatcatcatcatggatgggggctgagtcggatcttcaaggtttctggttgtcgtatggactgagtcgaaaggcaaaggctgtggctttagggggctctgcctcagattctcagctttttttattatttcagctttttttattattattattattattattatttctcacatatacagacaccacatttgtttaaaaaaataccccatttatatattcttttttcttttttatcttacttttaattttggataaatatcattttagagtatgtgttttacaaaagttattaattaaactcttttgatttgttaaataataaaatagaccttgtatatttcaaaatggtaaaaatagaaccttgagcataatttttgacaacttt

SEQ ID NO: 295595 - DNA, 5922 bp, Cannabis indica
catatagaacaatggtgtgattgagacaaaatcaagaagagacctcccaaaatcatggtggtcccatggccaaaaccaatggcctaacgtgctgctacgagaccccaaatttgggctattgatttcagatctcatcaccgttaaacgctgtaacaatgtcatcacatccctgccggccacagttggactcaaagccaaatcgaagtagacttcggcgctgcaccaagccaagaggaagcatcgtagaaagagaagagaagagggggctgatggcattaggttccaagaaaagaaagagaaagtaagaaaagaaaaagaagaaaaaaaatttctaattttttagaatttaaaaaaaaaaaattaatatttatattatttatattagttggactaatgaaattttgccacgtgtacactgttgtagtccactttggcacttaacgaaccaaagtagacccaaggattagagagcaaaataattgtcgagtccagggagtatagttctaatttttcgagtaagagagtttaaccgtaacaaatataaaaatataaagagtttagccgcaaattacctataaaaaaattattaattttttctcatcttgcaaattctttttaaaatgcaaccaaataaatgaatgaaataaaaattattttcttttagttccagttcactttattatctctaaccaaaggccaaattaaattgtattcttatgttacatattctcatgtacaaaatgcaaccaaataaaactaatcagacctggaagtgtaactcctactcaaagagtgtcccaattgaacccaattacaagttcaggaatttcgaatgctaaagttgtgagtgaggtttctcaaagttcttattctttctaacagatgttgactagacactagtagagctacagagttcgattaaaaagatcattagctccatggtcgacttctcacatgcctgatcatggtacttctctgtcaccattcattcaatcatggtgaaatttccatttgcaatagaatcctatgctggtatcaaatccctctttgagctatgttcccacatatggaatgtgctaaaggaattctttggctaggagcaattttgacaggaatatttcaagcattcgacctagacaccaggcacatggcatgggatgcacctactgcaacagatagcacttgctgagggcccaacccatcttcctccattagaaagttgaccataactggacttggttgcacctccggcaatccaggaactcctaactgggaatccttggaatttccccacatgaacaacttcccatcatctatcaaatcagaaacagaagcttcagtgcttactattatagttgttaaaaaatgcgtaaattgtgagctccaattaacaagaactgttctatcaaataaataaataactagagctgccaatgttccaatcaaatccagccccttgcaacagtaatttatgaatctacgttgcttccaaatgattctttcaagagtttcaaccagcaaaggcatatcaaatcaagctataatagaagatgataaatgactaccatctaaaagctttcacttttaactgttcttcaacatgatttgaactaaatattcctgcattttctccttgcattgtcaaagacctataataaattggagaacagagagacataaatcagctcacctgtaactgctgcagaagaggaacctccacaagcaatatagacaacacgctcgttagctaatgcttcgatcacttcaggtgttttacaacttgaaatagaagaatgtcccagttgaccatgaccaccatgaccccacgacagcacctttccgtcatcttaatgttgtagcatcaagattgaaacacaaagatcaaagaattaggcaacttcaaaagaatacctgaaaacacaacatataaacatatatcgctgcctttgcattcaccgtaccagttaaagcaagagagtgatatccaccactcgctatctgtatgatgcgaaaatcttcaagactagtaactagcgttggcttccaaccaccaatgttatcacctcttccaagttcgtagttagagttcgctgagaaaaataaaatcaaacaaaagttaatcaatacctgttggctttaagaaaattgtcacaagtagataaatcttttgtttgtcttagtatcacactatcattgatggcaaaacctgtctagtgttagccagataagacccatagtttagcacaaaatatagtaatattcttgtttgtctcataaggtctacgattgattagtatatcatcctcagttcaatctcctcgtgtttttcttttttgtatgctgaatggtagattcagtttcaaacaacattatcatcaccaaggaaaattttattttcactatccatcaccttgatgttgaagatcccatatcttaatagtatatatccataattgctctatgactgttcaagttcactaaccccaaaagattaaaaaaaaaagaaaaagatcgactttataaagaagacagacgaatgaaaagcatttattaaagaaaaaaaaactgatgtccacacctccccagttccaaatttttccatcttcagtaagtgccattgtgaaaaatcccccacaagaaacagcagccacaggaacaggtaataagttcactttggaaggcacactatatccaccaccctcatttggaccacgatttgggccaagtcccaatctaccttctccttcatcacggccccaaatatagagttcacctacattccaagaagtaaacaccaatatgaaaataaaactgaatggataagaagacagtaaaaacctaaggagacacataacacaaaggcataaattaaaccacgcttagactaaatttaacaaaataaagaacatatttgcattctcattcagctctagtcaattagattgttgcatgattccatactcccctctctaatttccgacacagttcgtatactcattttccctttaaatcaagcaaaactacacaagaacttcgaagattctttgaaatttcaaatttgaacgattctaaagaagtcatcaagactaaaactttgcacacacctgaatccgtaatggcagcagtatgagtaccactagttgcaatatggtgtatttttccactccatgaaccttccaccaatctaggcagtaattctctagtataaacagaatgcccaagagcaccaaaaccaccataacccctgcaaacttcattttttatgataaaccatgaccttatgtgaaccaaaaataaagaatcttcacattgaataacagcacaaccataagtagtaacacatacatacatatattagacacaagggaaaatcactacgtttagtttacaacatgatttgatatcaaaacaacccttttatcatttgtaatgcaaaaagacacgaaatggggtatgctctattgaaagtaaggagtggcatactgaccaagtgaatacctgaccgtccgtggtgagaacgacggagtggattccaccaagagccactgaccgtacggtatccaaatgggggttcagtgtaggcacaaacgcaggattctcatggccaaagccaagtcggccaccatcgcctttgccccacatccaaagcttgccatccacaaccaacgacgagtggaagagcccacacgaaatgcccacctccatcagattcctgctctcttcgttaactggtaccgataatcggcccggggagggggagagagaaaaagatgaggagggaacaagaaggttagctacaggagttgggtagagacgtatttcctcgatgccgccgccgagctgaccggaggctcctctgccccacgaaagaatttgaaggtgtgtggtggcagtggtgacggcgtcgttttggtgtcgatggtttcgggtttgtagaggagtgggactttgcgattgctggtatagtagagaatggagaagagatgcggcgagtgaggaagcggcttgaagagagctgacgtcggagatacgacatcgtatgactgttgcagtttcagattcaagcgggtgtttatatttgaaggcggcggcgctgttcacgggaatatgaaaatctctccttcttcccaccgaaaacaaaacgtaatttccgcttctggccctcaacttatgataaatgcaattttgtctatggattttgaaattttgacccatcaattctatttgtaaatccctaaatcaaagtgtaatttttatccatttgtcaaaactctattatgaaattaaatttgttttagctattagtggtacctagcacttctacacatattgttttgcaattggttaataatacttttttaaaagttattacatttaactatataagacttaatgcttagttggactaataataatattgacacataagagagggctagacaacactggtatctttcattatttctcatttattttagtagcaatgaacaaatttatttagaagaaataataatgtcatacaactaaaaatattgagaatccctaacaaaagatgggatctcatctaactaaacaagttctctatccacctaaagagcatgccgaattaatctatctgcaacctcgtttaagggcggatccacacagaggccagggacagttgccccttaaaaaaatctcctaaaatttagagaatgtttcttacaaattaagtgtaataataaattttgactcaaacattgactctctcttcttgtcttttagctagggtattgatgttggctttggtcgcgccctgatcaagaggaatttttcctaatggcttagtatgtgcgagagggagtgattactgatggaggatggactcatggaaaactttattcggctacgacgacactcttgtatctagccctttaggttgtgatgcaggcatagaggctctcatcttcagtggtcaatggaaggctttgtgtgtagcattccaacacttcaggctgccatcagctttgtggttgggcttagggtctaattggattcggttgcaaaatcaaatatttttcttggagtcacaatctcgaggtggcattgttctttcgaactagagtgttgtttggttttagagcatctactatcgttatttgtttgtgttatatttattagtttaatatttatgtttgatttgggtgtttggtcaaataataatattttatcatattgtctttcaagaactcaagaattttagcttcgtgtcaatttttgtatgatcttttctcaagttttaatctgttcgtggtaaatgatcgcttggtcgtcttgctgtctttttaagtgttgctacaagagcactgctcatttgagtgcaatgtttgatttcttgtgttgtctacctcacatggaatgattcatttagttgtattttcctcctttgttactataacggttgcagtgtggacctcgtagcagtccttgtgtcatgaatgtgcccttgcatcttttgtttgcattgtttccgaccttgaatgctttcttgatctcttaaatgcataaagttatgcgagtgtggaggtctacggcttttaaacactcaaattttttatttaaacaaatgacgatcatggatgcattgagcttcttaccgaaagtttgaaaaaattgcattttgcggcgttcccaaacaaataccatgatcttgcaagttatgtaaaagatgatttactaatttatgttaagagtatagatttgtataaagtttaggggattttctagtatatacctaaactacaaattaattttacatatgttaacaaattatatagcttgtcactttatcaaagaaaaactcaaattataaagtaatatgtctgaaatggaatgatccctaaattctgaatctatcatttttatccgttttcaaaagtaatt

SEQ ID NO: 295596 - DNA, 4663 bp, Cannabis indica
cagttggatcggaatccgtgtgaagttcgtatccaacattaatttccctctcctcctcaaaatattcggagacatattgctcttcatgttctgttgtttcctcataagtcagcctatatggggatctttagccgaaatggttcgtgtagttttctttgtatgaaccaattttagcatgggtggagggagatgcttcttggcatgttttgcaattgtgatagctatctctacgtgcgtgaagttcttttcaaagatgttggacgaccaacgggctctggagaatttcttgagacttcccactcagagaaacttaacgaagaaggtgacccatttgaagaatggaacaattctactacacgaagtctcgactaatcctcgaatagtagttggagcaggccgttgtctatccagttatcatctccccagaattcacctagattcatctacaaaaggaggaagatagagaggcgaggaaccgaacaggtttaaaatgctttttcaagaaaaataatctaaatactccaaccagataggagaaaagggatctaatttggaaaaattcatccttttgacaagactcctgagaaagagaaatttaagggtcttaagaaccccataagatcagaagagccaaatataaagacaagataaaaatttcacacataaaaatttgtcacgaatcaagacaacctatacagtcagcattcgagtttatttcgttcaaataaattcaaagacaaagaatctaacagtaagaaattcaataaaatccagcaatagtcatagaacatatataaacagaaatagagaaattcaagaagaaataacttactcattggttcatagtttggttgaaaatcattgatgagatggttattacagggataacaaactcaaatggctcaaaaactacactttctatttgctttgaaaaatttcaaatggctaaaaatatcgtgaatcatcatgttttagtccatttataaagttatcgaggggaataatcatcatcgaattcaaagtatctcatctcccctaaaaagatttgattattataggggtgtgtagccgccagcgcacgatctcccatgtatagtttttaagacagagcatttaaatgccaaaaagtaaagaggcagggaaaaattttaaaccctcgggcatggctaaagtcacgtccaggttggcacgtgggtacatacacgtgtcacctagccgagtggtgtggaaacctttgaagtccctgacgaccagtaatccccacgcggacttggggggcaaatgttatctcaaaattcacactgatgatgtgcactcagcaaggtgacacatggctgacataattgaacttgggaaaagtatatctcccaattataccgatgggttagaatgaagttgaattagtcaaagtctgacccttgacaacaatcatccgagcagagccgagactaagtaaaataccgagtagacttaacatgtcgaacagctctaatggccgaccaaaggcatgcgctgagtgaagatctttcatagatttcttcattaattgtttcctcaaatgtagctcaattaaatatttattttcgtaggattcactgattagactgagataatggtgggatttcagatttaactccttgattttttctctttaatatcaggaattatatttaatatctcctataatttaacaacttatttaatttcacttttcctataaatagtgaaactatttcactattcaggggaccttttttcccattctaaaagagcagacactctgcaaaaatatttgtacacttttcaagagctattcaaaaactcacctggtcgaccttgtgatcttgatagttcttcataataatacaacaaaaaggggagtagactattaccataatcaggggttgaacctctgtaaatattgtgtgttatttattgttcttattctattattaattactttacaaacaaagtcgctttaaaaactttgtgctgttggctaaaagcgaggtcaacaggcttcattgtcaaagcgacagagaaagatggagcgggaaaaattagagacatggtggctcacggtggtcgctggggtcaggtgagaaagagtggaggcggtcgagtgggttggtgggtgagagcttgggtcaaacggagatggaaggggccaagttgagattaagtggggtggttctagagttgaggctaggaggaagaagacgaaggggaagggtcgtctgatcgatatttgagatttgagtttattttttggtgggaaatgagggaaataagttatgaagtttaatatttggggttataattagcgtcggttagcaataaatgttcaccactttagcatcggtggaaacgcataggtggtttgcgtcaaatgctaactaacgcaaaatgtgtgtgtgtgaatatatatcaaattttatttttagcgttagtttttattttagtgtaagaggtagaactgacacaaataataattaatttgcattggtaagcaaaagagcgatggttgacttttacgtcagtcaactagtttgaagagacgcgttgaccaacgcaaaaagtcatttttgtaatagtgcatgcttggctgaaactcaacataaatactgcctatgatattgcaaacaacaagataggcataagtacaattgtgggagatagtttaggtactgttgtagctgccttatctaaaccaattgtcgggaatttgagaccagtggcggacccaatgaaggataaggtggggctcttgcctatgctcatttttttttcttaatgtaaacaaaagaataaatttaattatgtagaatagaatagatgttcgcccttcgaaataaacatatatagttacatttgtgtattatattactgttatattttgctcgtgcttgaatcaaatcctaggtttgtgagtatttgcggccacaagaaatggaaactaaagcaattttcggtattctttgttgggcttctcaaattgagcttctttcacttatgttgaaactgatgcactcttagttttaacaccgatcaatacaccttttattgttatttcttcttgtaatgatttaatagcagatgttataagtctcttattctctttcttttaagtcgttgtttctcatgttcgcagagacgctaatagtgatgctcatgacaaagcatgttttagagttggatagtaattttatttggttggaggaaatacattccccaatcttttatgttattgttattgtaaacgaatctttttaatttatgatcacagatctttttctgaaaaaaaaaaaatgaaggtgcatgagtgactgtgatatacgaaaattaaagttagtaactttaagcagcgtgtaagtggagcgtatacattactaccaacaaaatagggagcgcatgctacattcagtaaccgctctctattttctttcctgcataaagggtaaaaagaaaaatgggaaagatattaattatcttttctggtcaaagctatgaatgtgaagaaggtacacatgtcccaagtcactttaaacagaattagccaaaatgttacagctagctttagacccaaagaatttttatataataataaatatgctgctcttgagaatagaattaataaagaggcgaaaataaaatgaaattgaataatggagatttttaaccaagttattttagattttaaaccggcctgttgtataaatggaagatatcttctaggtattattaggactttctgaactgttgactccagcttctgtctctgtggaagcatgttgctgactctgtgaatctgccaagtagacaccaaaattcaatttccttacatatttataaattctttttcgttaattaccaaaacattgtggggtctatattaattaataatatatagaaaaagtaacttcttaagaaccattgtttaggttcatctagaaatccaatacatatttatacatatcattattattatgattaacaaatatatacctaaatgataaatattgtcaattcttaaacttttttagtataagtacttgttgatgtgtttttcaatcaattacgcattaatgttatcgatcgcatcatgttcacttttttttttttttgttgtttccttctctctgttaataattttcactaccaaaatcaatgataacaaactatcatgacattgcgggaagaaatatataatagataattataaatgatgatcaacaagcaggccggtatgagaatttaagattattgagaaatgtcaaatggttagttagatggtcctgcgtgtttttattacacatgcatcatcactatcatgatcagttcagttctgccacacaccatgtttccacatattaaattcttaacttaaccttagaacaatatatttacatgctgtaaactgtctcaagaaaagtaagcttgtatagctctagaaaaaagtggtataatctatatatcacctcatgttctaatttagagaacaattaaataccaaaagtcacatgcatttttagttgttccttgctattattaggagtagtgtgaaaacatgatgagattttatatgtttttagtgtcattgaataattaattgaaactaaggcgtttggttgggaggaatggaaatataggaataggaatggga

SEQ ID NO: 295597 - DNA, 1857 bp, Cannabis indica
ttcagcgaaagtggatcgaacaattgatggcggtgattcacggtgacgattgaggttgaaaggtccaagaatttttcttcattatgtaatttttatagattaacttgtagttagatttattaacttattaatatttttaactaattttacattagtgtttgtgtaatatttaattacttttatgaaattaaattatgtattttacccaaatttaaataatatttaatttacattttaaaaaataaatatgtaatttaaattaaataaaataatatataaattaataaatatataattaaaatgtaattaaaattatataattaaattaaaaaaaaaattgaaaaaactgaaaatcgcttgcttttggcgtcggttggtacgccccctatggcgtcggttattagctaataaccgacgccataggggtacatatggcgtcggttcatataaaccctttagcgtcgccctgatcagcgtcggtagcgaatttcgcgaaaaccgacgctgaaagggcttaaaaaccgcctctaaagggagtttttgtagtagtgataatttaattattttattattttaatacttaaatatatataattatttactttttcttctttaaagtgttatttaattattaatttttttttttaaaaatagtgtggtttagcatcccactaaatttggtgggacactgtagacaaagtcatttatgaggataggtttagtgtcccatgagagtaaatataatgtgaaactacactatatttggtgttttagtgtcccattggagatgaccttattggagaaatatgagctcttctggttttcaaactcctatattattctacatataggctctcattaggtcatgactaaaattttttatcagaataaaataatagaacttgaaatttttgtcactgaaagatctaaattctaattctatcaaaattattaataattaaataatgcaattaaatcgtcttttttcaaacaattaattagttaattaaaaaaataaattgagctaaaaatccccatagtggccgaaattcacttatgagacttggatttttctcttcaattttcaagcccattagacttatcatcttttttattataacaaaattaattaaatttgatgaattcaaaaactagttctataatttaataaaaattaaatcctaatttaaatatatttattaatttaatctttaaaattttataattaataaattaccttttacttctctttccttctatattttcacaactaatcagaaaattctcaaaatttaccaagtcaaccttgtgaattttaattgataattaaatcaattaattgaagacttctagttgatattatcctaaataatgtgaggaccataaacttataaaattaagctctcaatatataaatataaaatttaacaaataagtttcttaatttatttgtcatataaggctctatacattaaatataaatacaatatgaattatttattgtttcaataaaaattattaatgatcaataatagacaatctacaatgattccttaaatgtttgccttgcattagatttatttgttttacttaatgatttatctttggcttaatacaactagagacggaaatttatacagcggggatgggtaactgcggggacccgcttctaatggggtgggaattccccatcttggtggttaatggggtggtggtgggggacaatttcaatatccgaagcggggatggggcaggggcggggataatactatccgcaccatatccgaccctgatatagatatatataattttttttgtttttttttcaaacttttgagacatatttagtttttattt

SEQ ID NO: 295598 - DNA, 2855 bp, Cannabis indica
aaaatctaatagtcatttaatcaaaatgatagaaaaatcatttcattgaattgattttctaatatacaatccaaccaaacgaagaaataaaataaaattgtttttttcccattctattttattacatctaaccaaacactacgtaaatatagtgactaaacttagttactatgacgaaaatttagaaaatagaaagaggattattataaaataccttagggtgccaaacaccttcatgacatattattgtagtttacagttaagagggaactagaggtagagtttacagttaaaatgttagttgaaatgaagagaagacatgtttattggaaaattccaaaaggattgtccccttccattacaaaacgacaatgtgctctctccattggactccaaactagggccaatactaccatcaaaggaaatcatatcaaagctatcgttcttatcctgcccaagcttcttctcatcatcctccactctttcttcgttctcaacacacaaattcttctcaaccagctccctgaatattgatgacttgaacaggagtccaagagctgttggagaagcagtgctgctgctgcaaggacttatggctgcttgtcgtttcgaggtttctatgtcatttactacaaatgggttgttgaaatggaataatgatgaactctctgctctttcatttctttcaatgaggtaaggctgagacttggagtttgcagttagaggattttgttcttcagctccagcagaatttgatactggtctaagccatcttatgtaagtgctcaagtcaaagtttgtcactgcattaatgcctctatattctattgctgcaatgtcataagcatgggcagcctcctcttgagtgcctgtaacgattattgtaataaaagagattagtcttcttatctacttggacttcttcaatgatacatgggactaattaaactcactataagtgcccagataaagatatttgtttccaaacactcttcctatccttgcttcccatcttccattatgatggtgcctacaattcattcaagaattcaaccttaaatgaaatttcattactaaatagtctacaataaataacaactttgaaggtaataaaatttaagtaccttgcaactcctctgtacttggatacacctcttgaaaagccactacttcttctttatacatggaagaaaagaactataagtttagagctcattaggagaatttaaagtccataaatgtgcagctgataccttcttaaagaggccaagtactcttcttttgtaacgttttgcattatctctatttctgtctcgtactctgacacctgcagagaaacattcatcaaaaaagacttaacataaagaaatcaaagttgatatggctacttttttgttcaaaaagtgcttcaagagctcccccattttcatgctctattatctcaacttactggaaaattggtaaaagttgttggtccccagtacttaactgctgctaaatcataagctctggcagcagattcttctacatcataagctcctgtttagtttaccgatccattaagttgttagtttccccaataattatgatttatcatcttttgcaagtaaaaatggccttgataagctacaaattacttacccaaataaactgctccattaccatccaatgcgtttacagttagcaacaaagaaacattgattagaatcagtaaagataattgatagatacgagtaaaagtgtcagcataatttagaaatagaaccttgctttcccttcttcctttgagttggattccagaaccctttgtcccataaatgagcctcatacctacctgtccatctatgcctgcattataatgtttctttaattcatttactcaatccaaatcaactaataacgttccacatttccatacttaaaaaaaagtacatggagttatgtctgtttgccaaacctgctgacaccgcgaaatctggagcttcgtttgacagtagtagtagtagtagtagtagtagaggtagttgctgctgttattggtacatattgatcaacatgctgatgaccttgttgatctatgtaggtttgtgaaacagaagtagaatctctccttcgtctctttacacacttagtagccatgacattactattatggccttcaaacaagcacatatgctgttttcctgggcacattttagatttcactgtcatttccatctcttctagtctttttttaagtttcctttattgcaatgcaaaacagcaaaagacaaatggttgataagtgatttgttgttgtcgttggttgcttaagactcattttaactagtcctttataagcaacctctcaattttgttcctttttgctattacgatggtcacaatacattatgagacaaatgtttctatgtccttaccctaatagacagccaagcagaatctccccatacaattcaaggtctgttattactataatcaaaaatgacatcatcagttaatcggtaaaatcaagggtactaatactagacaaaattattagtatcaagcttgcagttttgagttgttgactgcaaaactttacatttacatattattttattttattatgtttgggaagtaaacaaaaacgcggagaaaaaataatttatgtgtatgtaacatacaattgttaagtcgtatggggtatgtttggttgaggtaatgtaggaaatgtttttttttcttatttgaaagtcttggaatatttttcaataaatatttttaccatttaagatgactattctatttaaaataagaggaaagataattctaataataaaaaataaaaaataaaaataaaataaaataatcatatt

SEQ ID NO: 295599 - DNA, 7120 bp, Cannabis indica
taaaatagaagaagcttagaaaatatcgaaggaatagatgaaaaaaaagataaaaagataaaataaaagataattgtatcgaaatgggggtcatgcctagacatggaaaccttatgccgcgacacgtgtcaatggaaccctggggacgtgagaaatgtcatacacgggtcgcgacataagaagtgcatgtcgcgactcgcccatctaattcaaggcaaattatgagttttcaacgtggggttatcttttctatcttttttacctattggctataaaagaagtggagttcagttattttgagaagcagttcagaaggaaatcagaagcactcaagggagtacgaattttggagatcaaattcaatactagaggtgtttttaagagagttttcaacattctttttctctctatttcttctatgtattctatttcattcgtacttgatttcttttaattgtctggccatcaattaattatttatgattttgatacaaaatttgagaagtaagtgccaattatgttatagtgaaatagaaccaaattttgatataggacgactacctatatggtttggataacttatagggtttctgtgtttaatgtcttttacatatttaatttatagaaaatttacatgtaattgaggtttatatatttgagaagactataaattaccatagtaaacctgatattgcatagaattttgtaatatgaatagaatcatgttaaaccataatcaatagaagcaattgaaatcgaaagccctaacttttatttatcgttaatttccttattaatttacttgcttcttattttcactgtttttattgttttctaatattaattttctcttaaattttatataactaaataaaagtaaagatttaattttaaagtacttaattacaatccttgtgagatcggtctcactctttgtgagtctataacttattaacgatatgtatatttacgtgttgaaaataccacaacaattggacataatattactactctatttaacaaagaatatgtcacttggaaaaattggtatgctcattgcctaatgaagtaagcaaagaattcaatgaagaccctttactacaacaagttgctagggaaagcacctatagcctgctttattcttggtttggtaagcaccctaactaggtttcaaccacataaataaaatcacaatttcaaactttcggccacatatttccttctgtatatctataaaataatattatattttgagggaagggatgcctctaataatttatttttgaactatattctgattcttcttcctgaagatgcttataatgagtagtaatatttttaaaatatatatatatttatatgaaagcaagaaaaagaaaagtgtgtaatctctacctcttactattagccacaccgaaagagaattttgaaaggaacttcagtaaggtttattaaggcctatttgtagaagtgggttggattctctacgctgcttcagtggcccagggagagatctgagaataatctgttgtggggtttaatgttagttagataataagaattttgaaggtcggaaagtaaagatgcatcatattctaaactttcttattactaattacatttactgaaattactttaataatgctttaatactttactgagacacctgagacctcaatattattcgaattttatacactaggtttacaaccttccaagtaaaaaagtttttttgactgatgaattttgaccattcattgatttggtttggactatacaccacaataaccattcagaattgtcaactccgaatacatcactagcatggagtccagtccaagttacgtaatatttaagactctcaactaagtccttgacttactgttcacatgataacaaataagacgtattacttacctattgatgtcatatataatattagtaaaaaaagaaaaatataatagaaagaactatctaacaaatacattaattgtccacatagtagccagattttattattaatttgatcctaccagccataacatctccacattacacactgctatacataaaacagtgaataagtaatgactaggaaataagggaattttagattttaatacaacaaagcatggtttaatttgatgctagtaagaatagttcaaatatctgtttctattaccacaaattcaagagaccaatagacattcttgtctacttggttctgaattagtctagagatgcatgcttagtataactcaggccaaagccaaatggatataaagggtcatgtgaattttctttggtgtgcattggtagatgttcaaccgctttgaaccacgtcactggtagttttcccgtgaagtcgaagtcaccaaagatgacatctgcaatgccaccaccttcactgccaggcaaccaagcagcaacaagtgcatctgtcttctccaagagctctggctctaacactaaaggccttccggatacgatgattgccaatgtgggaattttgtcagcaactgagcatatgacttcagttccgttgaagggaattttaaggtttgaattgtccccggtaaattctgcatatggttcttccccaacaacaacaatagcaaaagagatgtcttgtcgtgataatgtttctggtgatggctttggttcgtagattacttctgcattgtctcccactgcttctttaatagcttccaagatggtcgttcctagttcaattgcaaaagcagaattagtttaaaaagcattctctctaaagacaagactttaaattgaacttttttttatattttgtctttcttaattacaaacaaagctagagattaactatatgactaaaacattactgtactttgtgttgcaatgcagacaaataacatgaaacgaccataagttttattgaaatatcaatgtatttataatactaatttgaatgttgtatgcaaggattagctacatagtagatacattataaatgcagcatacttttgatttttcatgttataaaataggaaaagcataccaattgtaatcctgccactacttccgttccaaagaatagtccaccctccacactgatatccaagatcatcagcatgacttcctgttacgaaaattcttttagcgtttctgtctaatggaagtaagggcttctctagattcttcccatttttcaacagaaccaaggacttgcgaactgcttctcgcgctagatctctgtgtgcctgcaaaataactacaaataattaatatgacatactctagctagagttacaaactataaggaatcagatgcaaatgaggaggggtaatctaaatgaagataatcaaacagactaaacagtgttttaaataagtaataatacgaagtaagttcgtaacaacttcataactgttgattaggatatttgacactcttatcaaatgcttaagagcataaacactaacaccatctaaaaatgtacattttcaaaaggaatgatataactcacactagtgaaaactaatcagaaactaaggcagaagtatttttgtgggatgcatggtatgatgagatcgatagatttaccttgcaacccacagtatctagcaaaggtctgtcactgaaggggtgttcaaatagaccagcaacaaacttcactctcagtattcgttcaacagcatcatcaattctggccattggaatattcccagataccaccagaaatttcaaaatctctacaaatcttttgtaatcaaaaggcaccatcacctgcatactcattcaatgagactagcaaaacctaaattacgggacagactttagatgaacatgtggcaccagttgggggcgaactcaacaatttcataataaataaatagaggagatttaggctcttaagacttgttaatgcatactcattcgctaagactagcaaacctaaaataaggaacatattttggcagaacctgatgtgacagttggtggcgaactaaacaatttcaaaataaataaatggagtttaggctccttagatttttaatttcattctaccatgtctactcctgcattaatagcaagagaaacacaacctcgatagtctgagtcacgaggttggataagtctgtcaattccttcccagtcagaaatcacaaaaccctgcaacaatttgtaagagatttataagttagagtgttctggtgttacaatgcatatacggtgaaggttgttttattcaatattatcataaccttatgagcagggatgtttaccttgaaacctagcttatccttcaaaatatcagtcaggagataacgatcaccatgcaatttacgtccattccagctagaataggatgccataacagtggaaactccctgagaaatacagtccaaataaggttccatgtgaatcctctctaactcatcatatggtagtaaagtgttcccctcatttacacctttgtcagtacccccatctccaacaaaatgtttggcacatgcaataacattgtttctggaaccaaataagtaatattgttaagagacatattcagcatactgtatgaatagggacttggaatccaaaagaaaaatgaaaagctgactgcagagtctgatatttgaactccaacatgaataatggaattattaataaaataaaaatggataactcaattgattgaaactaggatgactaaagaattactaaaatacctaaataccaaataaaaacaaggagccattgtgttatgccgtaaaaaaaaatatgaataaaagacaatggcttcttcccaccttccagccacaaaggggtagcctttagggtggccttggggtggctgtccctgcaagcctgtaatgattgatgtcatcttccgtacaatcgctgtgtcttcactgtaactctcatagcatcttccccatcgagggtctctgcatacctgtcataataatattcgcaagagagaggtggcccattaaaaatagccacgaggatagtcatctgatactcaattctcatcagtcattatcatctaagaaactcatcattcttttacactgaactatcaatttgagaaataaaaagaaacaagagataagaaatgtacaagtttgccatcatagcagaaaataagtaaaaccacattgtacttccgtgattcgtatattgaaataagagtatagcggcactacctagttttataatattaaactccatacttaattgtactaatagtcatataatatcttaggtggctctaagtattagtggtgtcttttagtatttcttttgaaaaaattattgaaaacagaaccaaccatgcatccgatactgtacttgtcaaaaacaaaagtttttctcagaggcaaatttccttaaaatttgcttctttaaagtaaatcttgctccctcctactctaacgaaataagttggataacagtgattagtatgtctgtaatgaaaacttacagccacacaaggagcaaaagtatagtggatgccacttgctctgacttccagtgctgttgcggtaccaatctttaatgccaattctgcatccctatccccaatttaaacataagacacaaaaaaatctgacaaaagttcacactcttcattctacagtattttgttttaaatgtgtgtataagataaagttagtttgcctacttatttttagtattaacactaaactttttttttttacaaattcaattgagtggagtagtgtgtaatttcaatgtcaacgtcttttagtaaaatgcacatataaaagacagggaacttatgtacccacttagtaatgccactgttattcttttttcatatatataaaagacagggaagaagtgacaaaatggtaaaacttgacttttccaatttagttctcttctccctcagttagagaaacatgtttcatttactgtaatttagtacccgaaacttgaataatggttttctttactcatccaactatttatattataaaaaaaattattcatacttttctttaatatcattagtagtccgaggaatttgctttaaagaatctctccataatcttctctatgagggggctcaacatactaatcaataataaataggcatagagccaacaaattaaaatcaaaagatactaaaatggagtgttaaaccaacctggtagctccaagaccaacgttatgaggaaacactgtggcgccataaacgttgttgttaccatgaaccgcatctgacccatatacgatgggcacaccaagctcagaatccagtgccaacttctggaacccatcaatcatatcagcccagtccgacgataatgccttttcaaaaggcgcactgccaccggaattaagtacactccctgcaaatatagaatataattattattattatgtacatgtatatttaattgatcaagaaagaacttcaataatcaaacaaagcaagatacaaaacaaaggcacaacgcctcaatattacataaaaattaggtacatatatttttttgtaatcataatttaactaaattttaaaaacgaggagatgaaaatgatttataccaatggcgtaatctctcatggcctctggagtgacaaccttacgctcgatctgggtcatctggccgattttctgatccagagtcattctggataaaaggtctctgactcgagcttcaatgggtgcgctcggattcttgtataagcagctcaattcctccattttcgctaatgtttccgaaggagagagtggattcctacaggtaagttgtaactatagtccctgtagtactacgatacctgtagactatttctgttgactttagatttattatcttaatctaagataaactccttgtaacaatggtcattgggtacttctaaactactcctcccaaaatagttgatatcgtattcgtacacccctcatcgatttttgtcgattattacctcttcataattgtgcatggatatagtcatttaataccacttgcaatttctttttttaaaaaaattaattgtatattaaaaatataatatattattatttaaaatttaggtggcgtttggtaatacttttttaatcagttttttatttttaaaagtagaaaagtgaaaata

SEQ ID NO: 295600 - DNA, 7729 bp, Cannabis indica
tttttattgattttgtttgtgattttagtgttaaaaatagattttgttagatttaggaatagatttagattttaaaatctcaaatctgtaattttggacaaggtccgatgagatttgatagggtcgaatgcaaatatatataaatatatatatatattactttgaagtgtaaaactaaaaaatctctttatataataattttataaaatatcatcaaccatttgcaagacgcgctattttatggtactgctaagcactactgatgtctaatacaacaacatctaacaccacctaaatctataaataaaaacatatgatttattagtttacatctattactttaattaatatgtcttaaagagttattctcactttaaacctttgtttaagaatgtaaaatagaagcatagcaacatgttcccactggtcttatataaaagtcatcgtcaaccttgaaatatataggaagctctccattgtggtcaattattaaagtgatttgaagtgtgtttaacatgtacatatattagtgaagtgaccttgaaatgagaatgtttttaataataaaattaaataaaaatctatacgaaaatgtttggtaggagtataatttttatttcaccagtctctattttatatggtgttgtgcattttaattataggaggcattccataagttttttaaaaaaattgaataatctattttatttctatttttttaaaaaaattattaaataatttatattgtcaaaaaaattaaatttgtattttttagtatggtctgaggaccatgctgaaaaacgatagtctgagtgactgatgttgaggaatggtttagggttgttgtttgaattaatagctacgagaggtttttttggggctgttaaggatattgttaacataattgacgagtaggctgagagtagatccaatggatgaatgaaaggaaaatgatgaggttgctactaacttttgtcaaaaattactggtaagaaggcttaattcaagaagcgagataatgaaaagttattaatgataatatttggaaggatgtggaaggggatcatagggtggagtgcttgaagagaaaggtgagccatcatatgtgggggtgcattttactacttgaatggatgctaagaatgttcttgcaaagaaaccatgaatcttcaatggagacttactcatgttggaagagtggccagaaatagttcaatggagtgatgcaaaacttgaaaaactgtagtgttgggttaagatgaaagacttcgcaattaaagcttttactaagaataacgttcaacgatttggtgaaatggcaggggaaatggctgaactcatatggggacaagaacaaaagatgtttattaatgggtatgtccgtctaaagaaaggttttcctctacaaaaaagtatttttataggacaatttataccaaatagagggaaataacattgggttcatgaacaaaaagattgtcataatgaaaatgaaatggttttgcaaagaagtttaaatggttaaaatgtacctaaatatggatcatggctctaagaggaagatccaatacccaattgttttatggctcatcaccaagatcaattacgaattcagaaaattgaagatgcagagaactagggggtgagatattgagaggtgatgaagcaacagaggaggccgaacgtcgcacggtggtgctccgatggcttcaaagataatcgctaaaatgattgagatgattgagataaataacgaggtggaaactaaagttttaaaactgttaattaattcaatatacattattatcagaatttcgggaacgtgtttatcactacaaataaagaattatttttgtataaacttcaatgaaattgaaggtttttttctttggaaatagttaaagttgaatgaagtaatgcaactcaaattatttaccacaaataccaaaataaaacaagtcaaatttttcaaggcatattgagcaaacatttatctactaattcagggactatgtattcactattgaggactaaaatggagtaagagttcaacaaaaggatattctgaaacaagtcccacaataacaagacaacaccaccataaacatagtcccaattcctctcaactattaagctatatatatatattcggtagtaaaaaggtaccatagctcaatctttagatgaaaagttacatatatttatgtttaaagagtaaaaaaggaccatacttgaatcagaggaaagtgccaagctttgtaacaaaatgtacttggctctatttatctgggtagcaagaaaaagagaaggcattagtaactcgtatcaacaaaatttgaaagtcaaacatattattcaaatgaaaaaaagttaacataaccttgtactgaaatcaagcttggtggctatttctgtggcttcttccacagcaccccaattttctttagcatgtttccatttttcttcttgagataatcatcatccatatcttccgagtataatgagttgattttcccaccacctggactgaaactactgtctaatgatccagttctttccatgaatttcccattatttccacccgaaagcatggaagcagccgcctctgcggcttttctccactggtcggattgtacctttagccttcttaactctgcttccatttccgcatttgctgcttgtgctgcatctagctgctcggttacccttgcagccctcttgctgctcttatctgcctcttccattactaaaccgagcttcgataaagcttctctctcagaagacctagctgcctctacttctgcaacaccatttttagtattctccactttactctttttgatttctaccttcaacatttcattctcttctgctatactctgcaattctgtctccttgtccattaaatttgcctttaaatttgctaagtgttccttcaagacctttaattccttttctagcttatattctctttggctggacaaacttttctcaagctttgaattaagcccatcattctcttctataataccttgcaattcagtttctttgtccatcaaattagctttcagttcctcaatgtcaactctggttttctttagttcagattcgagcttggcctctttaagagtagaaccagattttatctgctccatcagttcataagcacttgttatttgagctgtgcttctaacttgttcttcacatttagcctcggcggtttcaagggcagatcttaaccgtcctacttctgacctcagataactaagctcttcctcatattcacttgaaggaatcaaaggcaggttgttgctactaccattatcgaggcctgcattgagcttactcacgagtccttctaggaagctaacacgagctcttgaccgttccaactctgaagcaatagagtcgtaagattcaatggctttcataccatctaacctgagagactcaacagtcttttttgcagtctccagctgctgcagagtttcactaaccacttcttgagcttgagtttcggattctttacaatcttttaactgatttttcatgttttccacaagacaaagcgtctctgctaaattttcttttaggctctgaagttcttcatttactgattctgcatgttttgtttgttcagcctcagatgcagccaccgtttcaagctgaaccttaaggcactgaatctcattattggccgatgctaaggcagttgaatcgactgaatgctgcttctgaatagcttcaagctcagatttccatgcttcatcccgttcttgtgaaatcttttggagctcaacaagatgagtttcctcagaaatagatagctcccgaagctgctgctgagactcttcaagctttgaagataaggccagcaattgcttcttagagtcctcagcatcaagctgagcctgtttctttcctgattcagaagaacacagttgctcccttgctttcttcaagtcttcctgaagttgagaaatctgagattctaactcggttattctatttgggcgccttttctggatcaacagtagaataagaatcattaacatgttataatcaggtaaaagtggatcttcatggtagtaaacagacatttgtactagcaaattctgaaactactacaaacaaatttattacataaacttgaagctatacatgtattttaaaatgctgaaatgagattagacatttgagctgagatgagaaatacaatgagagacttatggttattcaaatttttcactagttgacctgatgatatgtttttgcagaaatgtaacacataagattataatatctaacataacaagagtctcaggacaaaactattcgtctcaatgatccattagtttttgacaagaaaacaaagttcatgcaaacgatttcaaatacctcaggaactgggcttcttggagacttgcgctcaattactttagggcttctttcttttggcgttctaatagtttggttagaggaggatgttgaattattctctaacaaagttggcttcggttgacgtggagtacgaggagaaaccctctgagacacctcagaagtgccacttctggaataaagaacagggaaaaagatattaggttcgtaggcattaaaatgcacccacaaaatatatatacagtacaggattatataaattgcgggtacaatatttcaaatctagaaaatgttcctttgaattgatacatattgagccagaatcttcgttgtaattaatatcaaaattcaagccacaaaagttgtaagttaattcgttgtaaaggagtagtgtgttatacagaaacttcataattgatgagatttaaaaggcatgaagataggaaagtcgataattttcacactataaactttaacaataacgatgagttcgagagaaagaatcctgtattgaaaaactgtttcttatacaaactgcagctataaataggaatgagctaaaggacaaggtaacaacaaaactgaaatctaactgaacaaccgagtaaaacctatctaacaaaaaaactaacacacaacagattggttacattacgtaactagaatattctaactccacttctagtaactagaagaatatgtataataaacgataaaatgtccaatatatagactccattacatggtatttctgcaattcagggtgaaaatgtataaataaatgcatcccccctgttcatccaaatagattgatcgggttacttggaatttctacttaataaataaatatgtaaatcaattgacattaaactatagttatctaaaaaactattaccaggtgagagaaataagttaaaaagcttcgacaaaaataccataatgacagtaagatgataacgacgttgctacgcactgcggtactattaaataccatgttacatataacagtaagataacctataacaaaactaataagtcgtcagtcataaacctggaattaaagtaatatgatatatagcttatacagtccaagaaagaagccccattaatttaatttggtagaacagtgggtagcacacccacaatttacaagagggtcttgcatagggaagacttaaaaacagaagatgacaaataaaaggatttttgccaacaaggcttaccacatataggccttgagtataagctataaagtgaaagtttcacaagttattggtaatttagtagaacagggggtagcacacccacaatttacaagagggtcgtgcatagggaagacttaaaaacagaagatgacaaataaaaggattttcgccaacaaggcttactacatataggctttgagtataagctaaaaagtgaaagtttcacaagttattggtaactgaagtacacaggacatgtatggacgtttcaagcaaaaaccaaagccagtaatactctaatgccaaatgcgaagggttaagggttgagtctaatagacttaaaggattcaacaacaaaaattgtaaaactatatagagaagaacgatcaagttccaccgacagtagagaattgagaaccgtcaccgcactcctttagtgcaccacaaataataaatagtacatgatgataaacaaatataagaaagttgcaatctgctttacatgaccataatcacatattgcaatatatatatattatgtatagatgaccattttaagggaagagagctaaaatggaaaagtttgtgaggttataccttgcttttgtggtctgcataattttcctattcacccacaaacgaagatgatgggttaattttaagcttcagttacttttgtgaaatgctacctgacccacaatccctgatgaaacgttctgaaaaatcacaaactgagacagtgggatccaatgtgtgataatacgtgaagcaataaataggtttcatgaaggacacatgtgctccttccttatcgtcacataaggaagccattatggcaaaagatatataccaacgtaaaaggatttattgatttgtgattaaattcaaaaagaaaatgaatgctttgcaagttgctaaagacagagaacctacagtaacactacagtgttccaggtcaaggctcattattgaggtaatcaaatcacagcagcaagcaaacagagacttaaatttctaaattacaattatacccctttaccccacagacaatctttaaatattaaatgctccgtgaatggagggaaaaatttcctcctccagttttgccgtgaaaggttgaaaactagtccaccggttattttaatagtaggattaggaattttgagaagcacaacaaggttttttttcctaaccactatgcctttctaggtcattaagtcaaataaccgttacaaaatgacaatatagtccttagtgtaacaagaaaaacaattgctaaaattttctcgagaaaaactttccctccaaacaaacagaagtacagaagcaaaatatcattaaaatgtggttttctctcttcgtagaaaagtaatttttaaatcagaaaacaacaaaagactgttatcattattactctaacacgaaacgaaccttttcgagattcgatttgcctttacacaaaaaagcctgtgaaacacgaaaaaagccagtaaccttcaactccaagctctctgagaacgaaaacaaagctacattataaatatattattattacttaatttcatccgaaaagttcttcaaaataaacaccattacgttcgcaaaagaactacgcagaaaacaacgataaaacagttttccatagacactcaaaacctaacgaaacaatgttaatgtaagtagaattcggaatcggttactcaccagaaaagaagtagcagtagcagacatgaatgtggaggaaaaggaagcttagtggtggcttctggtctcagtttccgagtattctctgtgtctctgtattcttcttctctctctctctctctctagaaaaatgaaagagacgagaaagaaagtccagtggtaaaagacgaagaggaagagagagagagtgtgttgattttgttgtcgttttccgaaacggaatgaaaatttattattaaccgtttttaaatgggattttacgtccgaaatgggttttatcatcttatccgtttcttttattatcagttttttcaattttcgatacatgttgtctctcaacgtatttcacttttaccaataaatatattaacacgccaacatattgcattgaatttatttattttatttttttaagaaaaaaa

SEQ ID NO: 295601 - DNA, 1363 bp, Cannabis indica
aattgggacttgcttgatttttttataacaaattagaggttattcttgaatagagtattcttaaatagagtttctactgtatctcactataactagacctgatctagcctacacagtgaacaagctcagccaatttttggtcactcatagaatgaatcacatggatcctgctttaagaactcttcagtatgtcaaagggacccctggacaaggccttttttatctagcagattcaaagatccaccttgaggcatacacaaatgctgattgggcagtatgtgttgacacgagaagatcaacaacagagttttgtgtgttccttgggagatcattggtgtcttggaaaagcaaacagaagcacacagtatcaagatcttcaactgaagccgagtacaaagccatgttgaataccacttgtgagctgatatggttggcatccatgttaaaggagctaaacattgatcatgtaggaccaaccatattgcactgtgacaacaaagcagcccaacaaatagcttctaatcctgtctttcacgagacgactaaacacatagcaatcgattgtcacttggtaagagaaaatatccaacaaggagttataaagacagttcatactttcagtaaagaacagataacagatatctgtaccaagacttttcttcctaattaattctaaattctcaaagacaaaatgagaatttgcaacatatatactccaccttaaaggggagcatcaaagttaattagttagtaggatgaagtgtatagttaatagaaaatttgttagagttagttggtatttgttttggttgtgtgaattgtattaaagaatattttgtattgagctccatagatcaatgaaatgactcctcattcctttcgtgctctgtttcttcttttccaaaagtaaaacttatataatcataacacaatgacaaagaaatgaatggtaacaaattagtagaaatttaggtcgcattggttggaggtaatgaaataaaatggaatagaaaagaaataattttattctattcttatgttcggtcgaatttattggattttttttttattattttagtggaatgataattctatttaaaataaaagaaaataccattttaataaaaaataagaagaaatttaacaaatttttttattaatttttgtatacattttaaatttgattctatttctatatttttattctttctaactgaatgtcatttattctttttcattggggtcatgaagtataaaataataggtaaataccattttggatcctatatcttgcaaaagtttcagattgaccttctgttttgtaaaatgacaaatggaccatgtattttttaaaatggtataa

SEQ ID NO: 295602 - DNA, 5331 bp, Cannabis indica
ttactgcattccttttcctttattttttttagttctatccatatccatatccatatccatattatccaaaattaatcttgaggtgagaacttctttgaaaatctccaaaatgacactctactatcaagtggtaaaagaaacaaacaaacgaaaaacactacttcaagggaggaagccactttcttattttttggttcaaatattcagcattcacttctataataatctaaggtttcttcttccccaaccaagaaggccatttctgagaaatgcaaaatagaagaaacgccaagtcttgagccaaatcacacacttaaacactcacacacacaacaacttacttaccccaggctcaaaaagtacataacactatcatcaagtgagcttgaattctaatcatatggctcataacactaacaagtgaacttgaatttgagaaggtcccataaaacaattaaaaccaattggcctcaataactaatggtctaatttcaaaaaggattgttcaggcagctttggaagggacaatgtggcctagtcttttgctttaacatataacaatgaatttgttaacgttagtggctgatatcaaattgtccacaataactgaatcaatagaatcctttcaacaaagattgtgcttaaacaccctaaagaaggggaaagcttcagcactgagtttcatagctaaataagatataatcaaatataaattcaagtttcagccttcaatttctctagaatataaagcttatattcctcagcaaatcagctttaaggtaaaaaagaaaaaaaaaaacaagagcaattacaaactgatgaaaagagagctgccatacaatttgacataaaagagtgccagaatatacacaattattcaccaataataatagacatatatatatagccttaacgaaatcaccaacacttcttagcttctaaaacgaacaccaaattcaatacactattgaggcgttaagcaaatcaaacaaccaaaaatcaagaaaagaggagttgaaaaagtaactaccgatttttggttttcccgagagaattcaatcactaccatccataaaccactctgctacacctttccttgagccacctgaagctcttcctcaaagaccctttgactttcccttccactgtgtagactttatagctagcgacccttttcttcctctgcaactctggatcattaaaactccaacttttggagactgacccatttgtggacttgcccttcttgaactttccctcgttcccaatcccaacttgggattgggattgagcttgggttgggtggactgaggctgcgtacgaagcactgtaacacctgagatcttgcataccactgaccccagacgaggtggggcccgttcccgttcccccagtcccgtagtaactctccatctgcatttttccatgccctaatgatctggatctgaaatcttccattgttaagccccccaagctcagagagatgagatttcgagctctctttctctctctctctagaaaggtccacctttactctctttctgtaattggaatagtttaatcaataaaccgttgtggaagtttgacattttcataatagatttatttatgtattatgattggtttcgtacagttaaacattttgagaattaatctgatttaattttattaattagagttgagactaagatagggattgtttatgatgatgatgacgtctgcgtcggtggttctattcacgaagaagcttcttcaaaatttaacaaacaaacaagcaaagaaaagtataagctctatttattattgtctaatctcattattataccatttagaatggtacttgacttgacttcactccagttgaatagaataataatagtttgccgtgacacttaagataaaagagaattttaactatttatggtgacattttaagataaaggagagaagaacattagggggacaagcttgtagattaatcacctaaaaagaaaaggttgataaggactgcatatagagtctaaatatagtggtttgagctctcgttcttgtttctttctctatcaatctcgtggtaaagttgactatggattggacttacttgacatggtagtcaaaagttagtattaggctctccttttaagacctttgattgcggagtgggagtgaatcaacaactctggtttggtgtattattattattttaaatacgataagttcaaacgttttaatgacactacaaattaagtcgacaaaatcatctaattatattgtagatgagtgaaaaaagaaaggcattggcaaatgggtttagaaatctcttaagaaatacgccaatgataacaattatatgaaaaaatatgttgtattttggcctctaaccaagtttgatcatgaaacgtttacaaattacaagctttctccacaatagtaaattagaccagacaagtattaattaaactgaggcctaaaaattgtggtactttttactctcaaagcgttgtatgtgttagtcgactgggtcagaaaaaaatccgctcaagagaaatcgaatagaggaaatgtctgtggaagctcgctgcatcctacatggtcgtagaatttaaacacgctgccacatgagtcgagttgccttgaagaatccatggagttttaagcacatcaatgacaacttacggtatcgagtgatctaaactacggtcagattatacagcagagctccatggttattcatttgtcccttttcggttcatcacatcatggtaatataggagcacacacatcggttgcccgagaatgcagaaaatgaaccagaatatcatatttcccacctggaaattaagttataagcaaatttgtcaagacaatgggttggaatttaagaagtaactcaataaacaactaagtagttttgcttgcaattatgtcttgactacatcagatattgcttggtgcaattactttatggcagagtggctctaaaatcagttaaaattgtaaataggaatatatataaaatgattcctcggaaaaataaacttaccattgagtttctgaacttattttgcaggtaatttgtaatcaataccaagggaacctgggtaaaaagtaccatcattagatcttacattacaactcttatttgctacacaagggacagaaatgaagggaaacaaaacttagtagaagactaaaatagattcaatattgcatagggcctagcaggaacggaaaaatacaatagcgagaaaaagagagagaaaaagaagaagcctgcaaaatggaatatttttttacctgaaacataattccaatgaacgcccataacttgaaaatgtgacagggaactgcaatacataactgaagacaaatgaaacagttatgacatgccagcattagtaaacaatcgaagttgaagagcaagggatgtgacttgtgaggaataaaggaattgaaaaaaagaaaataataatttgctgcagttcaaaattttacagctccctcaggcatattgttcagtttttctccactacatcactaattccctttcccattaagggtgaaataaagaggaaaaaaactaaaggatccttttattgctataaaaaagattatttacaagagcaaaaccattatttggattaatgaaagtgaacaacaatacgtctgagtaaaggcagataaacaatagccatcttgtataataattagacaaatccaaactagagataataacaagttaaagatagagaattgtttagtgatgtagaaattgcaaagggaaagtaatatacctcgtgaaaaacagcagaaactaggaatgcaatcaaaatggcacctccctgaactcaagaaatgggggaaaaaaataaagtaagattatggcaactactactggaaatctcagtacaaagttcaacttgtaaacatataaatcacaagatggcaactaattagacaaactatacaaaatggaaagttaataatttgcatagaaagcaatcacatatgaagcatattactagaatttcaaatatcaagtactctttggaaattggaagacaacaataaatcaaagttgcacgtttatcaatgccatgttagattttcaagcacttagatttgaaaaaggaacatataaactacctttggtattccttttcttatgcatggtaaatagatatggcggaccatccatctatgaacaggctgaaacaaaaaatatccaataagaaatgcaaacgatatacataatcatattacaccaaacagaagacttcaacagtatagactatatattcattaaaaaaaaaaacagtatagactaaattgtgttcacccattccatatcaaccacaatgctagaacacttttgcacttttgaaaccaatcaggcaaatgatttatcacggtggcaatatttagaaaataaaaagaaacaattcaataaaagcaataagttttaataaaaggttaagataaaaactgaattagaataagacacgtaccatattccacattctccaatactgataacagccacagaagagagacatacaaaaaacaaaatacgaacacagttaaaagcttatctctagcgtgggctgctagaacaaacataagaaaaggcataagtcatagacatagaacctacctcctccactgtttttgcattccaccaatccttgtagaattctcgatcaccaaatcgaagaagctcagctagtatgtttaacctacattttcactctgtaagtgtaagtttttctaaagactggttttctttgaaaaattattagcatactacattattggtaagtaaatcttagttctaaaaatagccccacagcccggaacataaacacatagagtatagaagagggcaatataaggaaataaagggtatgctaaagcaaaacatgggaacataccagaggtgaaaaaaacaatagaacatgcagagccacacatataaattaggaactgaaagcttcaaaatcctctctatggcatacaacaggttcccctttagcggatgctgggagttcttcacgataggattaatgtactggagaaacaaaagttagaatatgcataccaaaacagagttttttttttttttgtggggggggaagggggtgaaaattcctgagttacctgttcaatgataaaccccataactcctgtaaaaattatcagtttgacaagttgacgaaagacccaaccctttcgaatgtatgctgtacgaggatagcttggctgtaaagaaaatgcatcatataaaatcaattcaactggaaacaaaaaccaattacaagtagtaaatataca

SEQ ID NO: 295603 - DNA, 1383 bp, Cannabis indica
ggtaaaaaagataattattcatttaaaataaactttatttttacattaggggattccctgccccattaggagatttttcgcctcgtcctcaatgaggaataagcgggaatgagaattaaaatccttaacggggatgtgaacgggggaagcactccccgcaaattctctgccctgtgtgcatccctagccacaagcatgccagaggccccagattcaacgttggaaagtttggagcactcgggcatcccacgcccaggttgactgaactaggcatgaacatttccattaggtttgacctggacttggtcaacccgaacatttgaaaaaacccgctcgatataggtaggttgggtccaatcttgtgccacgaacaggtgagtttcgggttttggttttgataatgatcgggtttgcgggttgactcgatcacttttatttatttatatattacataaccttattatggagtatgtatggactatgacctatagagtatagactttggattttatttacattttattttgagactttatagtttttattatcatgaacatgaagtttgatgaaagatttttggtaattgtttggttttggattgaattttgtattttggattttaaattaatactttttttttaatatatttttctctataggatatagattaaggtgttatgtttaatttcataaataaataaagcaaaataaaataattacataaaattgggttttaaaaaaaaaagagttgaccgggccaacccgcgaacttgccaaaccgcaacacgtgaacgggcgggtacgagttcacttcttttacttgaaacacatgaacccgaaattcgccaatccgacatctggtcaacctgcccaatgtccagcccattattaatttggggcgcctccaaaggctttcctgaagatatttcctgagcattttatatgtctttaaccataatggagatttaagtctttttggataacaaacaaatccatctagtggccaaaaggcctactcagcgtctagattgacttgggcctagtgactagcgcccaagatgacatatggtcaacctgggactcttctaacgacttttctagatatttattttggaaatttttactgttttcattaacaatgaagatataagtggttttaggaagcaaacgaggccatctagaggccagaacacctagtcagtgcccaggttgacatttaacatgttgcatgcggtttcgtcactcaaatgccaattttgttctaggcattcttcatattttggtcccaaatgggggaggagccctcatgttcagattaagatattaaaaagttgttttatagtttgtttaatgttgttttaattgctacaggacttgatttct

SEQ ID NO: 295604 - DNA, 3787 bp, Cannabis indica
acatgttccaaatgtatccaaaaaccctttagtatttcccaattcaccaagatatatgttacccttgaatttgatgatgtttgttgtcttattaaggacaagaacaccaagcaagtacttcttcggggtacagttcatgaaggtctctatcaacttcaagtcactaatccaaagttgaatattcctcccactactacaccagatcactcagccttgagtcccacagccctcaatcacaccacttccagcaatcttgttcttgatacacataaaatatcaaatatatggcattgtaggttaggacacccttctttaaatgtcttaaccaaagttctttctcatatagcacctcaaaccaagtgtaataaagctcttttatgtgatgcttgtcaaataggcaagcaacaccattttagtttcaaaagtactatcaataaaacaacaatgccttttaaattgattttatcagatgtttgggaccctcttttcacacttctaatgatggttaaaaatactatctaagctttgttgatgacttcagaaaatatgtttggcttttttccatgaaaacaaaggctgaaatgaatagcttatttctccaatttaatgcctatgtggaaaggttctttcaaacacaaattaaaagtgtacaaactgatatgggaaaggaatatgagccactgtacaaaatgtttcagtccctaggcatagtaaaaaggaattcttgcccccatactcaccaacaacaaggtagagtagaaagaaaacataggcatgtagtggacataggtctaacccttctagctcaagcacaaatgccattaaatttctggtgggaagcctatacctcagcagcctacataataaatagactccccaaccaaacattagaccatgtttcaccctatgaaaagctattccaccaaaaacctgactataatatgttcaaggtttttgggtgctcttgttttcccatgctaagaccttatgagacacacaaagtctcctttagatcggcaaaatgcttattcattagatattgtctcaactccaaaggctataggtgtttaaatcctagtggtcgtgtgtatgtggctcgaagtgtgaccttcaatgaattagaatttccctaccaaaatctattttccaattctaagtccccctcctctgtccaacaaaattacattgattccaacatatatactgtcccaaccttacccactccacatcaccctcctcctccaccataccaacctccacaagaaaccacatcagacagcaacaccatctctgacagtaacaccacagaaaccacttcccaatcctcatcatcacatcagtcctccacttccaactccaacaaccaacctgtgagtcaaaatgtacatcccctgctcactcgagcaaagatgggaatattcaaacccaaaacatattgcactacaacagaaacagatattaaaccagcaactgttactgctgcccttgcccatcctaagtggaaaaatgccatggatgttgaaaacaatgccttaaaaaggaataacacatgggttctggttcctaaaccacctgatgctcaaataatcagcaacaaatcggcttttcaaattaagtataatgctgacaacattatctccacatacaaagcccgattagtggcaaagggcttccaacaaacacttaggatagagttttttgagacgtacaacccagttgtctaaccatgcacaatcagagtcatttttacccttgctactacttacaattgggagatacaacaaattgacattaacaatgctttcttaaatggagaacttcaagaaagtgtatacatggctcaaccacaagggctcattgatccccaatttccaaatcatgtttgcaaactcaacaaagcaatctatggccttaaacaggctccccgtgcatggtatgacaaactcaaacagttcttactgtccttacactttcagtagtcaaaatctgacactagtttgtttttcagcaacaaccaaggcactctctttttacttttggtctatgttgatgatatattgataactggaggaaacactcagcaaatacagcaggttattcaagctttaaataagcaatttgctctaaaacaattaggccatgtccattattttctgggattcgaagttcaaagagaggccaacactgtatttctcactcagcaaaaatacatcaaggatcttctcatgagaacaaaaatgttggactctaaaccacaatcaactcccatgtgctccaactccaaactcacacatgagtcaggaacatctcttcctaatttcactgaataccgaagcattattggggctcttcaatatctatgtcacacacggccaaacattgcttacgttgtaaattgtctcagccagttcatgaatcaaccgaaaacagaacattggggtgcttgcaaacgtgtgttaagatacctagttggcacaaaacaccttggcttaacattcacaccagcaaaaatccttgaccttcaaggataaacagacgcagactgggccagttgctccatagataggaaatccacctccggctacagcatctttttgggtggcaatctcatcagctggtgttccaaaaagcaacaagttgtttccaagtccagtacagaatccgaatacagggccatggctttagcaacctctgagataatatggctgcaatctttactcgatgaactctcagtcaagctatttcaaactcctattctatggtgtgacaacatgggggctggttcccttgcttcaaatctggtattccatgctaggacaaagcacatagaagtcgacctacattttgtctgtgatcgtgtgctagccaataaattggatgtttgatatgtcgattccacaaactaggttgcagatattttcacaaaaccgcttcgctcatcttcattcagctacttcaggcacaagttgaaacttggtgttcacccgtacaacttgaggggggatattggaatgtatgaagatgactacaccgactttgaagattagttaatcagttaattctgttgtaatctactttatgttagttaaaaagttgttacaaccatttcttgtttctcttgtactctgcacctctattaatataaatatcaaaagttttcctcacaatttagttgagcagcataattcattctctccatctccacttagttcattttcattttctctctacttttctctacaattctagttttcttgctttctttcaccaatccaatccgaatacatggttagagatatttgtcatatataaatgtacttaaaacagtttcagggaaaaaaaaagcacttaaaacataaaacaaaaacgaaggaagtaaaaaaaaaaacgtaatgaaaagcccaagagcagagaattaaagttgatggacgtattagtaacaggctttgatgtcttatgagaccttagaggatgataggtatgggcagcatggcctttttcatggctcgcattgcttccttcccttgtttttttcaacttattttttagtattaacaggacaaaaaatttggaaaacttacaaaaatactagaatttgggttaatttttacaaaaatactgtcaaacagaaatctttttaaaaatactgtgtttttataaaacaccagtaaaacacaaagctgaacaactcaaaacaacagtataacaattaaaaaacactagtagaacactagtgaaaatttaacacagtatcctgcaaaatgaaacttataaaaaaacacagtaa

SEQ ID NO: 295605 - DNA, 5770 bp, Cannabis indica
tatcaaaaataccataaggcttgaaaataataatgaaaaaaattagtttaatatacatatagtggctttgagttgaacattacagatattggacctaaataaatataaaaattagtatttctataatatgcagtgcagtccagtttgaaccgcatattgacaattcaaaaccgcaaactgcaccgcattacgcagtttaggaaaaattcaaatcgcgtccgcaccgcaaagaatttcaaaccgcatttttttgcagtgcaggcaatttgagcagtttgatgaacacccctaattcacacacaagctcacaggctttgggtgcattttatctttctagaaagggctaacgagcctcgtgttaaggtgtttgcattatgtttgagtcacatatatggacacctcatacgcgttgacaacatgagacatgcgagtccctatcgagtcatcgaattgtcgtttggacaagttcattatgtaaagaaacgatctttactcaatagaaggagaaggctacctaatcatcgcatatatcttggtacatgcgcaacttgtataaactcattttggtcctacttattttatactatgcatggcacaatatgtgactagatgctgtcaaggtcgcatcatctcgcgagtttgggtcaagcaaggtcaactctcaaggagtcattaattaacagctcatccatccctcatgaattggatccacgtgtcaatttcataggagactgatctcgagtttctagataaaaaattcgcactgcaacacatgccccctagtttcgcgactgacggctacgtcattaaggaaactattagagagaggtaggcgagtcgctatcatgagatgatgacttttggttgtcttgtcgagggtttcgaaaagtcggctataattattactttatttctttgagatgccatgtcatcaaaaccattcggggtatctgcaggtgtgttttctggagaccattggattgggagaccttaagcattctcttgccacgtgtccatatcccaatgaatgaagaatattactatttaatccccacggatataaacagatcacaactcatttttcccttacccaaaatttcaaactctttagagtattctaaatttttgaattcctgctaattgaaagcaattttgaaggttcgatcatctacaagaatattccagaaagaatcatattgaaggttagtgactttccttcttgtagtaattttcttttccttgagtattcgcgtgcattttgggttttagggatagaaaaatgtatgaaatggataaggtctaatgagagaattaaaaattttaggcagaatatggtttttttttttgaaaaatacgtgcctgaaatttaaatactcgcgggtttccatgctgaactcttgaatacccgcatctttatgatataccattttacatactcgcatttttgaaattgtttaacccaacataactattagacattgtctctgagtttcgactcttaggtcatacgtgaccagttaactttgggattttaatccatatgcactttagtttatatgaaaaactacttgagttctcgaaatggttggagtatcccattaacttaatgttcatgcaattgcataccctttaggatattgggatacgcccaaccatttcttgagacatgtggttagtcttttcttgcgttttgatttgaaatcttattgtccgagtgagaacactttctgttcaaattgcacttgctccacgctgaaaagatcttctatctttcagatgaccgatctatcggatgtacgatttcggagagggggccttcactaacgaatctcataagagtgatagcttcatacccacctcgccatctgaggacgagactcctatggatagggctcgagaaggctcactatctaccgatgagatagatcgcatggtacaagagttagcagaacaagtcaccttagaggtgcaggatagcgaatccatgaagtctgcccaaggtaatttcgcctatccgtgaattgccccaaatgtggaagtcaaagagatgggtggggactttgaattacctgatcgcaaagttgaagatgatgcagagggtgagggcagcaaaatagattcagtggacaatgcccagttagacgagcatttttcttgcgaggacctagtttcgcgggttaaaattttttagaaactaaatttaattcacactgctacctcaaaggccatgtcgatgcagtaacatcatcttctgttcactaaccctgcgatcatctcaactcaaaacattgtagtttcaattttgattcttcgttgcggggtgatgtttccttttcaccctttcgtaaaagccatcttaacgcaatacgatatttctcccttccaatttacccctaacatttatcgcataattctcaaattctatgcgatgtatatggaatacacgcgaggagaatccacagtcgaggattttagctacttttatgatataaaaaagtgtaggtcatgataatggtttctactgctttagaaaatggggcaattctgaaataaatagggcagaagacacggtttaaaatatgggggattggaagttgaagtgattttatgcgtttaagatgctaggggtcaggattgactttaattgttgacctcgtacgttgcataccttcacacttaacctttattcctgctattttacagatgatgacatttatctatgtttgcaggtagactggctcgatctgtactagacaaaagtcgtgtggaaattgttgaagtgttgagtagccttccagttcaagatcacaactggcgtttattgtgtacttctacaaaactgcgagaacacaatttgattccagacaacactaagcttcagcgagaaccaatttataaggagccatctgagaaacaaaaggaaaagatagacaagcatctttcccaacagacctcaagacaagtattaggtaatgtgatttgacgattattgattatgttgtcttaatttctcaaattctcacctttgtgtatctttttgcaaatatgacttttctgaagcaagctccctattttagttgcaagccgaaggtcaatactgcaactccctctactgtaacgcctcaaaagaggaagagcaaagtcaccaataatcctggggttaattcatcaaagaaacaccagaaagtggctcaagataaagggaagaaagtcatgatggatcctgctaccaaagctagcgacttcatggtcttacaggagaagttcgtgagagaagactttgttgccaaagtcgaaggggctcctactaagatcttttgtcccgttcgatcgaacttttctcccaaatgacgactgtgtactcgggggcctttgttgcgggtttcaaagatcttgaccttttgaagaaataaaactcgactcttcaagaagtcttgaagaaagaaaagttggacgctgctgcaaaagagaaggaagtcaaggatcttggcaaggccaaagattaggcgaaagagagggccaagcagtcagaggataagaataagaagttggaggaagagaatactactcttactcgcaatctcaaggctgagaaggaaaacacgaaaaaagcttacaatcaggctgtcttcgactacatctataccaccctgaccaagctgccagactttgccttcgcagtttttggaccagaggctgttgacatggctaatgcttttcgcaccatgttccaactgagactcaggagttaggtgtgaacctctttcctgaagatgctgaagatgcaaatacttttgaagtcgcagatggtaatagcaaagtcgcggaagatctcaatgcccatgttgctttttttttttcctttttgtttttcgaatttcttttgagcagtacacgggtactcgcattttgtacttggtatttttaagacaattatacttatctttttatgttgctcttgtctgaacaatgtatccttcgaggatacctctttttcttctaagtattttatagttcacggtgaactttttatgcatttataattgcaactcaatacttttaaacgcttatcttcttggatgttgttttataacgaccatccttcacagcttggtgcgatgaacatttcgatgttcatattgaaaaattccacaaatttttctaagcatataactacaaaatatgtgaaaaaaaattaaaattcataagtttcaaaaaaagataattcattggataatcaatagtataatggtacaatgtatggttatagtccctatacttagataatttagattataaataaattggctaagtatatacatgcgggtactattgatagtaatacttcaagtgttccccattccaatatcgaagattgagtcattgagatcagataaccagtaagttgcgtttccgatctttttggcgattaggtagggaccatcccaattatcaccgaataccccatgcatagagttgtgtgtgttgggcatgactttacgcaataccaagtctcctacttgtaaacttctttctttaaccttagaattaaaataacgggttgtgccttgttgataggctgcgtttttaatctaattctgattgcgcttttcttccagtaaatgaagttgaaataactgattttcttcgttggtctcgatgttaaaaacatatcttctcaatgatctagctcctacttcgactaaaaccttggcttcacacccataagaaaatgaaaaaaggggttttgccaatcgtggaacgaagtgttgtgtagagtgataatccacaccaaaactaggatttaattttaagggacattagcttgaaaatatataagggaattgtcatgtatactgtattttttatttttatgtttttttttagatttttattttatttttataaaagttattttcatttttaggttatgttgtttccattttaaagttatctttttatttttataaataaataaaaaattaattataaaaaatataaataaaaaagtctcaaatatatacttagtataccaaaaaaatttgttaaacatcgatacttattaaccacaatttaaagctaataaataacaataaatgatttgacttgaataagatggacacaagggctatagcccctgaagaaaaattatttaaaataattttttattttatttaataattaaatagtaaaatggtaaaaaaaatacccacaactatattttataataattaaacctcaataaaattaaataaatttactaaagtggttataatttttattgtaagtaggcataattattttagggatgacaatatatatagctcttagtgataagtattcttatatcaacaatgtcaaccaactaatcttttaatcaaacatacataattctataatctcagaatttatttttgtcaaaacaaaaataaataaattgttcaagaaaataaataaataagtaaaattatctatctcctctctttgtatgattatacttgattatgtttgatgtcacaaattgttgaaaagatctctttctaaataacctaaatcatgtaaaatattttggccctataaaaagtgaaatttgttgtaaaaattatggacttattggaaatgacctagaaaatcaaaattgacaattgaaagagtgctacaattgtaatcataaatataattgaattgttcaacacttctcttcttcttgtaaagagaaatagatgtacctctgctgtgagaaaaaacagttgtagcaaaattgtggaaa

SEQ ID NO: 295606 - DNA, 1352 bp, Cannabis indica
gaccatccactggtgggaaccttcttcatcgtgtggtgtacaacggctagtgactgcttctgtacgaccttggacacgtgtcatgcaaagatctctcctttacaaaatagactctacccaggcccttgggcaaaaagcatgctcgagggtacgtatgcacactaccttgacctgcacaagggacaagatctgatcttgtgtcagagaaaggtccatggagtgatacttttagaaggagctaacgtgtccaacgtctacaaaacccacattgcctttcgggatccttatcgaaggacgttgctcccgaaagccattgcctctcattgccttctagatctaagggtcatcttttttagttcccacgaatgccttatgtagggaccgtgttcccttctcggatcgtgccacgtgtccgatggatgaaaatttagataacttttacccccaagctttcgagactctctggatcacggaagtttgctattgtcttgaatgttgatcgcagacacacactggagccttaggtcacgaacgcattactcgtacccctcagagggtattttcagcatctacttcccttcagatggtaatcacgcagtacatcaggaggtgttttttgctcctcttcgtgtgtggcaaggcatgcttagcaggaaaggaggagtgctattggcggctaagtgacgtggaggaaaggaccttgacattttattgggccacagcgctatcatatggggcccctcgtgtccctagctgttagattcactgtaatatctttgagtccttgatctcgcagagctctgtctcttttttgaaataaaaactatctatgtcggtatcatttttattctttttcactcagagcttcatattttctctgaaactttgttttcccttttcttgccatcttttgcatgcaagaagaattggaggatttgatccagtgtctactctcattcgcacagaactcttcgcagacattgctcccctttaactaaaccagctaaatccttgtttagagggaacatttgattttcaggtcaactgtgacaactacatcaactagctccggagtttttgggtgaacctccaatttgtcaaggaagtgcactaaccccctgtttgagtttctgggcatttttcatttagggagaggaaggttcttgcttaggttagggctaggaccgtacttgggccgtatagcgagatatgtgtgtgcaaaacctatcttctcattcgttcattatttcaaagagtttgctcttacttccatggatttgaacaaagaccctgtaacgccctaaataattaggcacgctaccaaaaatgtatttaggaaaccctaatcccct

SEQ ID NO: 295607 - DNA, 6450 bp, Cannabis indica
aaaaaaaaaaaacaatacttgctgagaaatccaagttgaatggtttgaaattccttggtatttcttgatgtggaaatcctgattttacaggtaagtttatcaagttcttaacgaaccgagttgaacaaataagtaatacaaaagaaaacaaacaatttccaacacttgcttaacatcagatacctaaaaggttcatataaactatgatggcaatagcagggcctatcccgggtagaagacaatctgcaaactaaaactagcaacatagaagtcaagctagcatatttcaactaatgctgaaaaacatttaaatttaaagttttaaagcaacacaaacaataaattactaaaggatccagtaagtgtttaagtaattgtgcgttgtgcacgtgctagtagtttattagttttttgttgaaaagaaagaaaatacttgtcccattcaactattgtgtacacggttacatttaccaaccatcatgaaaagaactcgtaatccaaatacaactccaaagactccataaatgcacaaaagtccatagcttgaagaaatttatgacgtgttaagttctccatgggatattcattggataactgttatgttttttttttccttctttggaggggggaattcatttttattctgaaatccatgaataaaatatttttaactgtggactttgcacagcatgtagattccaattctccacaaagattcaatttcaagccagacctaaaagtcatggtttagaggttgaggattgagaaaccaattatgaaatattgatttaatttaagggatcaaacaatatataaatataattaacggctgatatcatttaaaagataaaaccatttaggtgtagatctgaatatcatactcttgaaattgttgacagcaagaactccgaaatttcttagactaaactcaatgaaccaatagactacaaatttcaaatgagagatgctaaagggaactcacggtgcctagcaaccttgtaagatgtaatatcgctattagtgtaattcaatattgagtcctacttattttattttaataaagattataaagaaccgctaactaattataaggtgccaccatggtgccaatgttggtattatccccatatggagaaaacaaagcacacattgtctatctacttggtgcaactaatccacactagggtatgaaacaagtgtttcccactttcttatctcaattggtttataccttctatctttggttcatttgactcgttttgtagacttcatcttaaggaaatgctgctaaactttagcacattaagaattaaatgtgttctgctacactttccaaatcctagatcaatggagtttaatgaaaattacttagatctcaattatgctcttcttatgtttctcttataagtttcatttgagaaatagcttcatccaaactcaaattaattatagcaattggtaatcattatttttgaaagaaaaaaaaatgaagaaaagatacctgaagaggaggcgtagttgctcaaacagcaaggcgtcaggcttatcagcaagaacagaagatttagtccacaaacagctcaaaccacaagcacacggatacaaattatctaaattatcaggaatccatgtccaccctttgaccaaaacactgacatggtccatcttcagctccccacactcagattcagcatcagaaacttgcagagaagaagagctattcgctatttgaatagaaactttgtggttctcccggaagtgagggcaacccacgtgagaatcccattccttgaaggcagtgaccaaatcagtaaatgggtgtggcgtggatttggttagtgaaagagttggatatctgatgggtttgatggtggtggatagagatgggaattcgaggaagcccgagaagaagaggataaagaatgcgaagccaaacatggatatgatggtgaaggagttgagagattttaaaagcatttggagatagagaaagataacagatctgaaatatagatcgtcaggcagtcggagaggaatggttcttcttcttcctctctaactcatctcccatctctggaatctcattcaaacctcaaatacccttttatgtccataatagtacaaacattcaaaatgaagcaactcctctgaaagtcgtatttttcaattttctattactctattctatgcgtccataaaataatgtatttttgtaactcacacacttgcaatcttttttcaggcccaataatccaagagccaatcaacaaagtctcattctaagagcaaaaattaggggtaagttgaaaaatacctctttttttaatcaattaatcaaatttacctctaattttgtatttaattgaaatatacctctttttatatatgtattgtacccaaaataccctgacataagagagttatatagagagtatcttgaagtgacaggggcaaaattggtataatagttaaaaaaagaggtaaaaataatagactttaaaaaagatggtaaaaataaaagaggacaatataaaaagggtatagagtgtaatttcctcgaaaaattacacccaatatttttcatttttatttcttttatattgttataagtattttttttttagttttatacggcaatatattgtcattttttaaaactatttttttgttattttttggttacacgtgtcatcgtaggatttatgcaaatcttttatacaattttttgttgttataaagatctgatgtgacgtgggttgtcattttagtgacaattttttctttttttctttttaaataatattgatgagttacggttgtgttatcttttaagggcaagatatacacttcatcagtttatgtttaatctcactctcccattttccatatttatgttcatcatcttcttcattttttttttatttttcatacagttattgtgttagtggggtggttttagttagattttttttcaaaaaaaatttgtttagttttttggttttaaatcacaagtttccctctaatggtgaaggataatctgatacattgaaggttgaaggaatgtcgattacaacaaactatgccatcaaagaagttttggtggttggattttccctaatggtgaagggtaatctgatacacttgataggtgcaatggcttggccaaagaagttatacatcacttgattgtagggtgccaggtcggtgagttggagccctatcttttcatatgttgacttgaaaagaatgttagaggaggctctatcgtccaccatgcatctttctacaatcatgttctcattttgtgcagtaatgaccagggggtcgttttgcgggaaactgacttgagtaccatcttcttctgtgaaataaattatgggccctagtagctttggttgcttaaagcccctatctttgactgtcgggatgttgctcttaggcgcgtgacggagtgtctaagcatagtgcaccctagctttgttggtctcacctgtaatgtggggttcgccaatgacgaccgctaagtgtcctgccactggtggtggcattggatctctattttgggcaccttgtgcctaagtttggtcgttttgcacataacgatgcaggtggggattgttctcccttatgaggtagtcaatctccttctttaaattctgtcactcatttgtgtcgtggtcaaagttatgaaactaatagaactttgacatgtccctcttactcaactcccttgggaaagggttttttgtaggggactgttccctgagtggccatgaagatggcctcaggtttctctgtcatgaaggttaagcaggtatacttctcctccttattcttttgtggcgtgagagaagtgttacacttcccctttttgccactgtttctctcagagctattggtgttgtacttgtttctagtgttcttaacattggaggtttcggcagagttgttggtgtcttcctgcgcgcttggtaggtcatgagactataggatgtctcgtgactgcctgttttgacatgccccatttgggcctgccagatagctctttgagtttgataaagccatcagttctataaaggatcgctttcatgttattggttgagatcctctaaatgtctttttaaaagtcacttaattggagtatgaccccagtatggccgtatattggccctcttccgtaaggcctttgacattcgtggcctcaaccatgaacctctggatgtaatccgtcaaaggttctctttcttgttgtttgacttcgacaaggtcttctagttgtgatggtacaagcctcgaggatgagaattgtgtgtagaattctcgagagaactcagcccaagaattaaaccttcctagggccaatttgaagtaccattattgagctgtttctaacaaagtggttgggaatatgcgacattgcacatcaccaattatcttttggagattaagctacatcttgaaatatttgatgtgcgctaacgggtcttctcgtccaatatacatcttccataccggcatcttaaatttgggcaagggcaaggcatttatatatgtcaaaaatggcgatgcccttgaccggtctggttcaggatctgaaggtttcggactagctatgccttgaatcatgtcctttagttggtctaattatgcttgcatagaaggatttgttgctgtaggggcttgactgataggccctccttagaggggtttcagattctggtgtgacagggtctggctggccatactttgagagggtgtatggtgttgatcagaccgatgttgtactgcaggccctgaccggccactcctaggtaggggtgttggctctggtcgaccaggcttgcactagacagttgtctatggccggctagacctacatcaggcaaggtatggctgcccatgactcctccatggtcggccagacctgcatatggtagggtctagccacccatgactccttgattgattgatgtttgcggtgtgttgacgagaggtagatcgcaacagttattggagtttggtggatctagatgtctgaagtgatcaatttcacttctaaaatcgtcattttgggtgtttacactcgctctcgatccttgtcgattgaaaattaatctttgggtgtctcgttcccctaggggaaggagtgctcctctctggccgaccataaggacttttgcaggtggctggtcggctaaaggctggatgacaggggttgtatcaaagcctgagatccctggctggcccccatgatgttggttgataagatctggctattcttgtcgttagaactttgaggcaaggtctgtcctccctcggacaaaggaagatctgtcctactccctgaggaaccgggttgattagcttgtcgatagaccctccctaatctatcaactagtgttccttggatctctgatgagatcctggcctctttcatcggttctctgattgaactgccttatcagattactgtcctctttgttgcaataatctaactttgcttggtgaggtcgaatgatgtactcccagtcatccatccacctcaagaattcgtgtctctgctgagggagtacattgcaatcagcaacgcatggttcttcagttaggctagcttggccgatagcttctctaagtctggctaactcgagatcttctcccaagtccaaatggggctcaacaattgtaggctcgccaactcctcgtcccgtctctccagcatagtactagagataagattcgattgttgttcctgggggttgtcgcccatgagtcctccttttagtgggaggcgccagtggagggtcctcccttcgaggcaacgaccttatatttagacccaccgggatgtttgtgttggtttggccagctgtaatggccagacttgtggtgcctgttgtggtaacaaaatttaccacatctgcggtgttcataagaattctagttgtggctggaacatgaacatcaagatctgtagcctatgtgtcttgaggaaaacccaaagatgcagacggtgcaattggagttcttctcgtgttaaccatgacatttgatcagataaatatccactctctcaataaaatcaccaaacggttgacctcaaaaagtgataaatcgacaggggagtcgtatgaatctgatgttttccacgtattacacaattataattaaaagtaaagaacacacaaaattttatagaggtttgatcccctttcttagcagataatgacctactcccctttttgttatattaatactgagggaaaatactattcagaagtataggtggggttcaatatagctcccttcagactacaaaataggaatcaagatggcaaatctcaagtgttgagaatgctatatggtgcgtgtgagatagtgaagaagagagaaagatatcagacttagagatttaggcttagagcttggaggctagaattagacttaagtttt

SEQ ID NO: 295608 - DNA, 3699 bp, Cannabis indica
aagtgtttcttcttcttttcctccttgtaattgacctcattattctttttcttcttttaattatttcccactgttcattaaggtttttgttttttcctttttacatgtgctttttttttttgttgcaaatttttacatgtacatttgtgctgcataaaatgtgtagatgtgatttttattattaccattctttaaattagcaatccaagttgtctcatcataataattctgatgtatatgaatgagtgaattttacaagtgagatgcttccaaacttcgttatggaaatcagagcatgctcacaacatgcaaatttactattttcttaaaccgtgggatgatcttcagtgtacccatggtgaggggaaaatgataagtttatttgtcatttgaacttcttaaatcttaatgaacctatgaggcatatgaaacacttaggcatttttgcattgcattctctttcatgttcttttcaaagtgataagttttggttagtagttgttgctaaactacattcagaagagagtttatttgttatctcttatagcttcagggattggtttacaaatttcagtattagagaacaatagttatgttaaaagtctcagaagtacttgtacaagttgctattttcatagtaaatgatagcctgccaaaatgtgtaaactttctatgaatctgaaacttggttttggttttttacagacaaaaaaattcacggaactggatgagctcaatagagatcaagaagtaaaatttgtgaattatgtatctggtatgtactcctatatccttttacctataaaaatgcaataattatttagttcttcaaataatctattgaattatttttgtaaattcatgctacacatggttagtgttgagtttgttttactgtttgacataaactatccttgatttttaaggcttctttctgatgattaatatttttaattttaattttgcagctacagaggagttagttgaacacttgaaaaaggaaaacgagagattgcaatctcaagttgatgaactgagaagtgaagttgcttctgttaggcatgccatcctaaattcatctggttttccttttgttttcccttttgatgggatttaattcaatcattacttgatgcattttaagtgtggtctcttgaacaaggtgtttcattgattacagggtttccaaggatgaacaatgtgctgagtatcagaaactctggatggaagagagccagaagagtaagttgttctgggtatttaaattacgtgcttgatatttcttgtatttacacattcttcaaaatttcagtgaaatataagattacagtgtccgaagtgcatttctatatgatgaagaaagccactcaaatttgaagaaagtgtgcctgcattaatatctttttgataaagaaaaatctattagtgggacaaaatgtttgactctagtatctttaatattagttctgttgaggctgattaatttctttgtggttttttttttcatttgtaaagttatactactggcggtccaaactgatttatgttcatccaaaaatgatattttcactttcattggttctgtaaattttaaatcttaaaggacttgctagtttttttttctcttcctgccaggattttgctaaatatgggttgaagaaagtatttgttcatttacatggaatcgtgttcgcgtatcatattcaaaattgagacaactcttttcttatacaaaatttatacagttaaaacatcagtttgctttcccgtggacttacctaggacttccttttgtctaattataaaatgcttatataatagtttcacctttacccagggcacataattcccctcctttattcgttgtgcaacctaaaattggcatagaatatcattttgatattccattcaactgttgttttttacaacatctacttacaatagtgacacctaatgaaagttgtgtttatttcacacagccttgctttttttatttaatacttcttcaatttgtgctcaaatttatggcagataaagcgctttctgaagaaattgtgaggctgcaaaagctgcaacatgagaatacatttggcagtaaagagtacagaaatcacaggcaactgagtacaccaggaagcactcaaattacatcaagagaattatatgacagctcaaacagaagagtgacaaggagtagtaaacgcaggaggtgttctgttaatgaaacaggagaggccgctcctcatgctagtggtcaagctgatgctatgcaaaaggaatcaataaaggacttgcatacagaaactttgtcttttaaggctgttgagaatgttcagggagcttatctggtaatcttttttatttttagcaaatctttgatttttttttgtctttcttattctaatcttacacaatctttcagccagaatgttgtagaagacttactgacaaatcaggtatgtgtcggatcttaagtctatcttataataaccggtttagtacattcttggattttctttttcatacataatttactttttccaggtggtgatgtaaacgttgaagatgtttctagttgtctgtttcaagcccttgttgagtatttggtgggcatgaagttctctgttaataaaagtgaaggaatatccatatcagcagagcaccaatcaagtggtaactgtcagactatctaagatttatgttttacatgtcctgcacatttggctttcttagctttgcactcacatttcttctgattatgtatttgtccactacatttatagcttgctaccatagtgggtgttagctacatatctttggaggacacagcaagtttcttcctgtcataccatatcctgtttttgtcatcatttgtgttttgattgtttagtctctcatgcttgttcgaacacgatttactgtcaagcatctttttccttaagaattccacatatcgtctcttggcatagtagagctttagtacttcattaattaatggttatgattacggttttaacaggttactcgtttagcttgacatgggtcaagaaggcagatggaaatgaagaagaattgctatacaatgtcttatctttggggacatttgagagagtagccccacagtggatgaaggaggtcattatgttcagtacaagcatgtgcccgatcttctttgagagggtatctcgtgttgtgaagtcgttttcttagctgcttattattgttattattaccatttctattattaatactttcatccttaatacctgaggtatatattgtttgttgctgaggatgtgaatgtgattaatcttttcaaatgaatatctgtcaatctaaatttgtgatacttctagtacttgatgagagtagaaaccactgtaccaatgaaagaaaaaagaaaagcggtgagctatttattcatcttttgtaaaatgcactgaagtatcttgtgtgggaatttttaggggtgttttatttaccccacaaacacaggccaaatattatatatataaaaaaatacttaaaaaataaatttgaaaaatctgtcttcatatatttttttatataattatttaatggtaatttcaataattattttaaatattttttatatatatttctttaaatcaaatatatatatttttcatttataggataactagagaactaagccgcgcttcgcgcggtgttgcctaa

SEQ ID NO: 295609 - DNA, 868 bp, Cannabis indica
cctaatggcccttcttcaatttccccgtacatcatgaagtgacccaaaagcctctccgaggaaatatcgaatggtacattcccaacgtatatctttctagccgaaacgtcaccggaggcagaggatgagctattaggtccagaaactccagcagcggcgaactgggtcacagtgattctgccgtcgatcttcttgctgggctcttttagagcgagtaaggcgccatcggcgtttttgaaggtgacaaagccgtaacctttggatttcccagtgttcttgtcaaagataactatggcctcgtcgagttcgccgtacgtggcgaagagggaacgcaaggactcggacgtagtttcagcgccgaggccacggacgaagagctttcggagagtggtatcgcggttagcgagagagcgtacggagtccagaacgtcagggtgacgaagtacagcgccttggagaatatcaaggagttggtcttgagtgagtggctgaaggagtgtgcgagcgtcttctggggtgagattgagaagagtggtaggggcagtggtggcggttggagtggtaccattgccattttcctcggttttgcgcttcttggagaaatccatttagtcaattttggtttgagtggaagagaactggaaagtgttgtggttgcgaaggatgaccgatacgggggatgtttgtatataaaccctagtctggcaaggaggacgcaaatcctgtggctgcttgcctggcgcgcagaagcaagcaagccctgttgaagctcaaatggttattggggccctgttgaagctcacatgggcttattgggcaatgtatttggcattttgggcttttttttataaatatggaattttttaaa

SEQ ID NO: 295610 - DNA, 5777 bp, Cannabis indica
ttttttaaatggtttatcatgctgaacataaggttcaaatattttattacatgtgccactgtgttttcttatactcgtggtgagaagctatttgaatttaattttcgataaactattccgaattttataaaaaattacaagtgatcttaataagtagctataacgtacacgatcgtgaaaaaagaaattaaataaaaagctctcctatataccgaaacagataaatagagtagtctaccaaataatttttttaggagatatactacctatatttgctataataatatagagtacaaatagatataatatacataatatattttttttatgtaatataatatatatcatttaagaatcctatatatgtataacgtttagtttgacaaaaaaaagttaaaaaaaatgataaaaaaaaaaaaaaaaaagagatgagaatgatgataataaaaaaaataagaaagctgaccttgatgttgattgatattgcggcagagagatagagaaaaagtggaatactatatattttttattaagagcgcattaagtctgattcggtaagaggtattaagtagtaaaaagtgaacaaaaaataaaaaaaacaaacacacttaatgacttaaaatctaactgaataagattcatgcctccattaagtttaaacaaatggaacctaagcactacttgaagatgataggaattggagtcagttgagccctgttgggttgatgaacctcaatacagccatgtttaaagttttgagtgatagaaacttgaacaaaggtggagatttgttgaaatggttacaagttactagctactaaacttgttcattgctatctcacattgcataaaaaggtattatccaaatgtaacagagagagagagagagttagttatatcagttttgcgaagtagagagagaagtgagacttgtaactctctattgttcttgatcaagaactattgtaattttgtaacactcttggtgattaatggagattattatggctgttgttcaaccaagaagtagagcattgcactaagcttgaactcgtaaatccctagtgtctttcttctcttttcattgtttaattcttcttatttttctttgtgattctcagattgattgtgtccttgattgcgtgagtaaactttagactctattgccttgattcacaacaatcatgtccaacaaaatatagacagacattcctacatcgtttggatagggactaaattccaaaagattcaactacatttcagtttcatttgttcatttaaaaactaaatatcagtaccttaatttttgcagggtctgaagaaagaaggaaagcatcagcaccaagtctatcaattgcctcagattctttatttggggagccactgatgacagtcacttttaatccaaaggcctttcccatcttcacagcaacatgaccaagcccaccaagacctgccacacccaaatgtttacctggctctgtcattccataatatttcattgggctgtacacagtgattccagcgcacagaagtggggcaccggcatcaggagccaagttgtcaggaaaccggagcacaaaacgctggttaacaaccaccatattggaataaccaccgtatgttttactcccatcatggtcatgggcattataagtgaaaattgttcgggggcagtagttctccaagtcttgttggcaaatctcacatgtctcgcaggatcccactatgacaccaactccaacacgctcaccctctttaaactttttcacattagtcccaactttcgtcacaacaccaacaatctcatgcctgcaatacaaaaggtgataagatatcctgtaacattaagtatgtatatatattggaggctatggattgggatggcaaagggaagaaggaaggagacaacgtgaaacacagtccccatccttgctgttctttgggctaattaattgaaaagaaattgttgagttttcaatgatatagaagagggttgtaagaaaataaggttaaacattggtagctatttggattttcaagaggaaagacttcaaacaattatcttttctgatgctactgtgtgattggcaggtgtagatatattaggccgtggcaataaagatattactcagatgatttttatcaataaaaaagtgattaataaatatacataagaatttaattccttggacataaatcaaaataaagctgagagtatgcaattgttaaagtgatcacacaaggcgatgtaaggaagctaacacacaagagtggtgtttcaatgagatttcccagataaaatgacttgtgatggtcttcttgcaagtatttcaatgtttttgtgagtgcaatacaaatttacaaagataagaaactaggagagagattgttattagttttgtattataagttttccactacttgagttaataaaaagaggatgcttttgtatttggacaaattatgaaaaacaaaaacaatagaacagtccaatcctacgataaacatccaatgatgaaaagtatttcatgttcccaagtttctttttgagaagtagattattatagtgagatttatctgtttaaaggtagattcaaatacatatataattttttttttttgtttgaagaaatacatacatatataaaatttagaaacaagttagatacaaaaataaatcatacccgggaactatagggtagtttgtaaaaccccattcattctttacagaatgtaagtctgaatggcaaactccacaataaagtattttgatagtgacatcattttcaccattgtccctgccaataatgcaaaagcacaatatcacatcctaaactcatttgataataaaaatttaatatctgaaggctaattacatcccagaagtatggaaagaaaccttttgtcattttcagtcgagaaaaatgaataaataaatggtctaaagaggcagcagcaattacgtttcaaagatttacatgatgttgcatgttagggaaggttacagattagatttgaggcactgtttgagagggcttgaacccgtttagaacaacagaaaagtaaatcgtaaaaaaattaataaattaaatcaaccctttatcactgttgatactctaaaagaagaaaacgccactagtacatataccgtttaagacaaacttggcgtttagctagttgtataatcatcctttttagtttgtttatatatatattttttataaaacaggagaatctaagaaataatatatataataatacttatactaacactataacgcatcaacataaatcttaacaaaagtacagatgtgtaatatcgataactctgtcctaaaattcatcgatctatggagactctaatagcaaaagaagcccaaattacattatatacatttttcaatatattcacaatgtaaatctaaaaaaacaaataaaaaaccttctagagaaatggaatggtgataagactccagaattatcagtggcagcccaaccaaatgccttttgtgggtgctcttcagtgggtggtttcgccattgtaatatcctcaaatcacactctcagacctcagcctcagtcactgtggtgatgacttaataaatccaggaatataatagtttattaataagtatcaggaaggatggtgagaaataaatgcttctttcttttttttctcttcacatatttttttttttatattgtaggaaaaagagtgaaatatatgaatctgaatgagtgagtaattacaaagtaaatgatatctaaaaaatatgaagtaaaaaaatgatatataaaagaaatagagtaaatgaaaaaggaaagatattcctacagaaaggggcaaaaaaggaaggatatccctacaaaagggcaaaaaaaaagaaggatatcgtgtcattttgtaccaatattattccttccaataataataataatattacctaaaaaattgtcaatatactataattccagataatggtgtaggtggtggacttatgcttctctggaagtcaaatgtagatattgctcttaataatttctctcttaaacacatttgcttcatattgaatgtcatgattataacaagtgaggatgtacatacttggacaatactaaggagatgatgttttgatgttgctcctcaaaggccttagctggttgtgggagactttaataaaattcataacaaaattggtggtccacctaagaatcaagtataaattgagacctttcaatcagctattaaagaaaggtgaacttatcacattgactaataaaagtcaatgtcaaggaaatgttaaagaaaggtttgattattgttttttctaatgatttttggacagatttccttcacatggcaatcctgcaatatcttgatttttatcacaccgaccatctcaagggtcagattttaatgcagggtgagcaagctacgaaaccagttttcaagtctagatttagattcaaaaaattttggatcaaagaagaggaatggtttgatatgatctttaaaaacatgtgctactcaactttaggcttggcatcatcacaagtttggtagtatgaaaagtgtatcaaaacatctcatgagcatgttgtgacattgcaaaactcatccaatacagaccaatctcacttcatggcccttaaaaatttagaaacaatcatggatgagcttcttgctcaagaagaagactattggcactagaagtctaaaatttcatgactgaaatctggtgactcaaacgccaaattctttcaccaacgtgctaatgtaaagcatactaataatcatatcaaaaacctccaagatgaagatggttgtacccataccagtaatcaagaaatccttgttaacattgaagattactttactgggattttcagcacacaaggtattgaccaacaagcaatggagtatgttcttgaaaccattataacatctatttaagcttattctagaatagccctctccttactttacacagcagatgaagtgtttcaagccttgaaatctatgtttgatgattgtagcactggtttggatggaatattactgatattttatactaattactagaatattgtcggttctcttgtcacttttgctatcttggatgtcctcataatggttgtgatccctcttttttcaataagactctgattagtctcattctgaaagtaaagaagccaactaagataactcagttccaacccataagtctgtgtaatttcctctacaaacttgtctccaagaccattgttctttgtcttcaacctttcctctttacggtaatatcagaactccaaagtgcttttcttttgtagaggcttattatggataatgttcttgttgcctttgaagtcccgcacttgctcaaaaatagaaagagaggatttaaataggatatgctgcaataaaattagatacgagcaaggcttttgatcgagttgaatggcattttgcaaaacaagttatgttgaagatgaggttcggtagcagtttagtacatctgatccttcgatgtttaagataatatcttattcatttctcttgaatggtgttgtacaaggttcattttctccccaatgtggtattaggcaagggaaactatgataagttttgattttatggttttaaatcaggtacgcttggaagagttttgtattagatggttatcattgtaccatagccctcaggatctccatatgtgtgtacattaaatcaaaacaataaaaacaataagcttagagtatacctcttgaagcct

SEQ ID NO: 295611 - DNA, 2345 bp, Cannabis indica
atatttatgatcttgctagtactcatggtactttcgtcaacataatcaggtattctgcacaaacattcagtgcattgttagcctgcattcacaatttatgttctttatttttgttatttcatcaatgattatatttttaaaggttttaacattaattaatttgtatattcattgattgtaactgggaaatattctttagaattttaattggaggaagttatcttttatatgacttggcttttatcaatcaaattaaagaagttgtattaccatggtaggttctttgagtttattatgcaggtaaataaaaatttgctttaattatatttgacgtcttttttgtaatctaattactattctagttacataagcctgtgatgtgtaatacgagtttctcttctatttccttgaggtcaggtgaacgaaaagagctatgtggatttacatgttggtgatgtccttcgatttggacagtatgttatctgtttcctaaacccccacttttttatttatttagatggtcattaacctatgttttcttgaaatttggacactggcttatgttttttcttctctcaatttgcttttactaagatgattagtataatttcagcccacctatccaatcctatcctacctcctctatcattcctaaaagagattgtaaaatgttgtgtgatccatgtggagcttacttagcaattagaatttgaattatggtactaagttgcagaatgcatagggtactcaaaattttggcagattttgtccattaatttcttcttagtgttaaaaataaaatgctaccatcactgccctataagctaagctctccacaggaacaccttcactagaggtttttccataaattataactttgacgagtattagaaggctaatattcagattagattgctagtctaatttttgattgcaaaaggaatcaatcttgggaagatatttatattcggatttccgctcagcatttcttattgcccttgactaattttaattcttaattttcaaatttgaagaccaatgtatacaatacaccattactttaatgaccagcctccttcaacattcatttgaagaagtaataaaaaagtttgagcgatatctgttttaatcttctttgacccgattcttgctgctagacacttgttacagttcaataatctcagtgtttattttgtacaggtcatctcctttgtacattttccgtggaccaccaaatttaatgccaacagtaagactttatttgtgtttgaatttatttttggtttcaacagtttacaatagtgacttttaaaaagaaaatcatcaagttctgctttaatttccatcttctccaccttcgcgattatatttctttctatcttttattaacactgtggtcctacataggagaatgacttggagaggattagaaatattatgagcccagaagaggtgctagatcgggaagcttcacttcaacgagcaagacgtgaagcatctgttggtgatggtgtctcatggagcataggagaagatgctactaaagaggctaaggtttataagctctcaagtcacttcgtattaggatgtgatttacatataaatgctcattgaattaccataggcattataatttatttttattttaaagtttaatctcttgatttgatggccatactaattcatatggtgcatataggagaacacagatgaagaaacttggcagacatacaaaggacaactaacacagaagcaaccaaaaacccgtgaaaaggatataatggaggaggttagtttgctctgctgtgccatgaaaatgcctgatatgacaaatacttttttcctttctaacatcaagattattgtgctccctcatatattacatcactctctccaatttgtttctctctattacattattgtttttgtggttgttgttggtatgtgcatgcaattaaatttacactaaatattatttttggtaaaaaatttacactttcacgtttaaatatatgtatttatatttttacgttgttttataaaaataatatgaaaacaggaaacccacacgaaagtaacaggaaaacaacattcaaacaacatcaaaaaaacacaaaataaagaatattggtgacaaaactacctcagctatacaatttgtgaaaaaatcgattttttggttctgtttgctatttactccttctgttcaatctgtagtgaactgccctaaatgtacatgtatcaaatttttagcggtttacataattttaattatttaaatattataaaaataattaaaaataaataaataaaatttaaaaaaatatttttttacttttttttta

SEQ ID NO: 295612 - DNA, 2564 bp, Cannabis indica
aatattacataattgattttgtccacgattcaatgaatataaatattcatttatcagaaaatacaattatttatttaatttccttaaatagaaaatacatttccttaattagaaaataaacttccatatataaaaaattctaataatatatatatatatatatatattatgcaagtgtacagggtggcacattatgttaaactgaaattataagaaagaaattaaagaaaatgagtgatacttgcaaagctggtttagagctattatacactagattcctggaaaaactatcaatctatcattattccgtttgctcatctccaaacttttcattaaaatacattaaaccatgaatagtttaataaataaaggcacaacttttgcagaatgaaacaatttagatgaacttattactcaagcatgcatgatagatataccttcagaaaacttactcaacttaggaatttacaatttcaattcattcttaaatattgtgaaatcttaaacatcaagtccaacattttctatatatatcaaattttccatgaaaatatttctacaacattagaactataattacccagtacgagaatttctttccagaatataccttaaaatttcttgtaccgactgccaattaaagagaaaaatttcttgcaattaatacatatttttagtttctgtgaagtcgagttctgaaaaagtgcggtcgtattccatttttcagtttttaccataatacctgaaaaggcaaaatatgattggcccatgcaggtttcgaacctgcgaccttcgcgttattagcacgacgctctaaccaactgagctaatgggccaatttattgtgaggtcaatagaaatttaacttactctatttatttttattattgttatcctttactttttttagagaaataatttacatagtcagctataaaattcaaaacttaacaattttatgattcacacaattttacgattcacacaattttacgattcaaacaattttaatttacttcttacgaaggaagaattgtggcttgaccttaacccagattagtgttgggctagttcgttggtttcatcttcttcctcaactttgggtaatgttcaccatcgaccaagataaaaagggactaccccaatatatgtgcaacaaaagtatacatattttttttgtattttattaacaggagttgtgtaaaacctcacctcattttcacatacacaaaataagatttcaataaaagtttttattttatttgggaagttaaatttaaattgcagggataaatgtaaagatagttttttgtacacgtgttagttaatgaaaatgagtaatttttactgtgtattgtaaaatttgagttgttgtaaaaaagagaaaaatttgactaaaaagaaatatatgtagttttgaagaagatatatattttcatttattgtctaatggtgtatgtttaagataaaatttattatttatttaggtaagaaggatataatttaatatatttatattaaatccatgtggacgtaaaataaataaataattaatttaacattttcaagtgttgattagacaaaggaggactttttagcctttaaaaaaccaacatcttatgtaaaactagagtgtgttttgtggcttgttactctaattaatttggagttagtgtgctggttggtacgaaacaataatggcattttgatgtagaatctacaaaattaagccataaaagtcacccaaaatgtttaattatatattgattaatcggtttgacggattcagtttttgtttttctcgttagttgaaatataatgttcttgcacaaatacaagcatttgcgttataaaatatgaatatattcattttatatatatatttatattatatataaaaaaaaaaattacgttagtcggtgaattatttatttgatagatgaattatattaatattgaaagcaaaatgattgttagaatcttcatcaaaatatgtacatataatttgtagttcgcaataaataaatacatacaaaattttagtttatgatataggattggttgatataaaaaataatatattaacttatcctatatatcataatctataaaataataacagagtttttaggctgtaaaataataattctgggttttgggtacttatcagtcaaggtttttgctattagcctattaccaataataaatgttcttcattttcttaaaaaaaaattaagaaaaagggaagagtactgatctgcaacttcattagataaaacatgtttaaaggattacaaaataagaaatacaactgtcgaaactacctaaatttcaaacacactctctatatggtcctgatgcttttatttttttgctaatttatgagctaaaacatgtttttgttccaacataaaatcgccattgtaataataaaaaaaaaaaaagaccagtacaaattgataattaaaagagttttttattttcacattttaaaatagttatttttttttattttttatgaaaatatacataaaaatcgacatagcaactaatggagcaactta

SEQ ID NO: 295613 - DNA, 1839 bp, Cannabis indica
aaaaaaaaatgagaaaaaagagaatgttcacctaagatgcttgaagatgaggtagacaatgagggcaatgttgaggcgctcgttgtaggttgggacaattatgctgtatttattttttggattatcgccaatctccattgaaatccaaccctagaatctccacttgctctctctctcacacacagagatctgaaaatgaccatcagaaagatgcataatgtaaacaacaatatgaggtaaagtcatacacaacttggagcctaccaaaccaaactcatctcaatagctaattaaacttaacaaaaaggcaaaacataaaagcttttactaaaactattgtgtggaattaccactgcagatcatcttgggacataacaaccaaccaatgcacacatagatattagtttatcacttcaactgtcgtaccaaatgcaactagttcataacttacacttactaatcaatactgagagtgagtccactttgcaaaccacaaattgttcttctcaatgctacaaacaaaagtaatggtaccaaatcaacttatatcactgctctaattattttaataacatgaaacaattacaataaagatacttatatatagagagaatgcatcatcttaaaattaaatccaaatcaaagaaattacaacttagaactataaaagctctacaagtgtaagacattaatgtttttcacacatttacgttctctgcagaagtgttcatacattatatacatgtgtattatctctgataagaacctccctgtgaactcagtaaaaaagtagcaaaagccaataaaccagcacaaatagtaatgatcttaatgagacagtagccgaaatcgactagaattgttgagctattattgaataaaggcaaaagtagactaaagtcactacaagggtggagacccaaagctctctaaagatgctaagaatgaccaagttctagcaatgcccacaaccaattatatctatatgaaatctgatatttctcaatatatgatgcatttgaacaaacacagtgtgggcaaccaaggagaaaaaagaatgatcagatctttattacatagaacaatcaatcaatcactaagaaccatacctaattttgatcaactttatagaatcgaaacaaaaacaaaaatgtaatgaatcttgagattccagattgcgaaattgaagaaacacacacaatcgaataactcgaatcagaaataaactaattaaaatcaaaatcgaacttagaaatgaatcgaaaacgcacaataaatttaccgtgatcgtgttggtcgcttgatggtgttgttgtcctcttcgggcggcggtcgtgtttggtggcggcgacggcgggtcagtggctgagcgatcacggcgtgtaattggctcctcagaatggttttggaagagagagaaagaaagaaatgaagaaatggtattgggttgggctggtatgggctttctaggttgggctgggcccaaaaagtacaatcgtaagcccaacttgaaacattcgctgatggagactatgtagcgtttgtttacaaaaataaccaattttgggggaatttttattaacattgtttatatagtagaatctccatggttgttactagaaaaaaaaaattgctgtctctaaattggtgtgccctttctatcccaccaataattttattccacatcatcaatatctatttagcatataatgaatttcttaacaaactttaaagtttaaactaaggtggcatttagtaacacttttttaatcaattttctgtttctaaaattgaaagagtgaaaatatttttcaaaaacatgttctataaagctgtttt

SEQ ID NO: 295614 - DNA, 2544 bp, Cannabis indica
gtaaaaattaatttaattatatttagtagttatctgtttattcttctagctatgcatataaatatataagaatataatacacaattttatttaccattttctacacattcagaactcataagagaattcagttacatcctttcatgaacatccgatagaatctgatgaaagtataattaacgcttaatatggctgattattgtgcaaacttccatatcttatcctaagacgtttatatgatcttgtggaagtgtcaagatcaaagtattaggtttcgtctgtagatatacattcagtttttattttgtagtgcttgcttacatattaacttttagtaaggttttgttgataattattattgtagttttgaaaatgatttattatatctattttaattgatttattaatatatttaatttggaattatatttaatataattacagaagttactcatctgcatttatgacttttaagttgcaatataatctgtagagatttttgtgttatttcaggcaatccttggtggtaaggttgaggtgccaacattgtcagggaagacacaagtaaaagtatgatgctgcctctatccaagtcttcttattgattttcttgtatatgtattacataatatgatgtgttaaatgtttaagcttttaattttcatgtttatcatgttaccatggctttctttttccataagtgaggctcccgaataaatttgggaggtggtgtctaagacaagtgatctttgtcttttttttttttaaaacacgatgagttaaatgagtgttttcactagcgaacaagcaatctggatatttaacaaattccccctagtatgagtaccaaattttctgtatgtgtgcaatttaataacatgattgtggatgtagacaaaatttttatatttacttattaagttctccagctttggagtctcttgctatttctgtatgcctcttatgccttaacaagttaaattaatgtgtttctcctttatatcacgaagattatatttcgaaaattaggcacattagtgctgttccctgcatcggtacagtaccctaacttttcatgtgctggtgctaaaaatacgtgcaaagctactttttaagatcaattagttttagaaattggttcgccatgtatatctgtgttagcttcttgttcctatatggtttttttttggtcaagaagaaagaagcttcattaaatcaaattacaattgagctattgatgtaatcactctatgctcattcctagtgagctttctatgagtaacattttgcaccccatttttaagactatttaatctccttatctatgtaagcagcagtgtaagaaaattcattgtaaatacatttgttcctattattccaaatatgtagactgtagcagcaaacacattagctagaatgtctgtcaacaaatcttgttcctatatgttttttttttgcttactcttgttcctatatgttgttattaaataagatttacttatattcagcttttcacttactcttcattgcttgtaattattggcttctcagatacctatgggagttcagcatggacatcttctaatactaagaggcaaaggttaccaaactagtctcctactgtgcttgaaagcttgctacctttttgttttttgttatcctttaatcctcacatttttgtaaatttgtgatactgcaggacttccaaagcccggccttcttattaaccaccatggagatcagtatgtgcgctttagtatcaaatttcccacgtaaggtctcgaggtctcaacgatcaatgagtttctttctttcttttcttctttttacaaaactgccttgtttaattggataagaatacaagggtgtagtataaccacaggtatcacagcaatataaaatgtggcacgcacaaaaataaaccaaaagaacattagaaaataaactttcactctcattgaactagagaatggaaaataaaataaactcactctcaatgaacattagaaaataaactttcactctcaatgaactagtgaatgggaaatctatttacattatacagccaaaaaacaactcaaggcctattcttctccaaaggcagtttgcctcattgatgggtgaaagagtaacatttttattgaaacaaaactgccttgtattaatttaaaagaagtgtacttcaaaaatccacaagtatcatcaacaaagaaagttgatacaaagaattaggaaaacagaaactagagagcggaatgaatagaaaaaaataattacaaaatgttatgatcccatatcgactaagagattgattggtggtatataactacttaagacttgttagatattagatgtatattagctgtaaaagaattagatatttagtagatatttagtagatatttagtctcctaactttgtatataaatatgtattattctatgaaatcaacacacaattcgaatcactattttctacatggtatcagagcattgtgattcaaaattcgaaattcgaagttagggttctagaaaaaaaaaaaaa

SEQ ID NO: 295615 - DNA, 5376 bp, Cannabis indica
ttttactctcgagtaattttctttctctcaattttgcccaccagtccaagtcgtgtttcttttttatttttatataaatttattgaactacggttggtttttataggaagaaggttttacgggcggaacttggagacgttactcaatggcattagcttagcattagaccgtatcgtttaaaggatgtacggaagaacgggacttgataggttcaagaaagctcagtccttggaaccctttgctgtatctgtcagtgctagttcgaaatccaattccaggcctcaaacaaaaccggttttgaatttgcaacatcagactgctcaacaccaaaagcaatcccatgtttctcaaaaaccatcatcagggcaggaggcagcaccattggtaggacagagccagcctgtgacccaagttggaggaggccagtcaacctggcagccacctgattgggctattgaaccacgggctggtgtctattttcttgaggttatgaaggatggcgaagttcttgatcgcataaatcttgataggcggaggcatatttttgggaggcaatcccctgcctgtgattttgtgcttgatcatcaatcagtttcacgccagcatgctgctgtgattcctcacaagaatggaaggttgtttttgtcttgctcaagcttgattttttattgttatgattttattccttaacgtgattccgcacaagaatggtaggttagggtatattttttttctcacaagctttctgtatggcgatgggcttgtcaaaaacattatgctgacattgattattatatgtcaaaccaattgctgcgagagggattttactaagtcctcacgtttgtttttctttttctttttccgtatgttaccatgttatttatatgtgacagggacgtgcattttggcaacctaagaacttatagggtaatctgatctctagagcttcataatggcatggttattatgactttagtcataaaagcattactacttattttcatttgcctattttaatgtttatttgtttttaaaaaaatcaattaaaaaacattggtttggcaagaacttttgttctctttttgagtcatgtagacatttacaagctttcatctcttctgcagcatatatgtaatcgatttggggtctgcacatggtacttttgtggcaaatgagaggctgactaaagataatcctgttgagcttgaggtggggcagtctctaagatttgctgcatcaactagaatttatattttgagaaagaataatgctgctcttttccctcgtcctccactatcgacagagattaacctaccaccccctcctgatccgtctgatgaagaagctgttttagcctataatacacttctaaatcgctatggtattagcaaggctgacacgttgcctaaatccagtgtgactggtagctcagcaggtggaacagatggcagccagaacttagagagagctgctaagagaattaaaaaggccagagttgtttttagagatcaggttgggggagaacttgttgaagttgttggggtttcagatggtgctgatgtagaaacagaacctggtccaataggtgtaaaagagggaagtcttgttggaaaatatgaatcccttgtacagataacccttatacccaaagggaaggagcaaaactttgcaaaagaagataattcccaaagaggcgtgacaggtaaactacaggaggttttaaataaggtaaaaactgctccaaaaagtgggatttatgatgatctttatggagaatcctttgctggaaaagttggttcttcttgggcatattcatctgttagttccagtggtagaccagcttctccaactaaagatgctgcagaaaaatcatcaagtgttaaacttggtgctaacacaagccatgatgatgatgatgatttatttggggattaattagacccaattgcactgcttatgggtaattttgatttgttagccagatttatatacttgcaggttgagtagctgcaatctgtggatactgtgagcgtggcatacttatctcaagggaagaatgtgcttgcaactgggacgagttgtctttggctttgtaccctccatctgttattctaacttaatttaacagatgaaatagaatggagttgtgctgttgccttgtttattctagtaaacctgcttctttctgtaattacattgacaaacttgtgctagtctagttatgaggaagcttacggcttgatatacaactaatatcttggtcgccttttgagcagcagcatcggttatgatttcgaacttatgaggtgattggtttcagtaatctccttgcttcttactttggttgaagctgctcgatttgaaggaaagcagctctccactccagtgttatattttattcaagaatcattgcccccatttcgtagacatttgttccttgatttttttgggacatttttgtgtttgtcaaaatctggttaaagaatatgcttggcattagatgatcatctttcctaggtttgacataacatggattatattgacaaatatatatatatatatatatatatatatatatattctttcaattaatccgtcaatagaacagagaaaacaaggaaaatgtataggcaattcacatgagaatgtcaaccaagttttaaggtcaaaatccagagaataaaataatcaatcacgcattgtattttcagatttttgaattgcttgcagatgaaaacgtttcagttactgaccaataactcgacgctctttatatatatagtaaataataactttttaagggctggctagtaccttgtaaatatatgatctgttgaataaatctcgatatgtcgaagatgccctggggatgagtactaaaaatgtcatttaagcctaaaaaattctagattatgtgttgatttctctgttcacaattgggggaaaggtttgaagagaaaaaaacaaacaggggtacgtaacatattggtgtcaacttgataagtcttaaaatagagtgaaatcttacaatatactattggtgaagatagtagttacacgttcaagttaaatacagtttttaagtaccaaaagtagtagtgcttccaattgcatgaaaagttgttagctttgttaacaaataaaataaataataaaaaaagagacaagacctactttctctgaaaagatttaatagcttgcagctctgtttagtgatggtgatctttttctctctttatccgaagcagcctttgcagaaggctttctaatcctgttcttgggcaccccaactctatcattttcactccttttcttgaattgtctcattttcagtgaagggagaagaacaaggctttattattattattttattttactattgccatttccaccatcatagtttgttttaattgctctctctttagtctttacagcattttcttggcgaggtggagagtaatgtctagtgaaaacaccttcctattcgtcaagataagttctttttccaagtttcgtagtataaatcaaatgctagttatatatgaggaaatggattagttgtaaccaaacaaataaaaaaaagtttaaataggaaaactaacttgaaaattaacttctgcctaatctactttatgtagcaagagcaggttgattattatatattaaaccctgttttaagatttaaaacaacatgattttaagaccaacttttttgtgattacttctaacttccctttctcatatttgagtgtattttaggcaaaagttatactgccttgtctagccaccaaaccatatatactcatgtcactctattggcctaacattattattattcaagagaaactcctttgtagaagattcttatttgcccatcatagcttgtcatgaaaaaatatgtaataaaaaagaaaaagaagaaaatgcagagaccaatcgccaaatactctcttgaagagaccaaagcaaatgatatcaaaagtcaaaagaggcaatgaaccatacatacagagaacaacatccttccttatgggggttagttttttttaataaattactctttttgggcttgaaataagcattataaacataacaacagtagttaattactagcccacaagatagaattggaagtggagtatactattcagtattgaagacaaaaacctatttgttcaattacatatatcattacatgatatagtttattcttttttcctttgaaaacaaagaacaaacaaacaacattgtgagactttacactaatacaagaaagatacgatcttattactcaatcctatactcttaatgaatttgactagtctattgaataaatctaatacatcgatcaaagttttatttgaaaaagaaaagtatggacatatgtaccaaatttatcaccaaccatagatgaaaaagaaaaagaaagattggttacttatgatataaacttgaaatgtaaaacgaagaaatgtggaaaatgataggcttggagagaatatttccataagacgcatttggatgatttgaagtatgaagaaatccctaaatggaccatgtaatctaaaatggggcaagccctataaactgccccatgtggtaggaataagacattgacagtggggctcccacacccacttataatctgactgcccaaacttagaagacccctcagtgttaggaattttatattttttccccagtaggcccattgggatggagtggagattgactatgcccattttggtcctagcctatctcttttgcatataagtagctgcccctttaatttatactatagcctactacactcatctactaatattgcactaaaatttgtacatataaatctagggagtttttgtgtggtgtacaactacttccattcgtttggtcctaaaatttgagatattgttatttcttgtaggtcaaaaatatatcaacttccatgaaatacacgtaggaaatgtcactatatatttggttcatgtccttctcacatgattgtcacgtatagttttttgtttagtgtgatctttactccataccacacaaaatttaatcgaaattgctcaatcaaagaatgataaatcttgttcttgctcttattattgtgtggttaattaaagtttttgtatttttgagtctttgaccaagatctatatattatataaaaacctgatgatttataaagctaataattatagaaatgcataataatggtgagagaaagaactagtactactagagagaagtttcttttataagctttgaccataaagtggaagaaggattcacggctatagatatatagtgttgtttaataatgtgatttattaatgcataactaaaacctaaacctaaacctaaacctaa

SEQ ID NO: 295616 - DNA, 1605 bp, Cannabis indica
gtctttgacctatttcaaaatccacagatttcccgacgtgtacacctacaaatttcctaatatttggccatgtgagattctttcaaatgtcacgttcggtcttgtagtctcttaaaggtcattcttatacccacactttccaggcccaaacgtgaggattgtgtattaagagttagtcccacattgttaatgtgtggaaataaattgtgatatataagatgaaaggactactcctcccattactaattggttttgagatggaaacttattcattttattcctcaaattctaacagtcgtaagtttttttttttttttatgttacgtgttagtttaacccaaataccaaataggtgaactggtttgaatatttggtggtagattaacataactggtggactgttgttatttgtccgaacagttgtaactttcaaaagccaatgaaagatcacaaactttgtgtaaaatttcagttataataatggctgatgaggctgatcttttaacatcaaggtgggtcccaaccatattaaattaaatggaatcatgaagccctttttaagaaagatataaagaccaaattttcttctaaggtctttctttccattatttttaattttgttttagcttactctctagatttcattgtgatcatcatcacatcaaacctcttcatctcttttttgctaagctcactggctccctcctttcctggtcatggaggtattccttccttctttctttcattcttataattaataatattacgtattaagttaaatcactataaactttttctacgtatggaattacattacttttcttgcactaagtaatttattggtctgagcaatgagtaatgaaacatcttctgggttttgaatgctatggcttctgtcatacggtcaagaattcatataaataatagcatttactacgtactttaggtagtaattggattttttttttctattggtatattttacctcctttttttcttctcttattagaccatatgatactaatttaagattaaacaaaaaaaaatgagaaattgttatgagattgaaagagtacaatcaatcttttcgaaattttttattaatttgaaaaaaggttttggagtacttagaaattcttacaataagatcaaaagattaaactaggaagaagccaagaggagcaacatgcatggatcatttttcttcattacttcacacgcaacttttttatggaagggggcattgatggtaccataagtcaatgaatgatgactgcaatattattattatttgaaaaaaattctgacagtatctgaatagccaaatattatgtatttaagaactaaatattttatttctctgatttttactgataaattgtcaacgcctcatcataattgatctacttcgttgtgaaatggtagatctaagtcatgtaagtttagagttctaatccacacgagtggccaaattgttttcaaaggttcctttcatacacatcttgaaaaatgtctattctaacttagttagaacaacaggttatgacaaatgtttataagtctagattacacaagcaaaggcttctatattgtcatttcattttt

SEQ ID NO: 295617 - DNA, 4765 bp, Cannabis indica
ttaaaaaatatagatatatatttttttctgaaatcaattatggcggttcttaacaaaccatcgtcataaacctatctcgtgggttcttaaccgccgagatagggtatcctaaccaccgtcattggacatatttgacaccatgtgacacacctatctcggcggttcaaaactgtcgagatagagtaccctatatcggcggttggtttcaaaccgccgagataggatagtctatctcggcaattttgaactgccaagatagggtactctatctcggcggtttttaaccgccgagatagatcaacacatctatgtcgacggtcagattatcggcagttgtgaaccgccgagataggtctatgtcgtgggtttttaaccgccgatatagggtaatttttttgtagtggttgtacttgctgaaaaactagtctgatgcctttaaagtgtttcaaaatttcaaagctgaaagtgagttgcaattatgcactaaactaaaggcactacaaatagattagggtggggaatatagaagctttacgccttttcttaataaaattggggtattgcatagacatccttgtccaactacccatgaacaaaatggtttagccgaaagaaaacatagacaagtagttgaaaatgggttgaccttgttagctcaagcctctatgccacttaagttttgggatgaagcttttagagctgctgtctatatccataataggttgcctacccctgcccttaggaaccaaacacctcttgtagttctgtttaaacgaaaaccagactatgaagcacttagaacttttggatgtgcttgctttcctaacataaggtcctataataagcacaaattggagtttagattagcaccatgtactttcttaggctatagtctaaatcacaaaaggtataaatgtttagactcaagtggtagaatgtacatatctagggatgttattgttgatgaaaattcctttccccttgctaaaacctctactactactgctacacctattaattactccactgaatttttcactactggcattataccctctgcttcaaataacaataggtaagctgttaatcccatatccttcccacattctcagtcctttgaaggttcagcttcctcttctacgcaattttcatcacatgcattctaatgagtctggccaacatgttcatattgacactcaccattttcctgcactttcaacatctaatactcaagagtctcattcttctacagatgctactgttcctcagtttggtaccacaagtgttgcagctactccatctcggcctattgagactgcaacacactctaatgttcttgttgatgttgatgtttcacaggattttgatagttcagctgctgtttctactcaacctattcctgttgagattgtagtacctgatgcagcacctactacagtatcatcctcaaacagtggtcctagcaatagacctatcaattctcatccaatgcaaactcagggcaagtctggaatcactaaacctaaggtgtatttttagagaacctcaaactccagctgaagcattacagagcttgcattggaacaatgcaatgttagatgagatgcttgctttaattcgaaacaagactgggtctcttgttaagaaacctccaaggagaacagctataggctgtaaatgggtatacaaagagaagttcaatgatgatggttctgttaatagacataaagcaagattagtggccaagggttttcatcaacaacctaggtttgatttcactgagacttttagtccagttgtgaaaccaataaccatcagagttgttatgaccttagctttagctcgaggctagaaagttcaacaattggatgttcataatgcctttctaattggcaacttgcaggaggaagtttacatgacacagccacctggctttgaagatccaacagccccaaccttgtttgtaaacttcacaagactttatatggacccaagcaagcactaagggtttggtttgaaaagttgcaccaatgctagcttgctaagttttggcttctttttctccaaatcagatcaatcattgttcatttgttcaactcctcactctatcacactcatattagtgtatatgatattttgatcacaggaagtactgattcaaaaattgtctcccaaattgtaactgatctaaatgccaagttttctctttgagatcttggagagttaaactatttcttggggatagaagtgaattacactacagaggggatgcacctatcacaagaaaaatatgttaaggatcttctctgcagagcaaaaatgcagaatgctaaagcctcttcaaccctgatgacaagtggaacaaaattatctgcctatggtagtgatcctattgacaatatatgcaccagcctttgcagtcacattgggttgctgttaagcaaattttgagatatgttagtggcacgattaaacatggtctgcatctcaggagacctacatcttcctcaatggatcttgtagccttttgtgatgcggattgggttgcagaaggtcaacttctagatttgctatataccttggtccaaacttggttagttggcagtgtaagaagcgacatacaatttcaagaccaagtacagaggcagagtatagaagtttggctagtgctgttgctgaattgacttggatgaataatctattcttagaactaaaggtgtcattgccacgggttcccaccatctggtgtgataatttgagcacgattttgcttacagctaacccagttcttcacgcaagaacaaaacatatcgagctcgatctatactttgttcgtgaaaagattcagagtgaagtggttcaggttaaacatgttcctgcattgatcaaattgcagtgggtcttatatacaaaagccatctcaagcaataggttctattctttcagagacaaacttagaattgaagacctttcaattctaagtttgaggggggctgtcaagacaagtgatcaactaactagttagtaactaacttttcagttagttattttctaactgttttctgttgttccagctgagctactgctctttatttctgatgtaacaactttttgttgattgtaatctgttagtaccatttcttgtatatatacctgaactgttgtttataataaaatgagattagtctttcaatcttcaccgttctcttactttgcttttctctcttactttctcttttattcttttaatctgtactgctatggctaagagattcaacggagacaaagttaataatcactaatctaaaatttattttcttttcgtttgatttcagtttcactaagaaagaaatttgcctcttaaatacccactaaaagatcttattatttatgagatgcattgcaagacatgatcttattatttatttgtgctttggagaagcttgatcacttaatgatatataatatcaacattgtataacaaatatgaaactctttcaagggaaattgaaaatttaatgcaatcttgtaatgttaatcaaagaaacaacaattaaaactgaaactaaagtctctctaatatttcttatataatcttaaagatagaaatttcaataattagtcttcttaccatgaatgaaatgctttcttctacaatttttcacaaaataaataatctcatttgtccatggatattctattcaggaagaaaaaaaatgttagagatgatttattggcgtgttcataaatttccttttattttataggaatttgaggtaaactgtaaagagcaaatgccatgtcatgagtgtaaggagcttgagtacagcaattactattttgtccagggtgattataacactattataaaattggcttttcctatcggtttatgattgtcttttatactattttccaacggttcttaaaaccgttggctttgtgggtgtcataaaaatgcagaattttaaataacggttaataactgttagaaaaagtcactttaattgacggtttataactgttggtaaaagtattatgaaaattaaattaaattactttttaatatatgtttttaaaaattaaatatatataataatatttatttttattaaaagataatactaattaaaataaaaaaattaatatattttaataattcacaatgtatacaatattattctaaacaaaaaatacaattgaaaataaataataaacatcaatattataacttaatctctaaacaaatatgtaataataataatctctaaacaaaaaaatatgtaataataatatcaatattacagatcttgttcttcaacaaaaaaaaaatatattacaacttaatctctaaacaaaaaatgtctccaaccgaagtgatggtcttcttcacagtgatgtcttcttcacaataaaaaaactcatcacagtcatgttgggttttatgccctaaataaaactccatttcaatgtaatctttattctttaaatatcaatcaagaaacagaagtattttcatcactcatttgtgtgtcatttggttcatgttatcatttacttatttatttgatttataaattcatccgaacccttttcacatttatgttcttgtttattgtgtcatcagcacagtggaaagtaatcaagattatgtgattaaagatatattcctagatttatcagtacacagggtttaactgatatgacaatctacaacatagtttacttgcaccttggataagtgctatgttctttccagagcatt

SEQ ID NO: 295618 - DNA, 6890 bp, Cannabis indica
aaaaaaaattaaaaataatacatagaaaataatttttattataattattaaaaaaaattagtcatttactcaagtgaaaaaaatagtccgacaatattcaataatagttattaaattaaattagaagaattattataaatatttcaaataatattactatttatgtaaatgtcttcattttaaaatttaaagagaaatagctttttatacttttttttttgttaaacatcaaactttattaaatactaaaactaggccaaactaaaaaatgttctagttagaaacaagaagtgccaactcctcaacattaaaaaaaccaaacagtaaaaaattaaaagcaagtttcgacagtcgatgagccatctcatttctcaactgagggatccaagtaaccgacaactcaggaagaagagccagccccgccaaaacatgaccgaaaacagaagctaacttccagtcaggagccttttgagagttgattccaagcactaaggtttgacaatcagaagcaaaatttacattagactagttgtgcaatatgcagcgttgcactgcgtggaggagagcccatgtctcagcttccagggggacttagcctcgaggcacaccgagaaagcctccacaaccttaccttccaaattggtgatcacaataccaacatcagaattcaagccttttactagtcgcatcgataaacaccacatgatcaccctatagcagaaaatcattagagacattagagctaaggtcaacacctgactgagaatcccatgctacagcaagatcagcggccatagacttaatttgatcaagaaccactgctgaagatggccaaatctggtcgtggtaggcctagtttcttgtggaccagaggacaaaacaaaggcagataccaaattgcctgaaagcctccaaatcgttccagtttctggcctccaaaaaataaggctccagcatccatttgaccagctgcagggggctgttaaaacacagagcttcacttcttattctccattggctagctaaccaaagcgatttggcaagcgggcatttacagaacaaatgctcaactgaatcctctaaattaccacatattgaacaactaacatcattgccaaatatcctttgaagtcgttcctcaaaagggaggatttccctcccaagtttccagaggaaaagtttcatctgctgtgggatattaagcttctaaattctttcccgaattggatcattatcccccaatctactcttgataatagacttataagccacacgaggggaaaactcaccattagtcgcgtccttccaaattaaatgatcttcctgagtatgagggagtagagagatcatatggagggaactcgccacactcggtactaaccaggtactggtttgttgggaatcccaactcctatcatcattcaataataagaaaacatggactgatttagggaccaccataggattgaaggcagcgctaaattagttccaatccaaccagagaatccacggggcatgctagagatcaatgttttgaccattagcaatgaggaagcacgactccttgcgtatgaaatcccgagtagcaaagatacttctagcaccaaaagacaacgatttaggagtatccatagaccaaaataagctggcgtcatttccccaatacttggccttaaagacactaatccataacgaatcctcacccttcgccatcatccaaccaagcttgaccacaagagccaatttaacatcttcaaactttttaaagttgagcacactcccatccaacggtaagcaaagagaattccaattagtaagggacaaatatcgctccttatcggggctacctgtccaccaaaatttcatgatggcttgatccatctcttgacacaaggtcttagggaggagaaatgtggacatcgaatacattgagatactagtcgccaccgcccgaataagggtaaaccaaccagcttgggagagaagcttacaacaccaaccctcaattttagcacaaagacgatccttgataagcgtaaaatccatcaccttgctctttgactacaggatcgggtttcccaggaatttatcatcactattcatgctgtgaaagccaaggatattcacaatctcgaccttcttctgatggcaagcattattggagaaaacataggtcgacttcctgacatttagcctctgtccagaccacaaacagtaagtatcaatgcactcttggactgctgcaatttcctccttgttcgccttacaaaatataaatgtgtcatcagcatacatcaaatgggagatggaggggctaagccggtgtaccttaaaacctgtaatctagccttgagcttctttctgcattaagagccttaaaagacctcgttacatagaatgaacagatacgacgagataggatcaccttgtcggattcctctcataggagagaactgtgtgaggtggccaccatttagaaggatcgaaaaagaaatagtcctaacacaggttaagaccaactgtataaagtgtgacccaaagccataggcacgcagagtttgctccaagaaggcccattccaaacggtcgtaggccttggacatatccagctttagacccacaaaactctcccgacctttacgcttctcaaaagaatctaaaatttcatgggtcatgatggaattttttgcaatccatctaccaaggacaaatgtcgattgtgttggagagattaaattagacagtaggggctttaatctatttgccagtagcttagaaataattttataggtgaaattgcatagacttataggcctgtaatcatcaaaacagttagctcccatcttcttgggtataagcaccacaaacgtttgattcagctccttaaccatctcacccgtttcaaagaacttgacaaccgtagaaacaacatcattgccaacaatctcccagtggtctttaaaaaaatttctcggcataccatctggactcggggctttgagagggggcatggaccacacaacttccttaatttctgtagttgtggggatgcggacaagctccacattaatctcactcgagattataagatgaatcaaattttcaaggggggctctgggtggggaggaggatgaaagcaaagagataaagttagagcgaacatactcaccaaccaactgtctaccttcgatccactccacaccatccgtcaggtccgaattgataaaattatgttttctcttaatcatcgtcacagtgtgaaagaatctattgcttctatccccatccttataccatagtttgcgggatttctgtttccaaatctcagcctaacgaatttccacttcctcaatttctaacatgatatccgcctcaagcttgagagtttcttccgaaggggtgcgtctctggacttcaataagaggacggttaagcacctgtagttttttcttacacatcccaaagtgtgtcttattccacttaatcagatatcttcaggtattcttcaatctagtcacctgctggaagctcttgatactgtgaacaccaatagcccaagcttccttgataatagccttgcaactctcatcccttgaccaagcatctaagtaccggaatggggttctgaacctctccttatccacccaaagatcaaggataatcgggacatggtccgaatatttaatagtcagggaacagacactagtcttagggtaattaacaagccaatcaggttcacagatggcacgatccaacctttccttgatcagctcggcaagacaccgaccgtttgaccaggtgaaaaaattgccagtacaccctagatccacacctccagtgatattcaatagctcactgagatcttgaccatcaccctcatccacaaatctaccacctgcgctacccgaggcatccactattgatgcacccccaaaacccatactctgccaaataccattcatacgtctactattcagcttcgttttcattaagaacatcacattaggatcttctctcaaaaccaaggctctgagagctttctttgccaatgaactaccgagtttgtggaaattccacgaaagcactttcatgggtccttagggggcatgtgtcgacccgcctcctcgccataaaaaatctcgagccccatcacgtattgtatcaatcgtaatacccattttacctgcaattataacatctgacaaaatagaggagttccttctctcgcccacgatatctccaccatcaagtccggagatggggttagtagcaataaccccaatcccctcctccattgacattcacttcctcatttctagatccaaaagaactctcaactgacctcagagaattaataagcaatcgatattttttactaggatccagcagttcatcatcgctctttgaggtctccaaaatattcactccgctttcatcaacaaagacatccttgatttccgttttatcaaccccaaccaagcagctcaggccatcactctccgccacgaaggagttgtgcttgtttgaattaccagaaatatttttccttttagcaccagattttggaccaccagtggtagattttctcccaaaaaatagaaggtttgggaacacctctcggttcatcaagtttaggcttctttaatttacgtattggtccacagttggatccaccagagcccacatcctcacgcgaagctccaaatttaatcaggcccaattttttccttaaataaattggccacatggaccacgtgcttagaggggaaatgtgacgtgtccacatagtccttgtatgaaacaacataggcattatctccctgttgggagactaccccttccattcgcacatgttccgctctagtttggccagctggactcgctgccacctcaccactgcttgggccaccatggccaacttggttctaatcagaggtcgaacccacccgacatcctaattggcccgtcgtgtccgccgcaacattgttcaccctctcagtagttttatcttccttgtccatccttttgatatcctgaagatcctcaaattctaacaaggtaaaaccattatcaagtcgagaaccatccttaagccatggtccgaacaatggtactgaacgaccatcatgcacggacaccattcgcttcaaggcagaataatcttctttaatattctttataatcccgcacttatagcaaaaagtcggtaatcgttcatacttaaaatggctccagattttcttgttactcggattcaggagggagactcccacgagtaaaggcagatttaggttcagcctaacttggaagtgaagaaagtcgttcgctataaccccatttttcctcaccttatttgcatttaggagggtacccattcttttggccatctgggtgagacactcatcagtgagataaggcatcaggagaccttttgtcttagccaaatatccagtttcgagagatctgccgactcccgatggccatcctcagagaattttgagactaacaaaaacccactgcaaggattccatgggccatttttgaggacgtatttcactttgcccaggtggttcaggccaaaaacaaagattttaggctccagagcttgtaatctccaacccggacggagcttccacattcttgtcaaaactttcctcagagtaccatgagtcacttctttttttgagaagaattaacccaccaccatctttgcgatagtctcctggggcgtcaccaagttcggcgccacctgaatagaaaagtcctccaaacaacagttctctgttttagctatcatctccgccaccacgttgttatgcactgactccatacccaccacccccagcagacgggccacacagaagaccaaaagacatggaatttgagaataacaaaatcttacgaaaatagaaaaaagcttgagaatacgaaatccatatatcaagacctaaacaagggaatttttccttccaatcatggacaaaagggatataataccctaagacacccagtacggtgcatgtgggtagcaggccactacccatggccaacggcccaccgtacatgacctacgcacccacacctgcatagtacgaagccaatatgtacggagagaaaatgtatttgtaatattgcattcaatatatgcaaaaccaaatcctggtataattttttacactatttattatttatattgtcttatgctacatacaaaaattaatatatattttttaatttttttagaattagaaacatatcacttaaaatattagttatgtcaattttttaaatatttcatgggttgttgtgggttgtttgtatatctatattagtttgttaaaatattttttattttaaagttatgtcaattttttaaattttttatgggttgttctaggttgttagtatatatgttttattatgcagtatatttcttttttattctctgatatattattattcttagatgatatttattttttattttactatatataatagtggtatataattttattatacatacattttaatataaatatatataattttattgacatgttacatatatttaattattgtttttatatattttaattgtatgactattatttatcttttaaataatatttaattagtttttattttattatatacaagtagtatataattttattgtaaattgtatggtatatatattttaattatattatataatttagttagcacggtatatatatttgttagtaatataatttatttagggatattggcggctaaaccacccgaactttacggtttgtaacacttaaccacaaaaaccgaatttttagctactaaactacctaaaccctggttccgttttgctctgcacacctccgtccaaaaat

SEQ ID NO: 295619 - DNA, 1849 bp, Cannabis indica
cttatcatagcaggttcatggcgggccattttttaacaccggcgttatttcttgctggtaaaaggaagttttaccggcgcagttactatgcgcgccggtaaaaagtcctttaccgaccaagcttcccagataagctttgccggcgcagttagggtacttttgccggcgcatttcttgtagtgggggttgggccgctcccagcccgtagaaattttttattttaatgaactactacttatcctcaagaaaggtgacaagtttaaatatggtttttataagttaaagcacattcggccaacgagacccggtaccttttaactctcaaaagaatgttaaggaatatcatcataggtttttcgtttcatcggggtttaaagcttttaaatgtctcaatctcctgactgaatgggtcaggattcctcctttgcacaagacaacccctacttaattatttctgaatcacgcaaaggtgtgcgccagctaccagaaggaggagttgaacattggagacttggtgaccacctttaactatcgtaaggctaagctgatcctgaaccatcaaacgatcaaggattttaatttatccaaggtgtcttgtaccaacacacaaaatccagagactaaaaagaagctccgactaaaaatcattacagtagccgaagaaaaatacaacaagtattaatacaaaaaagaataagaaatccattatgcctgccttcagagtgcttctaggaagactagccaggagaagatcgggaaagaggctacgcctgccatgccacaatttcccttcccggtgcccaactccgggacctctagacccagtacttctggtgcccataagtcccctttgaattttcattttgttcctccagctcaagagtactctcacttacggtcggttggttttgacacaaggttatatagattttgtatgccccatactcggtggggtaataggaaaaaggatttttatttttctaacatgagtggtttcttgggtcgatctcaaatgggtttcggtctcccgattcctattctctcagatcaatcctactacataacctcaagttagtttctcccttcagatagttatttagcagatgacgacaccatctctttaatttatgaattttcttggaaaaaaattaaggcgtcagtgtaggattagcgttccttgtttaatgtctcctcatgcttatgcttgatgtatttcatgtttttaactttcctctatttggtttcaatagaaaaactcatgcacgacctcctggccatgcagaatgctacattgagccaaaggtggctaatcttccatcagtagtggtgacccccgagggcccaaatgaagaagtgcttggtaaccgggaagttgtgttatttgaggagaaagaagaggaggttcccccactcgattggaaatagaagaatatggttcctaattctaaatcttctaagaggcctaggtcttcagggactcccgctccaagtactaactctgggattccgtttaaggttgaagactttcctgccccacctacaatccttctaaacccccccccccaacctaaccaaagagcgagtccaactttgcattgctaaacacaattatgctgtcgacgagctgacaaaaggagaggcagaggcagaggccttgaaaaagtggctgagggaggctgaggatggtccgttctagggggaatacaacagtgaagtctgggatttgaaccttgatcccatgattgattggtttaagcgcttcttgagaccttttctggcacccttcgtgtaatacccagaattaagaaaaggattagcaaaaccctaattagataattatgagttaatt

SEQ ID NO: 295620 - DNA, 2293 bp, Cannabis indica
aaaaaaaaaaaaaaaacagcttctcccacctgtatggaaccaaccatctataattgcttctcttgttaactcaggctttttgtggtactcaacaaaaacagatttccctctaagacatatctcaccacgagcaggatttccaagtggattgtaacccatttcaggaacttcctctaggcgcatctcattgtagactgacactggtccaacagaaccaactaggctcatttcatcaggataggatatagttgttggtccacaagtttcagttaaccctgcatcatttacgaaaatgcattggctggtttcaatgtccaaacataactataataaagctgtggaattaagctgactttaatgacatgttaagtactcaaaacaaaatcttgatgtcttgtactttttgtatacttttaccataaaagcagttgtctttacagtagcattggacaacaatgcattgtttcattgtctagacatagctacaataaagccgtgggaaatataataatttgaatataaggcatggattgaatttgatgacatgttatgtgctcaaaacaaaatattgatgcttaatacttaccgtatccttggacaacgaaggcacagctggtaacgcgcaagaattcttctatctcagaactcaaaggagctgctccagatattataaggcggacgcgaccacctagtctagcttttatctaaaagaccatagaaagaaagctaagaagacaacaatgagaagcattctaagtattcttataaacattttatagagaaagagaaggacaacctttctgaaggctaaaagatctgctaaaggtgaagcgtatttgtttttgtatccccaattcatccaagcaagtttgctttaaagcaatgaaagagtgtgtaagtatcaaagtagttagtatgagaattaaactgataagaatatttgaactacttactacttataaagaagatcaaaaatcactctccttcttggattgagctgctctactcctttctttatacctggaaatcaaagaggcttggctaggtcagtatgatggttcaattatatagctgttgaaaactgatgattagagatatttgcttgccttcatacactctttcaaaaactcttggtactccagcaaaaagtgttggctttagttccattaaatcttcccccaatgcgttaagatcctataaataaaagaattaacatgattatggtaagtgaaaatgagactagaaatggattgcaaacaaaatgtggcataattagcaatagcagcaatatcataccccatggtaatagccaacagaagcacctttatggaagaagtattcttcgattaaacggtcaaggatatgagctagaggcagaaatgataagtaggtatcatctcctgtcatctactcacaaatcacaaatgagagtatcaggaaaaattataagaagttggtaagatggtgtatgaagaatttaccacaagaagttcaattatgctacttaccttatcttcaaattgttccaagaagaggtcaatccctctgacagaaaaggcaatggtttcatgtgttaacacaacaccttttgggtctccactggtaccactggtatacataattgtgctaacattatggatctgtggtggaataatctctgttgggttttcttttccctgatgaacaataaacaaactttatgatcaattcagcaagaaaaaaaaaaatgacatcattgtgaatctgcggatgttctatgccaagtagtattagttgacatttgtcagcccatatactatggtgaccatctagaatgtgttccaactctcttctaaatacacatttgttacattcatcacagtataacaataactctagactagttcaaaatgattggataggtggttttctcccacaaatgtttgaggtttgagtctctactgaattcttacatagaaactactattttacagtcacctagcacaataatcacttcataaagggacattttcaagggttacgtgagcaacctagttttaaaaaactaaccatatcaaggaattctttccatgacagtggttttatcccaatctgagttgctttttccttctcctcttcagtcaatgaagtgaagcaaaccaaagctgcaacaagaacaaccaacctcagtatcacacattattagtagttttagtaaacataaaatatagaacaatttgcggcgaaaccccttatgttttaatttttatatactaaatcctcttatcttattttttagtggcaaaactccctt

SEQ ID NO: 295621 - DNA, 2154 bp, Cannabis indica
ctttctttatataggcattcacttagagctaagtttagatgagatgagcttaaataaagactttggctgatatctgactcttatggttgaatacatatgggctttgtaatatccggttttcttgaagggtaatttttaatttttttaaactctagtttattctatttttcattaaggataacaatcatttcgaatatttatgaatttagtagagtatgagattatttatagtaacaataaaattaattttagttatatatttcttggcatgtgcagggccggccctgagggtgggcgggctaggcgtgcgcctcgagcccccgaacgctcagggccccgaaattgtaaaaaaaaaaaaattcatacatagataaagtgttaaataagaagaaaatataacaaaaattgtttggtgtagtggtaaaaggtcttacttaaaaaataagaggtcatgggatcaattcccaacttctaatttttaattttttaaaaaaatatttaatgtgtagttatgagggattgaacatttgacctcttaagcgtttttaaaattttaccattacactaagcactagaactatcatatttataatagttaaactatatataggggccccaaaatttgattttgccttaggcctcatattccttaggaccggtctgggcatgtgtataatacttagtatatcaaatgattgtgtcattttatttaattttagtaaatattattattattatgggtataatgataatatatgttaattttataatataatatggtaaaataatattcgttattattttggtacactaatattaataaaatgagtgaatagtattatataatatataatgtactatattatatggtatatttcacccgcgttttattatttttattttttattatcatttagattggagaaatagtatacgtagtgtatacagttatattgttacataactcccaaaatttgtgggagtggttcgttctactttcaatttaaagtgatcaattttatttgattttaaagatcgacttttaaggtttagaagtcatacaagagagagaggcagagagagtaggtcagccttactcaatgggaaattttataagcacattgttttggaaaggggtctaagacaaggagatcccctctcaccttacttatttttactttgttctgaaagtttttcttacctactccaggaggctgaaagggctgactgcctccatgaaatttgtatcagttggaatgggctgaagttatcccatttattctttacagacgatatctttatttttcttaatgctacgaaagaggaaagtccctacctctgacaaatattagaggaatactctcttcttttgaggcaacaaatcaatctcgaaaaatatgagttgtgtgggagtgtaatgtttctcaaatcgaagggcaacgactcgcttcaactcttggtgttgctctagtagattgtcacactcgttatcttggcttaccctcttatgtgggaaggcacaaaaaagagatctttgaatctattcaagacaaggttagaaataagcttcaagggggaatgctcaattattttctcaagtaggtcgcaaaattcttcttaaggctgacattcaagctatcttgtgatatgtaatgagttgtttttggctatccaaagagctaattcaagatattcagtccatgattgcgagattttggtaggagtcgttaaaaaaagtaaaaaatttattgagggaaagtggaatcgtctttgtaaatccaaggctacggggggtatgtgctttaaggatctctataagtttaaccaagccttactagcgaagtaagggtggaaaatcatcaacaaccctcaatcaatgatggatgggttctcaaagaatgctattttactaattgctccttttagaggctaaatcaagcgggtaatgctcttttatctagtgtagtattctttagaaccggtctttaattgtaatgaccgtattttataatatggattagtaaaggcaattagcactaattattgatattattatagtatttgtgggtcccattgttagaaatagtcattagatttataatttctcaattctagaaattttattaaactctaggtgtattatttgaattatat

SEQ ID NO: 295622 - DNA, 7134 bp, Cannabis indica
aaaaaaaaaaaaacagttttttatatgtgtagcatcagatggcaaatattcaaatggggttcaaaggtggggccataagattcgaaatcaagaatgtggtctacaattcaatttttttttttcttttaacacggatcagatcagatcacatcatagatctcatcccacggtaggatgaatctgacaacttttcaatgatcagtaaagtacttgctagtatagtggtgtacatctacaagtacgtatgtataaagtttgacttgtttgtactaaaaaaataaagataaaaaaaggaaaagaaaactatcttggaaatggtttgattgatgaatgaagaaggcgtttaaattttaaaaccgaaaaccaaaacaaggacttctgtgccttcttccttatggtgctctctagtagtttgacatttgaaacactcttctcatcttattaaatacaataaaacaacatcattgactaattaaactctattattataataataaagctctgttttacaagttaatatcttcaatattctaatttaaccacacagagagacattgacattgttttcatcatcacactgctatttttcaaaacctttgaaaccatctggttttagtctctccttttttttttggtcacacagagacattaggtgtatgtattgtttttctgttttattggatttaactctaataccaaattagtcttcagattttctaacctgtattttcagacatgtcctcaattttaagcaaaaacaactgtgaaaacagtgcaccttcttctttccgtgaattcaaaaaacaagcttcatttttcttcaaggagaagatcaagactgccagattggccctcacagatgttacaccagcagagttgtgagtttttctttttctcatctttatttaattcattaatttgtaaaactaaattcgccttatttttttataattatctcgtaattgtgtggttcttgtgttttaatgtcttaagattaactgaagaagccaccaatgggaatccatgggctcctgacactcggaccttgtcttcaatctcaagatctgcttttgagatagatgattacaccagaattgttgagattttgcacaaaaggtttctgcgtacttctgtttttgtttttgctcttttgaaattctgagactgaacgataaatctaacacatgatttgacaactgggtgtgaatcagatttctgaaatttgaaaagaaaaattggagggtctgttacaactctctgattgttcttgagcatttgttgactcatggaccagagagtgttggagatgaatttcaaggggaaaaagatgtcattaaagagattgaaaggtttcagtacatagacgaaaaagggtatgtcttgttagaattttgaaacaaatctttgttaacacgatttatgtatatgaagaaactaagaaggtttatttattctctataacaggttcaactggggtcttgcagctagaaaaaaatcagagagagtactgaatctacttgaaaagggtcctcttcttaaagaagaaagagataaagctcggaagctaagtagagggattcagggatttggaagcttcacacaaaggtcatcaaccccacaaaagattttaagacaaacatcagttgaaacttatggaaggtgtaactctcagttcattagccatgaaaatcaggagaacatgatgaccccttatgctaaaaaagatgaaacttttataatcaagaatgaaagacttaacttgggcaacaaaacagagagttcgaatactatgaaagctgctgctgaaatgagtgtcaaggagaacatggctccttctcctgaggagagtgactttcatggatgggaccgagttggagaggctaacccgcttttaaatggtgagattgatgggtcaagacttggaacttcaatagaggaggatcatccctttagtgatgctcacaagaaaagtaatgcttcgctactttgaattttgtttatttgtttatgagggtgtaaacttatctctggatttctttatatatcacttgatgaccgtaaatttataagaggctttaatgtatccagttttgaatttttacgatacatctctctgtggtaaggacatcaatatgtgtatcatatatttcagaaaaatacttcactatttagttaataaataagtaaaatcagtgacgagaatgtaatgtgtatatgaatgactctttttggctggagttcttgggctgtgattctttttttccacttccaattgttactcaattgtcacatttatatttcaacacaaatgttttgcagctgggttaaaagatcactcgtgattgaaactttgatttaatcataaacctcattttataaaatagaaatcacctttgttttgttggttatttaggttacatctcaactagcagggtcagtgatttctcaagtggtcttgaattagattagatcatgtcacagttacagttacaatcacagccaaatctgtggaacagtcctctttttatatttcatatctctagttaaggcaaaccaaacaaaattgcaagtttgagaagaagaaaaaaagaagtgagaagatagcttgcaacatatgacattatacacactgtatttactagtaacgcaattacatacaaaattttcttgagatgattttgttgttatgctttgcaaagccactcctgaatcgctagccgtatagcgtggttgggaatgagatgcaggtgacttagttttaaattggtcattggagaagtctctttgccattttccaaccatccttggatggcttccctttcataagtgaatccatcagcagccacctgagggtcatgcattatttcctgaaagtaaaccagaacattaggatgtgagccaagttaaagaacaagtttgaaccttacacccaaatttcgggaaagcttgagcttgtttagagttggggtttgattgaaagacatgagaagcagccttacctgaagaatggggcacaagaagaatgatggtaccagccgctcttctgagacatgcaactgctcgagttctctcactagacagggtgttatatctggtctatctctaccgttcaattcgcaacattgcaagccaatgtctactaatcgcctaacaacatggtttggccattctccagctgaggaatccaatatggatgccaattttccggatgaaattgctttgcggacctcacctgctaaacctactggaggccttcttgtgagtaactgcagggtgattaaaccgaaggagtaagcatcggacttggatgtcaggactccaattctccggaactctggatctgtgtaagaaaaggcaccctttggcccctttgaccatctcaaacttgggcaatataagttgtcctcatttatcatcctgcaaatcccaaaatcacaaatcttgcaactgagagcagaatctagaagtatatttcgaggtgtcaaatcaccatggacaattttctgagtctttgaagagtgcaaaaagcaaagcgcactagcaatttcggctataatccgtgctctgactttccaggtcaaaacattgtttttcttgaacaaatgacattgaaggctgccattaggcaaatattcatatacaagggaccaggcgtctgggcacacaccaagcagtgctacaagatgaggatgttgtagtttgcctagaacttttacctgcagtttaaaaaacaaccgtgaaaatggacagggcaaaaggaaaagaaggtaattgcatatcaactatgcaaaaatgtgtgtgagagagagaacctcttgttgaaattctgactctccttgcatgttatatgaatgcaactttttaatagcaacggttctacccaacagctcccctttgtaaacacaaccataaccaccatgcccaattatgaagctctccgaaaaattacatgttgcagtttccaaatccgacaatgaaaattctgccaactcaggcaactcatcagtgcacccaataagactagtacagttcacacctcgaccttgtccacaacttctccaccgctcaagccagcgtactgcttccatcttctgttttcgaatcctgtgcttttcctgcctcaaggttgcaatagattcttgcactagcttcagttcatcagaagcttcgtcattcctgttgagtgcttcttgtgcacgactgtcaagtagtgcaacatttctcatggtcctatgaagctctagagttatatcttttctttctttcaatagaatttcttgttcctctaatgtaatctttaacgcatcctcagcctcttttctaagtttgccttcatgtgagaaggcagaatcaagcatttacggcctaaaaggaaagagagaatactattaaatgagataacaagaattgattcataaattttgatttcaagatcaacatcagtcagtatgcagcccgtatatgttttgtagttgctacttagatattctatcaacaagagaaatatgagtttagactactcttataagtttacattggaaaatttacttttatttgattgaatttgaaaggttacattactggcaaaaataaaagagtagttatacagttaatttagcctagatatggatttcaaataattgagaagttcacagtgtcactttcataagccatatattaacctgaaggaacaaaatccgtagaaataaaactcataagctttcagatcaaagttaccttacttatagcttcgatggcatctgattccaactttcttcgctttaatgtatccaagtgtgcgttattcctagacgtctcggcttctaccctgagatcaataagctgactatataacctctcttcatcagagtctgaagacactcttctttctgaagaattataccctgaaccaacattagcacttgtagggctaaataaaccattgagatcactgaggaaagtacttggagaactatacaaagtcgatgaagaagccaaatccggatgaaacggttcacactgaacctggttccttaattgagcacagattgcaccactagcagaattgaattgaagccaatttaaatggattgacttattcttaccatgtaaaaatgatctaaatatgtttttccctatagttgcaagctttgaacgactacacgaaggaagtgagcttgggtcctcagaagagtgtctagtccacacgtggttcccgttgttgacaaaccatatttcacaaaacaatggggcattttttgcaacatagtatgctttgcttgacctctttttcaccttcataaaactgttttaagtcatccaaaatgaagctacttagaaaagaaaacagaaaataaaactacaagtttcattatgagaaagcaaagcatggaacaaacattatattatcaacagtatggcccctccctcaaaaaaaaaaaaaaaagactagaacaaatgtaaaagtctgtaaaaatgtgctaagattggctctctttagttatgcaatttttgttgtcgtccaaataagcttgaaaagcaaaaagcatgatccaagtgacaatagttagtagtactaatactactacttacttttctgtaacagcccccatgacaagcttcctaataccatattcattcaccaaatccactattcctttctgtacttgatttgcttcaactgtaattatgctggctgtcacctgtgaggtatgtgattgtatacataattttagtcaactgtagagacaattctaaactttcacgatgtagaaaatttcaaaaattatccaattttccattcaagaaatatagaaggtagatttccatgagaatatacttgttacaatttctacagaacataatccacactggtcgttatgctaaaagttaagtattgcacctctgctccagagcaaacactcaagtaactttgtaagagcttcaatgcttgttccctttcgtacttcctataagctgataccacatcgacatttgcttgagctgctggaagttttcctactgcccaatttaatcataaattaaatgacaaacaatacgaaattggatcactttgttcataaataatatgataataatcaaagaaaatatatacatgtgcgcagcccagaggcatgccaaacgtaaaatattagacgagattcacaatgctcatgggaatcttgatcgttgtccttactttggacagcagcaaaaataattttaatggttacatttacttttaataattattattgtatgagtgtcattaatttaaaaattaaataaaaaataaattgtaaattaataataaattaataatttattttcttataaatctttaattaacattaattttattttgaaattaaattaattataattattaattatttttttaacaatttgttactaaacaaggttgttttagcaattaatatttttttgtacttaaattattttaaaatttataataaaacttcttataatttaaaattataacacataattttacaatttaaaataatttcacatataaccttttaatttaaaattattgcacatataattttaatttaaattattacacttaaatatttagtttttattaaaaaatttaaaaatttactatagaaacaagtttaaaatctaataaaaattataaaactaaatgaaaaatgcattataccctcccattttttataatttgattttactttttcatttataaccctattaattttacctagagtcaatgtatttttatctttttataattttatacacctacgtgtcaattctatccatttcttcgtcaccgattgatatcattcattatctccataattatttttatggttatctacctttacagtaaataaaatcagtaaaaaaaatataaataaatatgtagagaattattttttctatcatttcctttaagtactctttcaatccaaatcgctacctgccaacaaagattatccaagatctatactcacaatattaccaaatcactcagatcgggaaagaatagatccataaactagtttaacttcatcacatacgatatacataaatattaaatttgttatttgttttaagttgaaaaagttttcatcttatttttttttt

SEQ ID NO: 295623 - DNA, 2118 bp, Cannabis indica
atattaacttttatagacacctatatatatatataatattttaataaattaaagtttaacatattattatataaaaatatgatatataatcaaattcaatataatacaatacaatacaatacgacccaatacgacattctaaacgagacttaaaagagcttttcaatccaatctattttcacgacgtatacattatagttatttatgagccctgtaaatttttaaaacattatgaatagtttacaacgtcaaaataatatttaaatatttttttgtacgcctgacatttttttatatacgtgtagtgagtaattgttcgaaccttatagttatttactgttaactatttaattttttttaaaaaaaaattacaggtgatcctaaataattacaatgtacacattcatgaaagaatattagactgaaaagctcctctagatgtcgaaatagacaaggggtctaccagaacaaagacaatgtgaggattatggatccatgaattcaagctccaataaatattaacataaatttaccaagtaaatttactgttatattaattcctcgcgattcaactatagacttggaattgcattttgaaattaatagaatgctctaccacctttgcagatatgttatccattgttataacaatcaacaatcactcaatcctctataggtgatttatataagtgggatacaaaattactattctatccctcatagtattttatccttaaaatacttagttccttataaatgaaacttcagtacgctattgcaactgaaatgagatctcatttatttaaactccttgaacttagctataagaaaatcaccgtttcatttgcactaaaggaaactaaagattttcatatctataataaacactcccactcagctaaactaccacgtgcctgattcaaagtatgggctagtctgtagggtaagttgttaaccaacagacttaggaactcaataatctaattagttagaatgcatatcacccagaattgaggttgaattggccaatagtcaatataatgatttgacaaaattagttagctaatggtacattctgctatttaatattaaatccagatcgatcaaatcttatgtaacaaataatctgatcttatctaatttaccaaaattttagaaaagaacttaacattttacttagtgtaagtagaacttatcatagattaacttgtgtgtataaatcaagtgcattgactaatcttaggatttcaatattttgattatgtaatcataattattttttactgtgatttacgtcacaataattatgattagctacatgctcggtatttaataagatttaataccaaacaaataatcatgaaagatacgtgaacattaatatgatttgatcaagtcagaataatttatattttctttattgataataattataaatatttacaattagaaaataaaaccctaatacctgcaaatttttagttaacagtacacgaatgctcattatgcaagtaaggtagtcgcacgaattcatcactttaattaatgaaatcggtcgaaccattcttaatcatttattttcaaaatgtttattatttaagttaatgcatttaatgtattaacggtaacctgatgatcggttatgtaactaaaaggacatttgactgggtggatcatgctcttattgaaccactatatttctagtgttgttattgtttactcattgtctcttactaattacttgatattctcgttacattctaagtgaatacccactattatttattgttgtcaatgttcttatctcgcttgaatattcgttatttttggtgttgtttaattttctccgacaacagttattaaaaagttaatctgacactagtgatgtctaataccatatattattataatattataatattgttaatgtaatttaatgttaattattataaattttaatttaataattaatataaaatatagttaaatattcataaagtatctgttatactcgaaattcagctagcatattagaggaagatatgtgtcaagttgggaagaataagaactcagacacgtaatcgtaattacacttgaaatggaataactcgttaaaag

SEQ ID NO: 295624 - DNA, 8262 bp, Cannabis indica
gaaaaaaattactaattagcctttttttttttttttataacaaaaaaaactcatcatcatttggtttttctaataaagtgaatttcttatgtttttttttttaattaaatttaattacacaaacaatgtatataccaattaaagtgaattagttgaatataaattagtgggactcctaccaaagtatcattgaatctattttagtggagaagaaagaaaaatgtaacgccccaacttgcatttctagatacaccccatcttaacttgttcaatggatttgtcaaaaatttatggattataatatatatcttactattattaattatatttaaataattattaaaaaattatatctatataaaaaaatagtataatataaattcacacaattatttataataatattcacatgttattttttttattaaatatagtacaatttttacatatttcattcccattaaaaatattcttacaaacttatatataataacaacaaaaaaaactaaaattctaaatagaagttaataaatatatgtacatatcgaacacattaaggtacaaagcaccacaaaaaataacatattattattggtgcattttaatatgagttctcataaattttaatttaatatgatttagaaaaatactaacaaattattgtgtatgtgaattagtagtatggtattgagcattttaaggtatcacataacaataataatacaaaaaaccttttataaaaaaacagtacaaagatcattcataaaaaaataaaaaataaattaaaatacaaaagacaaaagacaaaaaaagttactaaccaattattggatatcatattggtataacattgaacaccttaaagtgtcaataacaagtacaaaaaattatttacaaaaatatagtatataaaaaaaaaaggttaattaagatttttgccccataaactttgacatgtaccaaatcatgcccactgaacttttttgaccgttaaaaattcctcctgaacaattaaaattgttagatttaaggacttttgtccaatttcattcaattttactaattcggtgattctccatgtactaaatcatgcttctcgaattttgatatctaccaaatcatgttcctcgaattttgacatgtgtcaaatcatgctcctaaacttttatctaaattagccaattgtaaagcgacacatttagaaggtactaaatacttagtaatacccaatagcaattatatatagatatttctaaatttcaattattttaattcttgaaaaccaattgcaagaaggaagaaaagaagtttttttttgggtgggaaaggaagaaaagaagttaaataatcacaagttggactttaatcacaacactcgagcctaagtctaactagattccaaaagatttgtcatcattgggttttgatttgcagtgtaatttgggtgattatttgacctcaaaaaccgttctctagttttgattgtctagttttgaattaattcaactttggtggacagaaaattcttccacgtggcattagaaaaaacaaagaaaaagactttagtctttagccactagtccctactttcttatcactctctatcaaattcaaaactacatttctctgacagccataatttttctttttcaaaaaagtcactacacatataaacatgctctcatttgtaaaattcatcaaaagaaaaagaaagatgagaaaggcaatgatttttgagagctatttcttcatgctatgcctcaccatcttactcaactcatctttagcttcttcaaaaacaacatgtctccctgatcaaagctctacattgctgaaactaaagcaagagtttgaaccattgacagagccagatttgattgatgacacatctttttattcatatccaaagatgaagttttggaaaggaaaggattgttgtaagtgggatggagttaaatgcaacatgaaaacaggacaagttgtaagccttgacttgagcaacagttggcttcaaggccctttaagttcaacttgattgatcaacttcaagactcaatcttgcatacacaacttcaattcttcaatgattccttcaagatttcacagctttcaaggttaacccatctcaacctttcttactctcattttgtagggaaagtccctaatgaaataacttggctaaacaatttggtttcacttgatctttccactaactttgattatgttgatggaattaatcctttgtttcttcaaatagacacatttcatcataacttctcaaagttacaagagctttatcttgatcaagtcaatctcacttcacttcttcctcaatctttgtcaaatttgacctctttgacatctctctctcttatagaatgtgatttgtatggtgactttccaagcaacatttttctattgcctaatatacaactcattcatttgagaaacaactatatgctcaatggttttctcccaacatttcattccactagcaatctaaagtcattgaatctctactccacaaaattttctggaccaatacctcaatccattggcaatctcaaatctttgataactttaaactttgctttttgcaattttgtagggactattccatcctcaattgggaatctttctcatttggtaaatttggattttcaattcaccaaccttactggtcaacttccatccacttttggaaatctttccaaacttgaagacttgtccttgtcctacaatagttttagtggcaagcttccaagtacaatggggaatctggtgaagctcaagagcatttatcttgatcatgctggatttacaggtgaactaccatcaacacttggtaacctcagacaacttgagtttttagatgttgtgggaaatggaatcaacggtcgaattccattgtcggttgtgaacctcactcggttaacaactttgtaccttcattacaatggtttgaatggtgagttgccactaggattgacaaacttaaccaaacttgagtccttaggtatctcatataatgcattgagtggagccattccttcatctttgtttacaatgccttctttgagtgaggttcttctaaatgaaaatcagttcacaggtcccttaaccatccacaacaatgtcacctcatcacaattgacctctctctctttaagttcaaacaagttaaatggcccaattccaaattctttgtttaagttgaagagcttagtttcactttcccttgattcaaacaacttcaatggtacaattaagctaaacatgttctcaaagctaagaaatcttcagagcctttacctttcacaaaatagtttgtctgtaacatacatgtactcaaattcaacccttcttcccaaactattttctttaggcttggcttcatgtaacatgagtggtaaatttccttacttcttgaaaaaccaaaatgagttaatgttcttagacatatccaacaaccgaattgaaggtgaaattcccaactggtttatcaacatgagtgttgagaatcttaaccatttgaatttttctcacaaccatataactcattgggaaacacctcagtttattcttccatggactaacttgaaaattcttgattcaagtttcaacaagctgcaaacttcgcttgttgtgccaccagtgtccatacaatacttctttatgtcagaaaacagaatgagtggaggaatttctgatatgttttgtgactttgttgatcttgttgttcttgatgtgtccaacaatcacttaaatggaactattccatcatgtttgactagcttcagcactgagctatccatgttgagcttgaaaggaaacaattttcatggaaaaattcctcaaacatttttggatggaaacaagttgatgacattggacctcagtcacaaccaatttcaaggcaaagttccgaaatcgttgatcaaatgtaaggcattagaagttcttaatcttggacacaatcagttaagtgacagattcccattttggctccaaaatcttcccgagttgcaagttcttgtgttgcgttccaacaacttttcgggtccaatatggcaaagaaaaatgattgtaggctttgccaagttgagaattgtagacctctctttcaacaatttcaatggaagattgccatttgactacttcaagaattggagggccattaataacgaaattcctagatcgaacaactcgaagcctttgtacatggagagaaaggaagattactaccaaaactcagtgacactaatgaacaaagggtcagaaatgaaacttatgaagatcttgacaatcttcacatctattgatctctcaaacaaccattttcatggtgagattccaacaagtataggagatcttccatcattgattgtgctcaatctttcaagcaacaattttgaaggccaaatcatgtcttccttggggaatcttaagcaactcgaatcgttggatctgtccaaaaacaagcttttcggtacaattcctagagagttggctagtcttacattcctttcatatcttaacctttcacaaaaccaactcacagggccaatcccacaaggtggacaaatggctacatttcaaaattcttcttttcaaggaaatgtaggcttgtgtggctttccattgtcaatgaaatgtgaacaaagcaatgatgagaagcctagtagtagtgaccaagaacatgaatctagtgagaatggtttcacttggagatctgtgatggttggatatggaagtggttttgttgttggagctattggtggatatttcatcatatcaaagaaaccaaattgggtcacaagaatttatgggagaaagttttagtattgattgatattctactataataaatactctgaaatgtttgttgttaattaatgttttcatgtctaggttgttgatctctttatcagatcaattttagaataattgtatatgtctaagtaatatgaatttttcccaaatgtaatatgaaatattagtatatccttttatatactaaatttatagttatataaatgtatataagggattgtccaaaaacaatgtgaaactcctccaaatgaaagagacccaataacactcttcataattccaaaccaatagtagtttatttaattagataagaataaagtattaataaatatattatagagagagaaagaagaattggcttcttatgggaaagagtttctttaaaaatataacaacataacaaccccattcacataacaaaacaaacaaacaaaattaataatgaataaatcactaacaaaaaagattaataaaaaaaaaacttcttttataatgttagtaaataatatttgaatgttattggtgttgagtattgtgttgatcatcaaatccgacgtataatcatggtgcatttcttcccaagccaacgaatacctttcttgaaagaaattttaacattggcttcagcactgtacaacttataagaagtaatccgacgttgtctcttcatctcaggctcattccaccaccacttgagagattgagaagaagatgaatgatgaagacgacctctttgatgataccttcaaaaccccgtgttttgaagaagaaagagttttcgacgatggattataattatgattatgattattagaccaacctgtgtatgctatgttcttctctatatttctacttccaacaccattggaacgatgtcggattgtctctcccatctgctcttctccttctctctctcttaaccaattaatttttttttttggtttggagagagtgatacgttttggtaatgttcaggctttttattttgaagaatgaatggtggagaagtgataagcttctgtcaaaaattagatcaatgaatcttcttctttttcagttataaattttggcctttgttgaatgtaataaaaatgagatgttttccattactttcggggtcataatgagcctaaatttaggcaatgctttcctacaaatacataactaataataatatgatagttgggagagaattgttttgctattaaagacttaaaatagaagtaaattgtcatcactactcactacaaataactatagcccaaaataacaagatagcatactaaactagttagactgattatttcttcttctaattatttcattaatggttggaacagacaaagcttataggctaaagaaccgtttatttatttatttctttaaccgtaaatttttaagccatgaatgatatccaccaaagtaccaatgcaaatggtcttgttccaattgagatatgaagaatataaactctccatcactcctaaattaacaaaaaaaaaaaagagggtatatttacagctgagtaggtcatagtatttacaaattacttggccgcaaggtagattatcagcctgtctttctattagcttctaattctcgtttgttttgtttcttcggtttcttgagtttgtccatgtgagaaacctgcataaatggagaaattagtgacaaagatgaggcacaaacatatgaataaataacaccatttgttaggttccagcttacaatataggatttccactcaaatttttcgagtccctctgcatcactggcggtctgagaatgattccgaacatggccaaaaatgtgaactagtacaacagcgtctagagcagcatattccagctgcaagatcctctacagtgtcagcttacttgaagattagataaatattctttaacttttcattgttaaaaggaatgaataatttcatattgataaaatccaagaattctactatgatacactcttaaagcactcattttataataataataataataaaaagaaaacagacaatattttctagactggcaagtagaaggatgcactctcatcagttttttttttttaattcctctcaggtgaagagtaccttggaatgaaaaaccgtgttaattgcccataaagagctgaaaatggcggctccaacaactgatagttaagtcatagtaataagataagacattgtgtataaaaaataagacaaacaaattacctgatttggagttaaaggacgttgctcccaattactgtttcgtctagtcttgttcagcccagctcctaatattttctgagaaagtagtttaatgtatcatgcatagctgaatccaagtccagcatcatttaaattgtatgtgacagacaaggttatacaaggtaaaagaaatgataagaagatattgtgtactcctttaccatagcaagcccagatagacccccacgaggttctttaaatacattttggatgtcaagtagcatttcatactgcttgaaacactgtaagtcttcgtatgaatgagccagttgctttatatcacattgaaaattatagcctaaaatggacacacaaaccataaagaatcaatattttgatgtgaaacagctgaaactgactgatgaaaacttgaacccaccagccgtaatatttttataaatgacagacacaactggattactccatgacttgaaagaataaggagaactagctcaatatacaaagcataataccaaggcgtagagatttcaggtgaacgcagatactaataacacataccaagttttaaaaccctcggtgactgcataatgcgggttagacagtcgtccataatgtcaggcacgtcttcaaacagctttatcaggtccaagataaacactttcttatcagaagcaatttgcataatagaaacctgaaataagataaagaaaaatagtttattatatgaacaaaacataggaacaataggatagttttacttggtcctcactttggctatacaaaaggtagaatataaagataaaataatttccctaaatgcaacaaaaagaagcattgattatctatgaagatttgttggtaaatcaaaaggcaataagagatacaacatgaattgcacaaaattgacatagttaccttgttgggttcgctgccttttacataattcggtttccattcataatcaataccaacaactttacatccttcaatgtggcttgttgcattgtgtagagcttcagcatcatcgacccaaagaatatcttctacaaagaactcattgagattcaaatagcgactatagagaagacttgcctcgggtactaagagttgggggagagaaagactgcatacaagtcacaacttagcaaaaaaaaaatcaaataaaaatctaccctaatatgaacatgcaaaacaagtaaacttcatat

SEQ ID NO: 295625 - DNA, 2098 bp, Cannabis indica
atattagtgtaattataaaattgtaaataaatttattattggagtagtagattattctatttagttctttttttaacatagcattgtaatgtaagtttatatctatagatattctgtaaagtgttaatattatatgaacatctccatttataaaactaaaaagtgggtcaatatctgcaatcacataaagatatataagttttattaacgatttctagttatatatatctggcttttaattcgcattatcgatagcttaatttttgctcaatgtacgtacgttaaagattccaaaacagttgtatatgcaatacaatatatatttacaagtgatgatatataatttaatcattgagcttaattaagaaatataaccatcaataagaacatgtgccttaatcaatccgaagataattcgaaggaaagtttaatgttgagtgagtgctaataatgctaaagtagtactcaagagagttgtcatgaatcattaactacctactcttatttaatttattagacaaacttacgcttcaaaaacaaaatattatatgttttataaagtgcgaaaatacaaaattaaattagccaaaacagaagaaaagaaaatacaattataaaatgccaaaatataatattaaattagccaaaaatatattttctaagtttttgttctcaaacaatccaagaggccaactctagtctctactaagtgtgttatgtggtaagtattttaatttaggggagtggtggcacttcttgttgcgtggacccatgttatgtttgatccgaatacaatcccgtttaatacttgtatcaaaaattaagcccagacacaattcatttataaacgaattgacacgtctaatcaattaatgatccttgtttaacacatttatgagatatttaacaattttatataacccatttatgacttgttaaagtttaaaattaactttaagtaaatttcttgttagcttcatcaacccaagcatggcctatttattaaacatgttagataagtgaactttaaaatgactgaaactcatatttaagcacatccaaacttgttaattttgtatgcaaattttaaagtgtgctatcgtatttgaccctatttgcaatttcttgttaggagatctatatcctgaataaataatatagattaaaataattatattacataattgcgacaaaaaaaaaaataaaagtataatatcaaaaagcgaaaaataatacttgagatagtcgtattcactctgctatggcctatggataggggtggtaaaataggtttcgacatggcacacgaacacaacacaaattaattttacgagttaggattggaaaaattagatgcgggttgaaaacgggtcgacatgacttcatacgaaataaaaacgggtcaaacacgatacgatccacttaacacgaatttgacaaatttttttaaataaagtaaaataaaaaattattaataataatataattatgtaaaaatatgtatttagtaatttattgttaagttaaatttaattttctttaccatgaaattgaaaatattttaaaattttaaattttaattatatacataacaaactatacatacataaatatatataagctttttaatgaaatctaaatctattatttttctctacaacttcatctttaatgatagcaaatgggttaaaatgaatcaacacgaacacggcacgattctttacgagtcaggttaggattgggaaaattagatacgagtccaaaaatgggtcgagacatgcctgacattatagaagcgagtaacataaaatatgacacgaacacgacacaatgatacgtttgccacccctaggtttctcctaggatttctagccaccatcgcttatctatttaatttttgactagggtccgttgacagcttgtggtctaaggtgtggttctagtttggcctttctcggatggtcgtctcctctttagtgttctagcctgttaatgttctccacgaccggccctagactaaggcgagctaggcccacacttaggacccactcattttaggggcccaaataaaaaaaaaatcttttaaaaaatatacata

SEQ ID NO: 295626 - DNA, 1623 bp, Cannabis indica
ttttattttattttttttgattacttgttccaaatattcatgagaaaaaaaaaaaaaaataaaggcagttccgttcccaatgaaaaagtgggtctactctcaaattgctcaccatatctcactgtccacctctcccgaccgtccacgtcatctttcccgttctatcctctgtcaccctatccttctttcctcgtaaaccgcaagaatttatctaactttctcaaaatcccccaacctctgtactacccatacataatcccacagcaaaggtaactctaccgtctaataataattagccacgtgtcattacatcaatctcaaaacgacgtcgtaataatacacaagttggctcgacgagtcttctctcttctgtgcaacgtggggtacatattcatagtgtaatgcgccaccatagccccacaacgttgtctcagtccactgcttcaaattttagtcattaagaaaccgccacgtggctgttctcttcttgttgtccttctctgttctcagaaggaaagactttcttttcttttttcttttttggacagtccactgtggctagagagagagtttgtgcttacttctcattctcctactaataatactcttagcccaataagctttacagctttttgcattgcagattcagagactttcaaaaatccatagagatgcctcacgcaagcaagtagacacaaaagagagattatatttatacatatataaacatactgttgttgtatagaatatatacaaatactagttggattcaatcttgttaaggcagaatctcagtattttttggtgacaatggagcgatatgaggtactgaaagatattgggtctggtaactttggtgtggccaaactgattagagataaatggagtggtgagctctatgctgtcaaatttattgagagaggccaaaaggtatatatacttgttagctagttaagaaatttatttgttcgtatcatttcctttcgagtcaagaaatttcacaaccagcttcattactaatatatagttctaattttactttttaagtattcttatattggtttggtttggttgttcattttctcatctgagtttctgtcttcaatttatttttgatgggctggaattaaatttttatctttatattattggtttgaagattgatgagcatgtacagagggagataatgaatcacaggtctttgaagcatcctaatattataagatttaaggaggtactgttcttacttttacgcttttataaataattaatgtcatcagattctttgttcaatattttttcatggccatcttggctttttatttagcttatagacttgttcagctatagtctttttagcataattgacatacatagctttattggttttgttttgttataatttcaaatggaaatagctttaaaagaatcagagttaatgtttatcagtacaagaacaatttattgccaacttggtcattccctcttttcattttattcttgttcttttgttccattctcacgagttttgacattctgggcccaaaagtttctttctaataatgtttagatttaatttttccataactaagaaagacaattttttaaaataacaaaaaaaaa

SEQ ID NO: 295627 - DNA, 3461 bp, Cannabis indica
aaaaaaatcattaaatttatgccgcttacatacacaaaactttaggtacttaccgctatttacccattaaaataaaagaaacaaaatcaataaaaattagagaaattaacattgtggatctcgccgttgaatatattgtaaagaaaagcccttagtagtaattattattaaagaggcgtttgagcccttttttgagtactactgtggttcgcaacccaacaacccctctttcccttatcccctccaaacctacaatgccggtcttcgcttcggcaccggctcacctccgtactccgatcaggctcccttcttccttcacctctcgacctgaattgccaaatatttcagctacctcctccgccccccaacgctcctcttctcgaaaatgtcagctctcttattcctcctcctcctctgcctcttcccaaaaccctgaacccttgaaacttgaagccctttctcctattctcaagaatctccccaaggttatcgccacttcttctgccatcgtcatcgtctttaacctcggctctcatttattcagtggcaatggtgctggcggcggcggtgggggtggcggaaatgggtttggaagtggaggtggaggtggagatggaggctcgttttggagaaggttctttgccccggctgctatggccgacgaatcgcagaaccaggagtgggattctcacgggttgcctgccaacattgttgtgcagcttaataagctaagtgggtttaagaaatatagagtttccgatattttcttcttggatcgccggagaggggtcatcgtaggtcctgaggattcgtttttcgagatggtttcgttgaggcccgacggggtttatacaaaggctcagcttcagaaggagctcgagaccttggcgacttgtggaatgttcgagaaggttgatatggaaggaaagaccaatcctgatgggagcatcggagtgacgatatcgttcaccgagagtacatggcagtctgcggacaagttccggtgtatcaatgtgggtttgttgccgcagacgaaacccattgaaatggacccggatatgactgagaaggagaagctagagtactttaagaaccaggagaaggattacaagcggagaattgatagggctaggccatgtttactgccgatgccagtatacaacgaggtgcttcagatgctgagagaccagggtaaggtcagtgcgaggcttctgcagaggatccgtgaccgagttcagaaatggtaccatgatgaagggtatgcgtgtgcccaggtcgtcaattttgggaatttaaataccaaagaggttgtttgtgaggttgtggaaggggacataacacagttggtcatacaattccaggacaagcttggcaatgtcgttgaagggaacactcaaatccctgtggtgaagagagaattgcctagacaggtatttatatatcacattgtagaaatgtttcatctattctaacagttatatttgtgtttatatttgagcttgagaaggttgattatttcattagacacggttaatgttaaatggctgcatttttattggttatattgatcgttgctttggtttaattcttggtggttgtctgatatgaaatttgtagcttcgaccaagctatgtttttaacatagaagcaggaaagcaagctttgaggaacataaattcgctagctttgttttctaatattgaagtgaacccacgccctgatgagaaagttgatggaggcataatcgtggaaattaagcttaaagaacttgaacagaagacagctgaagtaagtacagaatggagtattgtccctgggcgtggaggctaccccactttagtaagtgtctgaaaatttttacgaaccttttattgttctaggcttcagtactgaaaattatgtttttccatgttgggtgttttaggcttcactgcagcctggtggaactgttacattcgaacatcgtaacatcaaagggcttaataggtcaattcttggttctgtaaccaccagcaactttgtcaatccccaggtgatcttagttcataccttctgtcgtttgtactgtatgatttgacgagtgtcccactattgtctgctataagattgtgtcattaacaactgtatatgataatgtgtccccaggatgatcttgctttcaagcttgaatatgttcatccatatttagacggtgtttataatccgcgcaaccgaactctacgtgtgagctgctttaacagtcgaaaattaagtccagtctttactggtgggcctggagtggacgaagttcctcctatctgggttgatcgagctggtgccaaggctaatatcacagaggtaatattgctggtttcttcttttctcagacttgcatattgtaagtaagcagttttatcttttggttttgaagctgttttacttatttgagtatgtgcctagcagaattttacccgtcagagcaaattcacgtatggacttgtaatggaagagattactactcgtgatgaaagtagtcatatctgtccaaatgggcaaagggttttgcccagtggaggagtcactgtagatggacctccaacaaccctcagtggcactggcattgatcggatggcctttttgcaggcaaatattactcgtgataataccaagttcgtaaatggtaccattgttggtcagagaaatgtatttcaggtgagggtcatttggtcataatttactgttgtgctttccatgacatgatttgaatatgaactggtaatgttggaatagattcaaggttgcttccaaagctcttttgagactgattgggtgaactttgaaaagtggtgtgtcaaaaggttaattttaaataagtaaatgaccttgttctaataagcttttttagaattgaaaagtagtaccttcagaagtgtttgggtaaactaaaaagttattttctaatttaaatgattgttttaggagaggctagagtctttctcccaaaaacccttttgtatagttactttctaaattagaatcattttcataaatcttaatttacctttataagggccttcttactgattatccaaacacaggaaataaaaaaaaacttttcatgaaaaaatctttatattattgatatttacatagaaaaaataagccaatttttttaattatcttcttctgtataagcaaaagtaaaagctctctgaaacgtgaacaatatctacttcaactggacacttatagggagagtaataagactagttactctatattatattttgatatttaaaatcaaattttttagattgacaaggactgatttttgaaaagtaagggtttgtttttttttctttattgcaagtaatagaaataaatatacatattacatcctgattgtactttcagtatggaaaacattccaactgatttgttacctgttttggtgactgatttcgaaggttaataaagatttg

SEQ ID NO: 295628 - DNA, 4532 bp, Cannabis indica
ttctataatggaatttgtggggatcgccataaactatttgaataagttttctgcattttcagatctctaggatctcagaatttcaggcttaaggttttttgttgcttgtttctcgagaaaattctcacctttttgctctttgtctgagctcgtatggtgcccatttgacttggtttgattcgaattccctgtttttccagcttggttcttcttggaatagtggttttggcatctgggtatctctcgttttatgaaatttatcaacaagttgatggctttagttgtttgaaggaaaagagaaagtaaagccaaaactgagttcttgctatttttgccaaagttgggttttgctttttctgggattttttatttggaggcaatttttattggctttgataaggcaatgtgtaagtttgatcttatgtgagtatggataatgtggttattggttatggtggttttcatcattgggtactggttgttgctaaaagaaaataaagttacttaacagagaaaaggaaatgaagaaaagtagtttcgttttgtggaaagtggggatactgattttggcattggttgaagcctcttctgcaactctttctccaactggtataaactatgaaggttagtttcatttggacccttccattttcttatgcttcttcttctctttcaattatgctcaacaattagttgaagcataaaaattgagccaaagttgtcctttttttttcatgcgtgttaattttatcttccttctgaattatctcaacagttgtagctttggttgctataaagaacagtctttatgacccacataatgttctggagagctgggatatcaattctgtggatccttgtagctggaggatggttacttgctccccagatggttatgtgtctgctttgtaagtattttgctcagtttcatagttgctaaaacagaatttgaccagtcagaaataaacacaagatctttttgtaattaatgtcttttcagtttaaaactcatttctcagtagagggttattttctaattaggggactgcctagtcagagcttgtccggtactctatcaccttggatcggaaatctcaccaatttgcaatctgtgtaagttttcttcaccattgttttgtaaattacttaatcatttggtttggattgagcctcatcataacttagttaccttcttcttcaatgtgtgtagtttgcttcaaaacaatgcgatttcgggttcaattcctgctacagttggtaaactagagaagcttcagacacttgacctgtccaacaatactctcactggtggaatacctgattctttggggaacttaaggaacttgaattatttgtaagatccaaaaccttatacagctaacatatatgctttttttgatcagtatatggttgaagctttttacatcaggggttctaattctttcacttctttgcttccctttctaccgagtcaggcggttgaataacaatagccttacaggaccttgccctgagtctctatctactgttgaaggtcttactcttgtgtatgtatctataccttttgatctgttgtatttttttctgatatggataaattcttacttgttttcatcataacattcgtattcatgactgccattttatgtatgtgtttagggacctttctttcaacaatttgagtggttcattgccaaagatatctgcaagaaccttcaagtaagctattctcttaatttaatgtctttaacttgcaactgcaaaaacattcaagtaatgtgtattgttttgaattgtaggattataggtaatcctttactttgtggtccaaagactgcggggaactgttctgccagctttccggaaccattatcattcccgcctgatgctctagaaggtgcatatcttgtagttacagtgtatatttttccactcacatgccctttgtacgtttgatgacataaattggcttttttgattgtgtttcattagctcaatcgggctctgtggggaagcgtcatcgagtggctataatagctggtgcaagttttggtgctacatttatcatcttgctattgttagttttgattgtatggtggcgatatagacacaaccagcagattttcttcgatgttaatggttagtattcttgttcttttcccacttaacctgcaacatgccaatcagttatcttttcgacttttttcatgttgagcatttctgtacattctttttttattttctctaaaagtattcattctctgagttgttctgttttttttgtttgtgcagaacaatatgatccagaagtatgtttgggccatttaagaaggtatacatttaaggagctgcgaggagcaactgaccatttcaactcgaagaacattctaggaagaggtggttttggaatcgtgtacaagggaatcttgaatgatgggactgttgtagcagttaaaaggctaaaagactataacactgctggtggtgaaatccaatttcagacagaagttgagatgataagtttggctgtacatcgaaatcttctcaggctttgtggattctgctcaactgaaaatgaacgcctcctcgtttatccttatatgtctaatggaagtgttgcctctagattaagaggtttgtttttttaacctcttatctcatgtcctacactccttgtttttgttaagcttttagcattaatagtttgttttatgttttctcatcagatcacattcatggccggccggctttagactgggcgagacggaaaagaatagctttaggtacggcaagggggttagtttatttgcatgaacaatgtgatcccaaaattatccaccgcgatgtcaaagcagccaacattttgctcgatgaagactacgaagcagttgttggagatttcgggttggcaaaacttttggatcatagagattctcatgtgaccacagctgtgcgtggcactgttgggcatattgctcctgagtatctctcaacgggccagtcatcagaaaagactgatgttttcggctttgggattttacttctggagctaatcactggtcaaaaggccttggattttggacgacaagcgaaacagaaaggcgttatgcttgattgggtacactttttctccctttcaagaatacaaaatttaatgtcttttcttgtctttaataaatgtgaagttaaggttaatggtcagaaaagatccaatggtgaaaatgccataattgcatatcattaaatgctacaaacttacataggaactgtatgcaaaatgtatttatagcattaacttacattgtcatccatgcacttttgcaggtaaagaaactgcatcaagaaggaaaattaaacttaatggtggacaaggatcttaaaggaaatttcgataggattgaattggaggaaatggttcaagttgcactgttatgcactcagttcaatccttcataccggccgaagatgtccgaggttttgaaaatgttggaaggcgatggtttggccgagaaatgggaggcctctcagaaggttgagacgcctagaatccgatcatgtgaacacccaccacaaagatattcagattttatagaagaatcttcacttgtggtagaagcaatggagctgtctggccctaggtgatcaaaccaaaccaaaccacattttactcttttcttgtataccacttctccctcccaaatggttgagtcacctagctttgaaatcaaattgcaaaaatgtatgtgattgttgttgatagctttcttgaatgcatctgtaaaaaatgaagaaaaaaccaaaacaaaatatcaaaaaaaagaaagggaaaaaagtaatatgtataagctgctgcttttgtccttaaaatcaaatgagttaagttaattcaagagtgaccaaggccagaattgttttttttttggagaggttagaagtgtttgtatgtagctacaactactttatagtttgtttttgtgtctaattaatttgattgtactactagtttccaaagttgtcaatttagttgatctataaaactcatgtttcatatctgggttcttaccaaacagtttttcattattacaattgattttaatgaggaacagaaaatgtcaggcccaaatacttgaaacaattgatttgattagttgtattcctatttttctgagcacatgcatgatggccaaatgtactttgccaaagcctgaaatcagctcagagaaaaggacaacacgtgcctcaattaaaaccaaaacaaggcataatgcgacaaagacaaacccagctcaccacttctaataccactggacaatactactctattactgttactgtactacaccatgtttcattgggtgggcttttcaaccacccatacccaaaccatgacccgttttttaatgaaattattttacaaatacacaaaaacaataataaaaaaaaattacaaaaatacatatttacggtattttaaatatttttacaacttttttaattttatttacaaaaaaaatatggtctttttatgctgt

SEQ ID NO: 295629 - DNA, 2919 bp, Cannabis indica
taggttgttaatccaacatacttgttagtaaatctagatcctggtaaaatatttccaacagggacctctacaaacaattttcggggaggccttccctgatgcccacacttgtcatttggatattgggcatctaattgcttggttcttctttcattttcattttttccagtgatggatcttaaccaagaattttggcttgaggcagtggaaattgaaaaaatccagctcctatggaggaggttattactgaagaagttctggtggagggtcccgtccaggaacttcaatccaaaggaaaggggaaggttaagacaccacccctgcccctgtgttcaatgcctccatttgggagatggaccaaaaaatcatcagcttccgttcatacagtatgctggagatgtatgccattgaagccggattgcacaaaattcttggactgaagtggcatagactatccgttgcggaagactcggcttatgtgagcacggatggattcagcgcctggaggtgggcccacatttttagtgatgcacaccttcctttgaggacttactttgtggacttctgtgcgtggatagggatagctccatttcagttgataccttcagcttacaaactcttagttggatggtacattttctgcaaaatccacaagttcgaggtccctacttcgaaagaatcctttatttttacagcgtgaagcctcagtcgatgaggaccaattgcaagaagttggggttctccaagctggagaggtattctgatgcctactatcctaccggccacacctaacattcccacgacctccaggagaggtattcttctctaccgatttcccgttgaaaagggtgcctaccctccaattaagcttccaaatcccaagtaaatacttttacatttgctgttcttgtattttcttcttttagaatttttcctactctagtttaaatactaatagggctttgatgttacttgtatttgatagagcctatgcctcggagcactgagagtgaggaaatgaccaagaaagtagccctatgcaaggccttcacggaagctcagttgaaagttaagggcttggctatcgcaaagttactttgtgaacacaggctaattgctggcttccaaagcatcgacaatgttagtggcaggggccaaaactaggcttcaaaagaggtcaaggaggtgatagctcatgatttatccacaataatcatagaggccaccaaagaagatgagtttttggaagttaattggatactctgccattcgtatcccttgacagaggaggagaagatcctggaaagatatgctacagcgtacccagacgaaggtgccctaagagccatcatttctggaagaggtaacagacccttccgagtatttcgtacccccagcctccatctcatgtcctggatggaccaagggggattcgataattacttcttagatttagaccatcttaagtacccccatgaaagacttcatagacaaggtagagaaatcgttaggagtcctagtaatccagaattgtcccaaatactattagagtggagccttttgcaaccatatcttttcccaattttagagagcatggaagcttcattagtcttgaagacatgatcttctttgctcgtggggaaccatataactgcttactgaatggttgcacccacacccacactttttaaaatatgttgttgtatgctgactggacttttgtctttgttattttgaaaattgcttgctaaccatccaattgttttgtttgcagatactccaaaagcaaagatgttgaggtctttgagtgacaaaattactgtgagacttgccaagacgaagggcaccaaaaaaaggggaaaaataaagccatggcccacaacacccataaaccaaggcctctgtcaacatcttcttcttcaggggtttaggaaatatcccctcttccaaaggcacctacgagggctccaggttcctaggctcccattgggacaaagaaaactcttgtcgcacttggggaggcctcccaggaactagtggcgtccgagattagcgtagctcgagtaggccatcctagacaactagcctcggtagaggcttcacttgtggtagttatggagggggctgctcagcagaatccagagaacactattatctcgaatgagaacctagacgggccagtctttcccaagaagggtgtttccaggacacccaagagccaaactccgcttccccaaactggaagggatgctaagaaagccaagtctactatggttaggcaacattccccaaaagaggatggagatctccatggatctactactccgcctcctgacccaaaaatttcactgccaccatcatcatcatcaacacaactccatacacaatcagatcaacaacaacaacaacaacaataaaactgcaacaacaacaacaattgcaaccgccaaatcaatcagaccctaatccacccaaaaccagtcctccatctcaaacacgggccatctagcccataaaaggaaagcaatccacttccacttagccaaaagggcagcagatagtcattgctttgcccaagattcctccgttgaactttaaattgtctttgaaacccaccgttcttaaccatgagatcttgaaaaaattaggtgaggcagagcacaccttgaggcaacgccacgagaaggaacgaatagtgctctaaaagagagttaacaccctttctttcgtgaagaggttagagatgtttgagggaatccaaacctctgccctaggaggaccattaattgacatataagctcttggcaagcaagtggtgcccaaggtgggaagagaatttgcaccttttgctgcggagcttctgttgggaataattttaccaggatctagatttactaacaagtatgttggattaacaac

SEQ ID NO: 295630 - DNA, 1619 bp, Cannabis indica
aataataatttgcttgaactaagatcatgagcttggtatgatggtgccaacatagccaaatccacagatgaagaaggtaatggtttgaaggaataggtaaacaaagtagttgtttttgccatgaacaaaatcatagcatccacataagaagaggaacactccaaaaccaagctccaatagatgtaatctgtcattaaattaaacacaaaacaaaaaaacaatgaataaataactaaaagattcttcttttaggataaaaacaaagtggtataacatgtggttggtttagtagtacatgtgcaagaacaaaaagaaagaatttttagtgataaaatataccttgcaccgaatttaaacccgggttttttgaagagtttgaagggtgttttcttggtgatagcagcagcagcagcgttgttcttgacgatatcacctaatttttcggtgacaacccattcgttgactctaccggcttccaaaagaccgatcaaagtcgcctttgttcggtgcatcgacataacattctcgaacagaatccagtaaaacaaaaggtgaattgacctgttaaagaaaaaaaccaaaaagcaagaacattattaaagagaaaagataacaaaaatacagtgtccaaaataatatttaccctaaaaaccgaaaaagcagactaaccttggagttccaacagagttgagaatagtaatgacagaagggatatagacagctccccagattggaactttgacttcaggaaccaaaatggtcaaaggaagtacaacacagtaaaatgtgaaagtcaccatgtgagctatgatctttctcacaaagaagaaactgtatataacatacactttcttccagaatttaactttctgcattatacaaaaaacaaacaaattaaaattaaggtaaaaaaacagacacaaattaataatgtttcttcacatttgtcactttaataattagctaaccttatttctgacaatctccatcaccattttcctgaacaaatttgctgggccacatgaccatctatgctgctggaatcgaaaagcgttgaatgtactaggcaattcactcttcacctatgtagttataacccgaaaaagagaaaaattggtaagaaaaatgctttggttattgtaaattacagagtaaagaaaaaaaaatgtacctgaagatcaccaaggtagacaaatttccatcccctaagactagcacgaacggcgagatccatgtcttcgacagtggttctgtctttccacccgccggcctcgttaatcgctgcaattctccaaacaccagcagttcctacaagaacagaacaggacagcattagtcaaacttagttcagttgaccagttcatagaaaaaaaaaatgttccatacaattgaccattagaaaatgaaacataatataatgaatgttacaccttcatgaaatttctccattttgagatttgttgggtcttagaaaaattaaaaaaaaaattaaaaaaaagttattttgtgaaaaaaatatagaaaaatcaagtaagagtaaccaggtaccaaggtaactaattaccataaagatggtaaccaattactttatactgttttttccataattttttttttac

SEQ ID NO: 295631 - DNA, 4582 bp, Cannabis indica
atttttatttttcaaaagcaaaatttttaaaaacgaaaattttactttcattttgtgattgaaaaattaaaaaataaaagtgttaccaaacggcaccttactttataaatttttatcacaacccctgaattaaacattagtaattaatctttttgtaatctttttatgtatatatatatataatatcaatattgtctaaaaacaatacttaaagttctgtcaaaattttgttagaattaaagacttaacttttaataaatatttatacaattctaaataatgcgtctcttaatattaattcaacttagccaaaaaagtttgttggagtttgaaaatgtttcttttcaatctcattgtataagggtgggcactaaaagttaagagtaatttgcggtataaatatttaagtttaacttccacttgtaaataaatatttaaatttaatttttagcggtaataatatttaagttataattttaaaatttctataggtatctgactattatgtattaagtaaattaacacgtattaatttctgattagtctaagtcattattttattttttcaaaaataattagtttaaaacataccaataagaaaatgacacatgtataatgactaattaacatttaacggttagataactacagagttctagaaatataactttaagtattattatcgctaaaaattaaacttaattatttatttacaataaaaaatttatacagaaaattactcaaaatttaataaccaagactctttgatatcgtctttgagtttgattgtacttgattttacacaaattttttaaatttaatttcaaactgctaatttttcttattgttctagattagataatattgtgatctatatcttaactaaatatggcttattagaaattattagcaatatttagtgaattattttagctcattttaggtgagcacgtttgatcaattaattagtgtggcccttcctttaagctctttgcttaggtggtttatttgggcctttcttctccaaagggaaaattaaacttgccaaaacccctaaattgaatctctcatcgttgcatgtgaggattacgtggcacctatatcatgcattaaagtattggtcatactataagcttaaatatatatagacaatagaatttttatttaagaatgtaaaaaaattaaacaaatttatattagaagaaattaaaacataacaaatattaatgtaaaaataataaacaataaatgatttttaatatgatattataataaaaattatttttaagtaaatataatatttatatatattataatttagacataaataaatttataaactgtaagtgtatattatataaattacattcaaatagatgttctatataaattttattaattacatatatatatacatagtaatattgatttaattaggttttattcactgtgtatggcgtaatatttttgaacatacatcaatccgacgtcgatgcagataagagtacaactacaaagctggtcttgaatgaatatacagtactacccattcccaatgggttattactgtattgcccttgagtggatttactcaacaaattctcattttctgattttcactctcaccacaaattaggcctcccttctatacgtgaactctctatcaaagacatgggctcactccaatccatcacactattttattcatttggattttgaaaaggacgtcttctcttctacatataatacatatcttcttttttttttcaccattcaagttttattcgttcaattttattaaaaaataatgtatatatatatatatttttgtagtgaattcataagtaataaaaatgttaggcaaacagaatcttcaaaaaatcaaaagctagcaacttttggagagttgtacagctgagacaatgcatatagcatgacatggcatatgtaatatatatgattagcttcgtagtaattaagagttgaaaatctgtattccattaattatgataattaattttcaactttatttttttaaaaagcagttcactgggtcattccgtaattacctcccatttccctggcttattaaaatatatatattaaacaaataaaccttttttgtggttcaatttttggattattatttaagttaataataattattatgtggggatgactccacttaatgagaattgaatatataaatatatatatatatatatactccgtacagcttgccaagaactatgaactccataaattctctcttttgatctataataactttttttttatgtcaataattcacgtcacaataaagatagttttcttaacttctttaccaaggttgtatttgaattgattatgtaaactatattaaatgagatgagaaagagtcgataataattcatgtttcatcttatatatattattatgcctatttatttattttcattgcgctgtattaatttcttctttgctaaattaattattttcgtcacccaaaaagtggtgactcggttttgtgacaaaatttgcaacaaatcactatgagtattcttcaaataataatcttaatatatacacaaccatctaatcagtgattaaattgattcttaaaaattgtctcaaacatcaactaaattcaaattacatatgtatatttatctcggaaaacaaatatatataaatatataaatttaatagcaaagaggaaacatataaattttggggttccattggttcagatctactgccgtttaacatgtcctgaacccttttcccatttgcttttctaaggtgagaattgaaaaataagccaaggaaaaaaaaaggttaattaattattaaatatataagaaagattgaagtggggttgatcccaaaaaaggccattgaggagagagaaagatagttttaactgttgattagcgtctctccttcatgttcacgggatttgactatttccagtaatgttttcccaaatctaaacatatattatatttttaaaaaaaatcttaaataagattttgttaatttgataaatactgtatttaaaaaatactatatttagtgcaattttatatatataaaaaatcttcagaaataatttaactaattatttttttttttttgaatgaggataatttaactatttgggttttataagaaataattcattaactatagttgggctttaaaattgaattagacaggtagtaattgcttagttaatgcttacaatagtttttaatcatacaccatcatttactagactcttttatttattttatttttaaaaatttgtattttgctctgagaaaatttatataaaatatagtatttagatttcacgagaactgtcgtgattggatcggtacaaaatctctcactctcttcctctctctctctctctctctctcttctcgcttgcttcagtagcttaaaacattcaaggaacaaagagaagaagaaaaccatagaagtgtttatggtttaagccaaagccaaacccaatcatgaattcgcgctgattcaaaagggtgtctttggctctgttcgttttgctttcgttctttttatctctgtttctgcagtcttcatctctaggtagtgtttgcttgttcttgttcttcttcttgtttttatgtgattacttgaacttgtttgatttgattgatttcaagatggtttgttaatatttttttttggggttattcttatgatattgatctgaatgaattttgggtctatttttggattttagtatgataaaattgaatggagctgaaagttggactgaaaaatgagcttgcccttttttgctgataagggtttccgaaacgagtgaaagtgatacaactgttttctttggttatctcggaacgtatctactttactttcccttttctgtcctcgaaataccaattgccctttataagcttattcttttcactttctaaagaagactcaaagttctattatttttcatctttattgactgaaactgtttccttaatacgtttaattcttactgggtttatggatctagcattgatatttggaaaatgaccatttccaccagggatacaactctttagtttttctgggttagaaaatgttcagggtttttcattagcctgtgttttaaactctcttgagtgaagaaccaatctaagtttgcatatttcttggaaattaattgaagaatatatctgggtttttttttaatattccttttacgcttctacttgtttgggttagaaacattggtgggcacgtatcttatataaggatttattcgtttttggtggagtctctattactgtcagtcaaacaaattccatttgagaataagcttttttaaatttttgtagagcttgaagggtaggatttgagtctgtttctcttaatctctatcttgcttttgttcagattgagttgtttctattttaatcccatatattcttttcttgtttcctgtagtctcttctgtgtagcgactagcgagtccgtggttaaagatgtccaggcctttgcctctgcatcgtggcaatatcttctgggggtacgaggctct

SEQ ID NO: 295632 - DNA, 5570 bp, Cannabis indica
ttttaaggtcttaactctttatctctttatcttcaggcgtatgtacaacagctggaaagcagccggctaaagctaactcagctagaacaagaactccagcgcgcccgccaacaggtttccgatttgcattgcactcatcttttagatatgtcttttcattattgtatatatttagaataagtggcttttgtgaactactcatgatgctgttttatttatgcagggtatatttatttcaagctcaggagaccaatcacattcaatgagtggaaatggtattataaccttatagcctaatttctattataagttgccattgcttacaattgttcaatgctatcaaatttggaggacttccttaattgcaaaatgaaagatttaggattctaaccacatgcttttagttttaggctgcatcggtagttctaacctgattttaaaatcataaaatgtacaatgataattgctcaattaacaatttacattatgcaaaaatgtttgtcaatggatgtcactgtgttggtattgatatcatgagatctggggtatctctgtgacgtttcttgatggtttggtactataataatttttttttagtattgagtttattttccaccaccttgatttttaaagcttggtgctgtttaccccttccttttctttaattaagttttctacgtgctctaagaaaaccttacgtattaaattaaaaaaactttataaagatctgttcaattaaaaatgtacctattcttgactttgattttggcatttttgtgtaatttaatgtttttggcatttttgtttatcctccctatgtaattgttctttgctgaaagacttctttgttaagctagtttctctctcttctttttggtttgtttgttaggattccttagtcttattattgtacaaacaacctttaattttttttacatgtgtatatatgtatgtatatatatatatatcataaatcacacatggctatttattatatcgtttatttattagtgctgctttccgtggcaaaaattcagtggtgacaagttttcttattttgcatctacatcaatattcaggtgccttggcatttgatgttgaatatgctcgttggctcgaggaacacaataggcagataaatgaattgagggctgcagttaattcacatgctggagatggcgaacttcggaccattattgaaaatgtcactacacattttgatgacatattcaggttgaaagggattgcagcaaaagctgatgttttccacattctttcaggaatgtggaagacaccagcagaacggtgtttcatgtggattggtggtttccgctcatctgagctcctgaaggtgagaattcttttccatgatttgtctgccctcatttcaaagatgttgatgtggtagaaacttttcatttgtgcactatttgcttatttttttcctaaaaaaataataaatcaaaagatcaaaaacaagaaattggtacatagattgatacatgaaaaagaagcacaaaacgaagaggagcatttctccgtaagggaagacaatatgcttcgttaacagaagctagcaccaatgtagtcttctgatttgactacaatccagtccctcaagagaagagagtaaatcctatgctccattttttcagttcaattgataaggttaaaagggaatatgtatgagttctttggagttgggagctctaaaagaacctgtgtggatttagtctaacagacgtagtactcaagtaggctagcactttacatgaagctatatcttcccatacgcccctgatttcatttgcaagaagattatttatatggccaaaaatattgtacttttcatgtataagttttatatcaggacacattgaaccgttatatttagcatttgataaatactttctagatattacaatttttcgttaaattgtgttcagagctttctaacctgtgataagtaagatgcgcaaattgtccaagttattctgtaaattggctaacaaaattcactgttgaaatagtactagtcaaatttaacatttcgatagaaaagctcgcgatggtttagttcaaagttagttatttgaagtagaacttggcttagttcgaacaaaacttacttaaagcagaacaaagttctcttctacaaatcttgtagcctttagactagtatcaagtatttctattaacacaggttgcttcctctccctctccaagttcactttcttttattattattattatttgttccatgtaaaggttggtgtttataatgttgactctactattcaattttacttaaatacacttttctatggttcgactaaacatgcattcatggtttttggttactgtttgttcttaagtcgaaaattcacatttgtcatattcagaacaccaaatctaattggcagtattattatgcatgcaaagggtagaaatttttccttaaatagatgaaataattcaccacctcaacttgtaagaatcattagtttttccaaaagtgacaatccattttgcatgacaataacttgtttcctttcataagcattctctcacgtgtcatgctcctttggacttttgtaataattgagttggcaacgggtgcagcttcttgtgagtcaattggagcccttaactgagcagcagctgatgggaatctgcaacttgcagcaatcatcccagcaagctgaagatgctctgtcacagggaatggaggcactgcagcagtctctggccgaaacattggctaatggttcacctggaccatcaggagcatcagggaacgtggcaaactacatgggtcaaatggcaatggccatgggaaagctaggaactctagaagggttccttcgccaggtaatttctgtttcttcatctttgtattgcaagttcaacttccatagctgaacttcagtcgatcaccaataaactaaggttcaaattattagacaatgtatgggtataaatggcagtttcagattcctacttcctagtcctttttaaagcttttgcttaaatataggattgttagcaaagtggattttgatgatgtcctccatatcttagttggttatttagtcttacttctgagaactgaatagggtatttaaatttgtttagagtgtggggtgatcataattttcttagtgttccaccactctattgcaagtggcttggggtatgaatccccataaataatcttgtggaaaagaaaaaaaaaagtgttaagtgtatgtacttctgagaactgagtagggtatttaaatttgtttagagtgtaggatgaatataatgatcttatggggcgtttggtatgaggtttagatttgatcggaatgggaatgtaaaatttaaattaaatttgaatgacaagggattagtgtttccaagtaggtctcactttttaaattaaaatggtggtaatgctaatcccctcaaacacacgggtttcatattccctccaagtctactcctttctgctctactctctctaactcaaactcacataacaaaaaccccattagatgatgtttggttggaaggaaagaaaacataattagaataggaatgacatttcaatactttaaaataaaactaaacaaaggaatcgaatacaagttgtttctttcccattctatttcatttcattccctccaaccaaacgccaccttagtgtatcgccactctaggctattgcaagtggttgggtttgaatcccgccataaatgaatcttgtgaaaaagaaaatcaaagtgttagtgtatgtacttttgatgccaaggacaatttcatagcttttgcataattatacctatttcctaccattcggatccaaattgtgctggaattgaaatgattatatatatttatatatatatatatatgtatgtatatactttcaggtatctcatttcttatgatagaaggtccattcaatttcaagttttaaaattatctctcaactctacagtaactgacagatttgtgataatttatataaattataatgtcatagtaagtgattgtttattttctactttcaaggctgataatctgcgccaacaaacactacagcaaatgcatcgcatattgacaacccgacaatcagctcgtgcgctacttgcaataaatgattatttttctcgtcttcgagctcttagttctctttggcttgccaggccacgtgagtgaaaatcactctacttttttcatagtcatttgaaggttgactctccacaaggagtgaatcgtcattatgatccagagtcttggagcaataatatgaatattatagggcaatgggtggacctctgttgtgcagtaaggtaaatacttcttatggtttcagacatgttcacctggtaatgttgtatttcttaggtttgaaatcatggtactaataatctgattatgttagttatttaatagaactaaaagaggaaattagaatagtgttgtattgtaggttacagttgtcaatttgtataccagaaatcagacgtattatcaagattcaagagtgcattggttgaacatttcctcgagtgaacatgtaaatatcttttttttttccttgcaaagttgttgacctactgtttcataagtttgttataagaattacatttccagtgttattatgtgatcggttatgcagtgggattaatctatttgtatctactttttactctttgatatatctttgtactcaaacttgtagtcttgtagtagtcagtgctgcatttctttctaatgatgcacgagaatcggttagtttttgtaattactttctcatacccggaattcacattttcatgggtcttgggcttacactggaaataggtacgaatggctaacaagtggccaaccatatcagtaaagagcggggtggttgggagtcttagaaagttgagcaactcagccctaagccatctacaggagtggcccgagcacctcgtctccagctgcagctaaaggtaggtgaaaggagtgtccaagcacagaataaacacaagccattgtttaccatttttaatccaccacacattctttttccacccctaaacggcatgagctcaaagtactgtcctgctttaccacaccctttaatcatcagtatgtgagagttgtgatacttgaatgtgtcaagcatgtgactccataatttttcattcaaaagttatatagtgcaccaaaactcgtattaataattggaaagcatcaaaagtggaaggaaaagaaataaaacaacactgcttggtgcggtatataagtaaaattgttaagaataaagaaaaacttcattcaatacggatttgtaaaattcttgcgtaataataatacaacatactatattttttaattcctaaagttctaatggctgatgttgaaatttatattcttattcttatttaataaatatatatgggtgtaattttaataggtattatccggatggataatattagaaaattttgagtttttacgatgaatatttctatttaattggaatttttttttatttttacattatataaactgggattggtccatcagct

SEQ ID NO: 295633 - DNA, 1484 bp, Cannabis indica
aaaatcatatccctatatatttatatattttcatgtttattaccaaacaagcaagaaatcaactaacatgatcacaatcaaaacaagtcacaaagcatatagtactgtcactacatatcatttttatttcttagtagaaaaatatatattaattatacaaatagacatttcttgtagaataattgcaattatttaatattaagatgacaatatatatataatataattaatatttgactattatgtttattacttgttcaaattttctcccacttgtcttagttatttatttattttacttgaacttttatacaaatgaatgctattgcatgaatcaaacaaaaaaaataaagggaaattaaaaatcattaatcaatatatatattttatatattccaaaaaaaaaaaaatacattaatatataagtataagtagatgcatcttttttaagagcatttccaatctgcagactaaatttagtatccaaaacattttttactccaactacaatattaaaaattacattaaaatatattattctttattattattatatatatattaatttttaatatatatttaaatttataatgcttttattatgtactattaattgtgttttaagtttataatgttctattctgtaatattgagtatgtctattgattaattaacaatgtgatgttaatgtgtttaaatttgtaaagtttgcattgtgtaatattaaaaaaaatacaaaaaattaataattttttacttaaattatgatatgaaaataatttatagtattaatattttatttacaacaaatatattaaattgttaatctttttaataatcattaaaaaaagttccaggcccgttgctagagtgccacaacatatatgccaaacacggtagcaacacgccaaatatagtgtaatatatgcagtctcgttgaagacatattgagcatcaatatgaattatgcattggagctgttctaatagtcttttgagaaatgctaaagattgtcagtagttcccaacactaccataaaatgttgcattattattggaatatttgttgcaaaaatacttatacaattcactttgttgtacttgaacttttatgtaattttttgagttgcaaaaattgctataaataatgttcattttgttacacttaaatttttatgtaaattttttttgcagtctaaattttatgtaattcatctttaccaacaaaatcattatgtgttccttttattttatcaactcaagaattaatgttgtatcatgtgtgtaacggttgagatttttgtcgctaaagataaactacataagaatttttgccacgaaaaaatgtacatgtaaagattaaaatgcaacaacgtgaattacatataagaatttttcacgcaaattttcttattcgtaccacctcttatcaatattagctcaattttttttaagcgccactattacttaagaatgtaacgtccc

SEQ ID NO: 295634 - DNA, 4645 bp, Cannabis indica
tgggtttctaaagtggttgcagcgctagttgcaataggggtaataaaatcaaataaaaatagaataaagaggagtgttaattataatttatttaattttcacgcttaaaatgagaatttttttatagcgatatttgtcataattataatattattttataaattttaaaaaatttaaaataatttatagtaccgaaaataaagttcgtgatattttaattcatcatgaatgttcagaaaatttcaaatttatttttaatacgatatattatttaaaattttaaaaaaaatataaggaatatcactatcaaaataatttaaaaagaaatacattttacattttaatatgtgtgtttttacacaaaaattaattaaaaaattataataggagtctcttgtacttgtagtaaataaaataaataaataaataaaatctttgatttgagagtccaagaaagaaagtgaagaaagaagacccctttaatctggtgttcccttcttcttcatcttcttcttccttctctctctaaagatcaaagctttgtttgtctctcctgaccacaaccaccaccatgcccagccacaccccactccggcaaaccccatcatcatcttctttctcatcatcttcatcccattccttcacttccaagcttctccttcttctaacccttctccctctcactctcgctgccttagctttcgtcctccaatggcgtggtggggtcaccgatcccaccacccattgggccccacctggctctgagaagctctttcccggcatggaagcttctcccatctcagctgtctctcactctgctcactccgattgtctcaagcttggaaggagttcttcaccatcttttccgtacggtcacgattggaagtttgattatggatctaatctcaaacctaaggttgggttttcatttttgttgggaaagtttcaatttttatgacttgatctttgcttttgctgaattgggtttttgctggatcttgctgaactttttgaataatgccatttttgtgtctttagatttgaggatattatttgattttggggatctttttggactgttgtttgctttgctcattgttttatttaagatttgatcacttgattatatgcttatacaagttttgttaagacttttcaagacttaagataagtgttcatattatggtttttgtgtgtgtcttattgtatagagatgtattacaacaagttatctcaaacctaagattgggttttcattttcagttaatttttattggaaaagttttgatttttatatttgatctttgcttttagtgaattgggtttgatataatgccatgtgtttataatacaaccttggtcagaatttccatttttgtgttggaaaatgttccatatttcaagcaaaaatagttttttgatgatattaacgaactatttgtactgtttgctgttttctttggtcttgttttttcttattttaagattagatcactggattctatggaaatcaaattttgttaggattgttgtttttaactttttaatactttagtttctcctttgaaaagtggtcttatatggtttttctgagtgtgtgtcttattgtatagatatgtattacaacaagtacatcagctggcttagaacagattctaccatggatgttttaccataaggttcttggagttactacatttttcctgtttgtggaaggaaaggctgcaactcctgaagtttcgaaagttctgaagtccattcctgtgagtttgttgatactttcgatcgtatggatgtttttttagtggcattgatttctttgagcattaaaatttacattgctttctcagggagttaaagtgatatacagaacaaaagagctagaggagaaacaagctaaaaggtagattagtcttgctacttttagtcagtccctaagattaaatctagaccgaaaagtagcctttcttctttcccacgaaatatacgaacccggttttagactaatcaatgtaattgtattgtatctttctgttcatgatgtaaatctcagtgacattttggatgaatgattatgtattttttttgtttgtatctatttggcatcatcagtcggatatggaatgagacatggctttcgagtttcttttacaagccttgcaattatgaactattcgtgaagcaatcgctcaacatggaaatggctattgtcatggcaagggtaaactcattttctcattgctttgctggtaagttttgttttagaagtttctttttttacgttgcacattgaaatattaggatgctggtatggactggatacttcatcttgataccgatgagttaatacaccctgctggtgctcgggagtattctttgagacaattgctgcttgatgtgcccaaaaatgtcgatatggttatatttcccaactatgtaagtggatttgtgtacatctttcgataaatttgttcgagtaatggtaacatcaagggggctacctgtcagtagttactagacaatttaatcaacaacagagtttctaattttcaggaaagcagtgtcgaacgagatgatattaaggaacctttcaccgaggtaaatttctccccgagagagtgatcagttcattctccgtattttgttttgcatgttagtcagtgaaattagtctgacatgttgtgttcgtgtacctacccgaacaggtatcgatgttcaagagaaactatgaccatctcccgaaagatacatactttggaatgtacaaagaatcaactcgtggcaatcctaactactttttgacttacggcaatggaaaatcagttgctcgagttcaagatcatcttcgtcctaatggagcacacagatggcataattatatgaaaactccaaagtatggttcactccaatttgtttcgattgatggctgtcatccatctgaacctacaatctttgagacgcaagaaacactaactcattctatctaatttcttttagtgagatcaaattagaagaggctgctgttcttcactatacttacgccaagttttcagacttgacttctagacgtgatcgatgtggctgcaaaccaacaagggaggatgtgaaaagatgctttatgctcgaatttgaccgaactgtgagttatatttctttatttacaaccatatcatgaatgtggtaggtatctgtgaagcttgattttcacatctaattccttgcaggcatttataattgcgtcaactgcaaccgaggaagaaatgatgaactggtaaatataccatttcaaccaatccttttgttcatttcaagtcggaccatgatacaaatgttcgggattctgagtggtgcttgtttgttcttgttcttgttcttttaggtaccatgaacatattgtatgggatgacaaagaccttaaaatgaaactgctgagaaaaggcatcttgactcgcatatatgctcccatggtaagtacattttcaccgaaaagagaatgagagcttacgcgggatatcaagttttgctttttcttactaatgctcactcgaaaaacactttctaaattttgtatcaggtcataatacaaggtctacgagaatctggtgtctttagctcggttatagcatcatcggcttcatcaaatatctcaaaggagaagtttttaactaccattggtagtactagcagcaactcaacccgagctgttgcctctgaatctcttccatcaaggaagataggtaaaatcagaaagaatcaagccactgtgaggaaggtcttaacgatcgaaaatgctgcttctgcttcatatcaagaagcagctgttcctccattgtcttccccttcaagtgatgatgttgaccatttcaccatcatggaagcttgaaagcgatgttgttagtgcaacggttgctctctgatcgcgtttttctcgatgggaagagctataggagagtagagttgttgttgggggctgcgttcgcagttggttcttcccgatcagtatccaagcggtggtgtaaaatactaagaattttaggaagagagattattttgtcaagctttgacttgaaaaccataactacaagttgtggtgattttttttttcttctttttgtgtatagaaaaccacagtgttgagatatcatttttctatgttatttttggcctttttgtaaaaaaagaagaagaaaattggaaacttatttctacgtaaaatttcaacttaaaaacataagacaagactttaatatcaacaatacatgatattacttaaaatttggtaccttaaaccatctctaaaatttgagatgtaaaagaacatgttaattaaaattaaataataaaatattaaaatgacataattataagagtattgttattggagattagtggtgtttaatattttttataggtgacgcttcacgattaattagtgatattgcttaaaaattattttcttgagttatatgaaacttgatacttaattacaccaataacagtatgacaccaaagaaagtgttaggtaccagcaggaccagtcctaaaacaaagtgggtcacagtgaaaaaacttatttttgagcctttatgttagaaaatatatggtatttttcaaagtcagttaaaatatatataattttagaagg

SEQ ID NO: 295635 - DNA, 1661 bp, Cannabis indica
ttttgtgtttataaaatctgacagggttgatggtgaaagtctaattgaatttgattggtacggtgggtgaagaggatggggaatgcttggaatagagctctgataaatgttttcctttttgttaattcaaatatatatatatggatggaagaacaatagagagggtaagagcaaagacccacctttctttcttttggggatgtaacgaaggtttcttttttatttcttcttttactcatctcaattacattttcttttattgtcctcactcttggaggtctaatttttccaggaaaaaaaaccctcagcttttggcgtatatatttattattatgtgtatcccaatgtgtatatgtcttggcacatattaaagcaaccctttctcaaattttcttgccttatttcgttccctgttgaggctggttattgattggttatttattagaattcagagatggagagaaatgtgtatatattaagaagaaaaaaaaagaaataatacaaaacaaaacaaaaatggtgtctcttattcatgtgggcttgcctttgaaactttattccaaatgaaaaatctgtctagatagagtaaatgcttcccccattgataaagtaaaaggaaaatgttatcattgatgatgaggtcctcaatttcatctttatttatttttctggatttttttttctttttcttttatcttctgtgtatttggtgatgaaaaagagactgagataatgagcaggaaagttggtgaggtggatgaataagagcctgagaaagttcaaatggtacaaactccaatttgagactcgttgtttggttttatatgggggtggattcatgtgggccatgagttctcatttcattttctatttgtctttgaatgttataattctacccaaaaataaataaataaaaaacttttttgcataaacaaataatagttaatatttactcatttgacaaaagttagttgttgaaaagggcacgtctctttattgtctgtatctgacacgtggatatttcatctttttttttagagagatcttctctctctaatctctttatatatctatcaaagaaaaatctctctctatatagctttatctttcttgtatggcttattatattagtatattaacttttttttagttattattttaatcattactttactactacgactcaccagtcaccattatatagaataaaaaaacaatttaggctggattattcgggttaatcaatcatttgcccctcaaaattctaagttgacacattcacccctcaaaatttcactatcgagaacaaggtggttttagtcttcctcttccggaagaaccaaccactcaattctatttaagtaacgtttaattaggagaaataaaaatataaaaataggaatgagaatgagaattaaaataggaataaaatgaaataaaatttaaaatgtataaaaaaattaattaaaaaattattaaattttttcaaatcttgcattggaattagggatgacaattatacctgcgggttcgcgtacccgcccttaatggggcaagtacaggggtcgactttcgggagcggaggtgagtatgggtttaaaagttcatacccgagtcggaaacgaagcgggggcaggagaatagatacccgtcccgaaccc

SEQ ID NO: 295636 - DNA, 1524 bp, Cannabis indica
atgaccacttgaactagcctcgagtgactttttgcttgttttcttaatcacatatttattggagaagtcgagaattttttctggtaaattttttgtatttttacggatttattgttttttttgttttttacaaaaatacattgttattttctctcttatttcagaacaattttttttgtagcgttgctgatataagaaagcagcatttttcttcaaaagataaataaataaaaacctataaatatatttgtatatatgtaaaagtctaaataaaaaaagtcggtaaagatataaaaaacaaaagtttaattttagatgtattgtgtaaattttctaaaatctaaagtagactccctcaaaagggtgaatctaatgttgaaatctcatttgcttttgtgtttctttgaggtctttctaagtgtgagactacagaatagaggaatataattcaactagtctttttttttggggttgcctcatgctctatgaatcctgggagagaagccaagttgaatcgtgaaatgatctgagaaccaccggaggcaaggggcgattgagcaggtcgattgtgagctcctttaatcgccaccaatcatggataatcttttaatggtaagaaaattaggctagccttctattgcgaaaagataaaagaatgaaagaagaactgaatgttttcattgatcgaatccaaagttacagaggaagcttatatagtgtagcaggatgaaaagtccagtaggtattcataacagaataccgttggaaatagctaccaaaacagttagggacaactagcataagtgatacaatgaatctggacaaaagtgtatcaacactgtataaacttaataatcccctaaaatgttggaagagagtggtttggtgaatgcatcagcaagttgatgtgaactgctgacatgaacaagtcaaattttagattctttgattttgtcacgtatgaaatgacaatccatctctgtgtttggtcctttcatgaaagattgttagcaatgtgtattgctgatggttatcacagtaaatgttttgctgtatttgaaaatcatggagaaggtaatggagccaagttatttcactgccgcttttcgccatgtctttcctacccaaccagctcttaaccttgttgcgtctttcatcactgacaacatggtttggaatgctactcgtcttaaccaatgttatccacctcatattgtttaagacattctttccatttcccttcctctcctgcctactgaagacaatcttatttggagattcacaaaatcggggacttactcggttaagacaggatatcacttaagctattcctccagttctcctcctgatattccatcctcttcttccttttccccattgcggaaaatgttagaatttattttaccaggattgaggtattgcttgctgtgtgtgggcactactctaatcactagggtaagttcgaaatatgaaggaagaagagagagagagagtggcggctaaggaagagagagaggaggctca

SEQ ID NO: 295637 - DNA, 8401 bp, Cannabis indica
tttataattatttagattttttttaagtattatataattattaaaaacaaaaattagtgttgtctacagtgcccacctaaatataatgggacactgtagacaaacccaaaaatgattatacaaatgtcgtgcggttggatttcttttggtgtaatattacactataattaagtttttgcaggcccattggagttggccttacaaatcagaaagaaaaacaaattggaaggtagaagtggacttacttggttggccctataccctaggtgattggccctatgctctaagtgcttggccctatggtgtttggacttatgccccaagcggttggccctatatctcaagcagttggccttatgccttaggtgcttggccctatgaccaaagtggttaaaggaggcagtctggatgtccccaagactcaacactcattactccaatggatgtggattcacgctcgtgtaagctggggaaaacactccggaaatctatatgcactttgaagagaaaacaggtcctagcattgagatattataggtaacccacctagggcctaaggtgcatgacctataatcacacactatataaatactcttagcatctttttatgaagcaatcgatcatgaaacatcaaccatgatcataagatcccacgatctagagatgacaacagttttacccgtgatctcctaatcgaaaaggacttgacacacacatccaccacaaaagatagtgggccacgattctttatcgttgaaacttgtaacggttcctaggtactataaatcaaggacccatcacttcatttaagaggatcgagatttttatataaaagaaataacttttattctctgactcttgtattaaatacttttacagtgaccttagcactgtggtaaccaagattacttaggctaacttaattgtttcaataagaaattttaagtggggtaggttgttactgtacttctggtcaaggtcgaaccactataattctgtgttttttataattattacttagtactcttttctgtttattaattattgttcaaaaggtgtcgtattttatacatatgactgttggccaatttcacaggtcaatattttgttgcttttattaagagtatgaagtcaataaacacatttcactagtttaacaagacctccaaaacctgattaaacgaggaagactacttcaaaggattcaaccgccgatgatcgtgttgatcccatgaacgaacctcagttggatgttgatgaccgtacaaaattagagaatccacattacgttcaccaagaggagatggggaaatttctggcaaggcatgaggcctttcctatcaaaattgcccttcgaagggcgcccatggaggaacaaatgtgagagaatgatgagcaagtctggggaatgcctcaacgagagtaggaggctgactgaagacaccaagaggcgactgtggccctaaaagggccacccagctagcctgagataaagcacaagctactgcttaagtaaggcaggaggcccaaactaggacaacacaaagttacagtgagtcctaggggaggatttgaagccctaaaactctctctgagccacttcccagaggcaagatgaggaggtgtaatccaagacaacttcctctacacccaggaagagtaacactacaccccgacgtaatattgctattaaggcaccttcccataaaaatggaaacaatggcatggggaggatggatagatttttgagagacgtgacgggaatggtcagacaaaatttcaaagtcacgtagggagagaagcctgaaggaaggagtaccctaatgatctatcgccactgcaccatcagaagggataggaaccaatgaataatactaacaatgtgtttgataggcttgggaacaacgcaggacccaaggacctaagagaattcattaaccgaaggactagcactcaaggagatacactcgagacctctacctcacttggggcagtgatcccaccagaggtacaagcttagatagatgcacttaccatagtagtccaaggctagacaaagaaacctttttacatagagttggcacataggagtggaagcccttttagcattagtatccaagctgcacaacaccaccaaaatacaagtcccaaaaacttccattatataatgggaaggaagacaatgtacaatacattggaaaattttaagatcagatggaattactcatagttgaccatgaatatatatttcctaccaccctcttagactcagcacatgagtggtattggaagttcaaacaagcatcaatcacttcatgggagcagtttagaaaggagttttgcaaagtctttagtgcggaacggatccaaccagtttatgccaatcagctagcagatatcaaacaagggaaggatgaatttataaaggactacatcgaaaggttcataagggaagcaaaccaagcatctacgaaaggagatgaagggaagtttgtagccatttcaacaaggattgtatatcgaagtcctttatggcacaacatccataagaatcccatcaacaacctacaagagttcttagacttggcagataaatacatgaagctagatgatgctatcatgaaagaagaaaagggcataaatcacccgaccaccactaaagcaagcaggagtacttcaaacctcaagataatgggggcaatggaaagaagaggaatgcctcaatattggagcaaaacggcaagatgaaagccaagtcaacatagcctaaacaccaaccttactaacaaagattcactaattagaccattctaacaataaatagtgctaaaatttacttggctacataccaggaagtaccataccaaaagccaccacccattcactctaagagaaagatagacaagaaaaagttgttaatttcataatgatcatggacatgacacaaacaagtgcaatcagataaaggatgaaatagagtttctcttatggccaggaaaacactcaaaatatagatccaagacatgagcatctggtaagaattctgagcatatatcgagggtaggaccaatcgaagatctcgatgaagtcatattagataaagaagacccaacaagagtaatcaaagttgggaaagaattaaatagggaaattaaggcacaactcatgaaattctgtaagaaaaactaggacatctttgcttggtcatagaaagataaggttggaatttcttcatccgtcataagccatgtcttaaatattgacaagaattatccactagtacaacaaaaaaggagaattcttgaccgagaccgatctcaagccttgaagaaggaggtcaattaactcaaaagaaatggttttataagggaggtttttgggtatcgaaccccgttttggttccaaagccaaatgggaagtgaatggcatgtgtggaattcacaaatctaaacaaggcatgtcctaaaaattattttttgctacctaggatataccaactagttgatgctactatgggccacgaagtgctcacattcatggatgcctactctgggtacaattagataagtatgcaccctcccgaagaggagcataccagctttcaagcatacatgagattatattgttataaggtgatgccatttgtcttgaagaacacaggagccacctaccagtatttagtgaattgcatgttctaagacttgattggaaaaaatatggaggtatctgccgatgatgtattggtcaagtccaaagaagctggaggacacattcaagacttggaggaatgctttgtagtactcataaagtatcgcatgaagttaaatcctctcaagtattttttttttggagttggttctggtaagtttcatagattaatagtcaactcgtgagtaatcaaggctaactctaagaagatcaaagcattgatcaacgtgaagtcacccaccatgatcaaataagtacaaatcttaatggggatgatggttgctttaagtaaattcatatcaaagtcgacatacaagtgtgtccccttctttaatctactaagaggtagcaagaagaacaaccaatggaccgaagagtgggaggaagatttgtaggtcttattcatctacttggtagtgactgaatatgctattagcgatgctttagtgaaagagaatgacaatgttaagcaccctatatactatatcagtaaaaggctagtaggtacggagtcgaggtatcctcctcttgaaaaaatagcctactatttagtcaccgaatctctaaagttgagttcatacttctagtctcactcaatccaagtcctaactgatcaagtgttactgcaagtcctccaaaaaccagaaacatctagttgattactctaatgtgcagtggagctaggaaattttatatcacttatcaaccaaggacagcgatcaaaggacaagcattggtagactttatagctgagggcacaaaccttgaagacccttaaaaacaaaccaaaaatggaaaagccaaaaaggaagaagatatccctatatcaaagctatatgttgatggagcatccaatgaacatcgctcaggcgcaaggatcatattgatcaccctgaagaatcattgtatccattgtgctcccgggcttgggtttaacacttaaaataacaaagctgagtatgaagcactactagcaggattacaaatatctcgaggcgtgcatgcgatatctctggagatatttagtgatttccaggttgtggtataccaagtcccaggagagtaccagaagaagggacttagaatgttgcaatacctcaacaaaataaaagacttattacagttcaaaaaatactcaatcacacaagtcccgaaggaacaaaatgctaatgtcgatgctttagccaagcttgccagtgcaaaagacaatgataccttgaacatttctcccattgaatacttagcagaaaggagcacaaccaaccaggaagtattatctgttgcattaggagatatggggatgaatttgatcattaaatatcttaaccaagggatagtacataatagtcgaatgaattttaccaacgaggataatccctaccattgctaatgtgcgttactccatatcaatcaatattattaatgatcaaagtacatgaagggttttgtcaagatcgcgttgggagagaaaatcttgtcaaaaaaaatataaatgcaaggatactctgccaatgatgaacaaaaattctaggagtatgttaaaaaatgccacatatgtcagatattttcaatgatacgcgcaccaaacacattaaatcaaatgcaaagtccttggtcttttgctgtatgggggatcaattttattgggaaactacccacaggtagaggaggagtccagtttgttgtaatagttgtggactatttcaccaaatagattgaagctgagccatcgacctttggtcacctcaaagaaagtcttagagtttgtggtaaaagaatcatttgtcgttttggcttactaaagaaaatagtcttagataacgggactcaattcgatagtggcacattcgttgacttttttccaagacatgaaattacaaagagctttttatcagtcgcacattcctaagccaatggttaagtagaatcagtaaacaagactcttaaggacactatgaaaaaattcctcgaataagccaaaggagcctggctagtattactcctggaggtcttctagtcacatcaaataatggccaaaactgcaactggccataacccttgccagttgaattaactctccatcgcacagacaagagacatatgattaatctaaggatcactcgatcttatagaagaaggagagaatgaaagtcttagagtagcaacacaccaaaaaaaaatggctcaatatttcaactcaaaggtgaaggatcaaaagttccttgttggagatataatactcagaagggtattccaaaacagtaaatatcatacagtaggagtactagaactaaagtgggaaggaccatacgttgtggaggaggtgatcctaccaagaacatacaaactagctcgactgagtagggagctgatcaagaagtactggaatagtaaacatcttcgacgatactaccactcatgttatttattttcaatttagatttcaatttataattgtaataatttcaacgatctatgtaataaatattgtgcacaaaattaatgaataaatttaattttttaagtatcttacttaaaattgtttaaattttcttccataaaagattagttcaccccactggatcatgttcgattatggcccttgatggtcctatgacccatacgatcctcaaaagagactggtccaaggaccagttgttaatatcaaagatcatgtttgattctggctcttgacaaacctatcaacccttaagatctaagagagagattggtcttaggagaattgtcacaatattttatcatcttcaaatttagtccttgaggggcctctcaaagtttacgtttaaaaacgagaaaactggtgtgaggaccattcgtgaaatattagatcattattgaacttggaccttgaaagaccaatcgataatttgatttaagactcgttaagactcgaatttggtccaacttagacatacttgtctataattttataatgagtacccaagagattacgtgaaccgtgatcgacacttgctacacaacatgcaatttgtgtataggtataatgactactaggtatgaaactaccacccgaataccaatacaggacaagtatttgctacttgcatcattgaacgaaaataatagtattatttgtctaaatgctcgaaagcaaggcatcgtcaagtagcaagtgaccaaggccatgatacccatgatcacttaacgggcatatagtacatgccaataagggtatacacaagcaatgagggcatgaacctaagtattaagagcttgtgttccaaaaataccaaaagcaaaaaataacataaataaagtatgaatgataggcctcaccatttgttcttggtactcacactaccatagttgttatcatagaaagtataaaagaataaggttagtatcgtatgcaaagtaacgtggtcaaaatatattgatacctgaaccaatgagaattattagtcgatatacttaatgggcattggaaaaaaaaatcaataaatatgctaagtacttataacaaaaaagcaataaggtataaaaatgtcatttgtaaagtattgctaagtacgttatgacatagtcttagcatgaaaactaaagacaaaaagtaaataaagactaaagatgacaaaagaagactaagtggagtgaggagcatcaagttgaagatattgagacttggtaacttctcgaatcagacacttcttaagttgcttctttcttgtcttctcaagaatggagtccaaattcaagtgatctttgttggctctccaaacataatagaagaaagtaaaggcattatttgaatactcttcctgagctgcctttgcctccttccgaagttggtccatctcaggaaccaacttctttcgctcgatttcagacttctcaagatggtcaggaaatttgtatctacctgggacaccttgagcattagttcctccacctcttactgtttaagcttagcaatgtcatgaagggaaatgatctctttgtctttcaaggtagtatctgcatctctagaagtaataacacatttgagatccaatacctcctacgaagagcttctaactcagtgcagaggtctgaaaatgtggtattataccctgtggagtgattatgagcatgagtgaccaacattagtgattgcaaaatacatataacaaacatataccattaaatgttagagtaacatcaagacataaagaaaatcaagcaaacattgaagagaaatttggaggagttacgctttgtatatcaagaagtgctttggcgaggacaatactcaaatcttgtctctcaatctcattaaacacccctcgggtttcaccgaaggcccgggcagaaatgacagccatagtccccatagtagattgatgatactgagatgaggtagcagatgctgacaaagtcccacatacacttagaggaggaacagatagaggcggaatggacagagacacactctcttttcttgcaggagacgaagtcccttgagctcttggaaactcctcaaggagggtctcactaggaagatcaacctcaacccaagccctctttgttgctcgagcagaagaactagacatgttggaattcaactgagagtgaatgaaacaaaacatgtctcaacctacacaaaaataatccaaaattagaagaataacaaactcaaaagtaaaaaaaagagtatcaaacactcataagtgag

SEQ ID NO: 295638 - DNA, 2765 bp, Cannabis indica
tttcggatgtttcaaaaaactccagtttcgttttttatgatatttttagaaaattaactttaattacttgattcaaaacatctgttcctcgatagtatccgtccataatttatttatggaataaatctagccgctgttaatagacggccttcgttcttgtttaagaaattcttggatactttcactcttcatcgcactcatggccacagcagtccctatacctggaccaacaagcagtcgcattgtactcacatccaagaaagattggattggggtatctcaaaccttatgtaggactcctccttctccacggtgcacctcttccatggagactttttttgatctaatcatcgaactttaatcctctcccttcaacatgttgaggatcgtatgcagcctcataagcctcgattccacttcgacaatagttggttagtcgagaatggcttcaaggcttgccttcgtaaggcttagcccaccactcttgattcctgtgatcacaatcgtatctctaatcttcgtcacaaacttcaacattatgctcacaccctctctgagtggcaaaaatcgatcgggcctcctcttccacaccaaattaagaaagtccaatctcagctacaggctgctcaaaatcatcctcaacccactaattcccatcttcttctttttcgccaacttcaaggggaccttgatcgactcctttaaaaggaagaagagcattggcagcaacgctcttgaattaactggcttaagcttggtgataagaacactcgatactttcatcaatttgcctcctcaagacgtgccaagaacaaaatatgctcacttacacaatctgatggcttaactgtcaccgatactcaaagcactttgacccctattgaacaatacttcactcaactctttacaagtcaaaatcctaactgtgagcaaatggattatgttctttctagtatatttgaaaggcttactgctacaaaatcgttgtgtttggaatctcctttcacacctgacgaggttcgacaagcggtgttccaactggcaggcgataaatcccccagacctaatggatttaatggcacatttttccaaaataaattggaatcccctagggaatgatgccatccaagtagttcttagatttttgaacgaaaacgctgatctaacacctatcaacaatagcatcattgtcctcgtccctaaaaagagtcacccacattccatcacggattattaaccacttagcctctgctctacattgtataaaatcatctcccacaccctggttaatcgtctcaaaccaattttccgtcgtattatttatttagcccaaagtgcattcctacctaatcgcttaatctttgacaatatcattataaggcaagaagtcacacactctttgactcatcgcaagcatagtaaagtgggttggatggctcgtaaacttgacatggctaaggcatttaattgcatggaatggaacttccccagaaaggtcatggaaaaatttaacttcccttccaagttcatcaatcttattttgacctacatctcgactgccacctttacttttttaatcaaccaatagcttcttggatctgtcatcccctcctgtggcattcaccacggcgactcgctctcccctatctctttctcttatgttctgagggcctctcatctctcatctctcagaaagtttgtcacgccttccacggaagcacgacattggcttaagaattcccgaacggtgccaatcatctctcatttattctttgttgattatatcactctttttagcgctatatcccttgttactgataaccatatcaaggatcgcctccatgattacagcctggcttcgggtcaacttgtcaactatgataaatcctcgctctatttctctcctaataccactgatgtgatcaaaatcaaatcacttccttactcaatgtgcctattcgtgattctattgagaaatacttgagtctccctcaatcctttggccgctcaaaaaaggaagctttcacctacctttaggatcatgtgtggtcctatttgaataagtggaattccacatttttattggaattattacatttatttacaaaaatacctctataaggtgtgaacaatatttatacctgttatgtaattttaattaccaaaatacctcttacactatcacttacacaataagatgatggttactgcgtggttgcatcagacgaaagtttcaatcagacgatagttgcagggtatttggccgaaggttgcaacagaagaaagtttcaatcagatgaaagtttctgggtggttgatggatggttggccggaggttgcatcaaacgaaggttttaattagacgaaataattgttagcaaaatatttatgcaactgtaatgcacttgtaatgcaagtgttatgaaacattaaaaatcataacagtatttccacgtacgtaactctatctacatgtctctttatgatttaatatgaacaaatcaccattagaaatttagaaaacaacgaaaatttactaggataaatattttactatagtattgatgtaagtttttttagattatacttgagttggattgtttgggaactccaattcagctttttgagatctgcctttcatggatctgaaaattgaagtcatgacactagttttatgcaaattaaactggatttcccggttaaattttagtttcatagtagttttttttacatttttttatgaattcgaaacaacccctgttttg

SEQ ID NO: 295639 - DNA, 4429 bp, Cannabis indica
ttctatgtgagttgttatacgaatttcgattacaatttaagttgctcaattaattgctatataaattttgtgtacaattttgtaaacatctagaaaaaaaaaagcaatttttaagtataaaaaagaaaaaatctcaaaatattttttttgagataaaaggaaattaggggaataacctcaaaataattaaaattacagtctttagttccgcagttccctagataaaaggaaattaggggaaattatgcagtagtgtgtgacacagtgacggcctgacgggtgggtggcccctcatgaggccatattaaccctttaaactcccacttaatccaaacttcggacagaaaataggagggcatttacggtaaactacacaatcttattccggcgccactgttatgaatctttctctccaccattttcttactcagagcttagctcaccatccatggactctgccatcgctctccgccaaccatcctcaatctcttcttccaaactcttccaaaccacgaaattccttaattcccaattgcttaaatttcaaacctcgccgtcttccttcgagcgtctgaagccaaaaccacgttgtttacccataaacgtttcgaggcggagttctctgctcagaattcgactccgccacggctcgactgatgaggatggtaggtccccgcttaaccactcggtcaaggcttcttcaaacgacgctcatttcagtgcgtttacggagaagaaggagcttcaggcaccgagtttcgctgagttcatcacctcggaaagggttaaagttgcggcgatgcttgctttggccttagccctttgtaacgccgaccgggttgtgatgtcagtggcgattgtacctttgtcgctttcccatggctggaccaaatcatttgctggtattgttcaggtgggcttggctactaaactttcgtatatgttaaattttcacttaattggatattaagtttgttatatgtaataatttggaaaggaaatacatagagaatgaagtaacatggttagttggaggttaaaaggtctaacctctgcctccgagttatgggcttctattaagtaaagttagcattttccttaatgggtttctagaaaatatagttttagcaaatgttgaaattacttggaactcatgtgaaaaactcatgaacagtcatctttcctatggggatacctggtatctccaatagctggagggactcttgtggattattacggtggaaggatagtcatggcttggggagtggctttatggtctctggctacctttcttacaccttgggctgctgaaacttccttatgggctctccttgctatgagagctatggttggtgtggcagaaggagtagctcttccttgcatgaacaacatggtagcaaggtattggtggtttatggttataatggaaacgtgagattgaacctgaaaggctggttgtttatactttacaagtaccgaaagctaaactgttgttttcttttaggtggtttcctccaactgaaagggcgagggctgttggaattgcaatggctggatttcagtttggaagtgctattggacttacactgtctccaatcctcatgtcaaagagtggtatctttggaccgtttgtgatttttgggttatctgggtttctttgggtgttggtatggttgtctgctacatcaagtactcctgaccaaaataatcagatatcgaagtatgaattagattacataatgaataagaggcaaacatcatttcttgtggacaataaaactaaagcaactaaagtgatacctccattcaggcgcttactttctaaaatgccaacatggtccctaatcgttgcaaattccatgcacagctgggtatgtcacactcttctacaactagtttctccataagcaacgcgtttctaactgcttactctgtgctgaaacttctctcttacagggtggaattattatttgaatgcaaaacactactgaagtgtttttgtttactttcatggttgtgttagacctttatatagattcttgatattttctatttacgaaaactcattgttcttctcaaatattgcagggtttcttcgttattctttcctggatgcctgtttactttaactttgtgagaactaatacttatccttattttgtgacatttgctagtggtatctagaagaattttgaaactcaagcaagctacttcatactacaggtgtttcatgttgacctcagacatgcagcttggtttagtgctgttccatggagtgtgatggcagtcatgggatatcttgctggtttgtggtcagacatgttgatccgtggtggtacatctatcactttaacacggaagatcatgcaggtacggagttcttattcattaacaactatgttttgtgcaaggaccaccatttatagttttattcgtgagctgtttcgtttctttggtttttgacaagacaattagtgttcactatactgccctacacccttaaaaaaaagacttagttatctagaaatctgaagatatttatcttccaaagaaagaaaatcatattaaattgtttggaccatataggcttaatttcggttcttctatccaaaaggccaaaaatagaaacccgaagggatatttttcttctgtttcctttggtgcatcagtaaacaactaaagtaaaacttgaggactagcgcactaccatatcatttttagtcattagaacattaatctcatcatgcatagaatattcaaaagatccaattgctttctgtgcagtcaattggtttttttggtccgggagttgcacttgtgggattgactacagcaaaaagtccagtgattgcatctgcatggctcacattagctgttggattgaaatcttttagtcattcaggatttcttgtgaatctccaggtttgacccaattaccttaaatttgacttgtttgaattagttcttccttgtctgaccaattttcttttatttgtttctgttttcaggaaattgctccacaatattctggtgttttgcatggtagtattcatgacagcatattaacaagattgtgtaaaaaaaaattgttttctttttgtttttataaccttgtaattacatttgaacagcataggttttgcattaacgtttctatgcaataactatgctggatagcagtaaatgcaagtatacataacagcaacaaatctttttcttgattttaataccaaacttgatgacaaaactaaagtttttaactagcaacaaccttttcttttccccttaggactgtcaaatactgccggaacatttgccgcaatcgtgggaacagttggagctggtttctttgtagaattagtgggttcttttcaaggatttttgttgcttacatcactcatgtattttgtcgctgccattttctacaacttgttttctactggagagagggtaaattttgatgaacctggtaagtgtctttttatgtttatcttgtaattgctggttcattttctgtaaattgaactgctacttggctgttcggaactatcatcatgatatctaaagcatgaagtagtattattaccaacactaaacccatagtttcagttttctggacctatgctgtttagaattatgagtgtacctgctcagaatttgaattcattttattgtacctatctagtattcacccttgtgtttccctaatggacagcattcaaatcttttgcttgacagtgatataaaagaaatatgtagacaactactggtcacctacctgaagatgatgtattagtggaccagaactgatgtataactacataatgcttgaagaagggactctcgtccatatcatttcattcaatgcattcttctccttcctaatgccccaagccttattatgcatatcagtgattgcatgtcaattatagttggaaattttgcctagaaaattttgttaatatgataaataatgtgttgtaaagactagtgaggtatgtatatgaaggattctgttcaaatctttttggttgcttgctttgtgttaaataatggccaagaatagaatcgataatatcaaaattaaccattaattaagttaatactagattaaagaattttgaagatcttttttaagtgtcactccgtcatggctattatgattttttaaagttctcgatgaacagagcgtgaaaagaggaccgtgtgagaggagagagcttgaatcgggaaggaaaagtgtagaatgatacaagagaatcatctctgaatgaatattgaagattcgagatagaaagctgtttttttttttggctaattagtaatttttcccctgaactttgacatgtacgatttaccccttgaacttttttggccgttaaaaattctccctaaactattgagattgttaaatttaaggacttttgtc

SEQ ID NO: 295640 - DNA, 2817 bp, Cannabis indica
aaaaaaaaaataaaaaatgaagcttcgtcatgttttgtccttactcaacaactatgttcatagaagaagaagattgtagtttgttatcaacaactaccgaattataactgccaccttgcttattatcatgatgatgatgatcaagatcttgatcaagctcagtgctactactatctctttcttcatcatcatctaataaaatctcatgatcatcttcatcatcttcttcctcttctgaattattattagtactttgatcaggccattgtctttcaggttgtaccatcaatggttccattgttaatacattgttgttttgaatttgatcaaccacattgttttttactgtcgttttctctctatacaatgcatcaagctggtgaaagtaaggacatgtctttgaatcttctggtcttttcttgttactgtccttaacttttttgaaatacttgttgatgttttcccatttctccttacaccttttcgagcttcggttgtacccgagtcgcctcatcccggccgagatttcctcccaaagcggccctttcggtccgttttcgtggtacttcaactcgagtgttcttctcaggtttattaaagcttgaacttctgattttggccaccgtgaagggcttaaattagacgagttatcgcctaatttgggccgtgccggcggtgttggctgctgctggtgttgctgctgaggtgacggtagcggtggtaatgacaccgccggaatgtgatggtggtggtgattgttatgatcttgatagttattggataagaacaaatggcttgaattattctgcggaacaacaaccgccgagcttccaccgccggcagagaccttctgcaagaatgcgatgacagccgcgtctttggcggctgccgtggacctttcttggacaagaatttcgtgctcgcggtttactcttgccatctcttgtaacctccacgtgtcttcgcggacaattctcgcttgttcggatttctcaacggtttctagaaacgtcttttgcatttcctcttgctttcttatcacttcctttgtcaattttctaaagaagtctctccactttctttttctcttctgccctcggctactgcttctggcttgaaattcctcgtcagaagcagtagaagaggaagtggacgagctcgagaacaggtattgatggcgatcaatacctgttgttggagcagttggaacagctgtagtagtagcagtggtggtagtgttaagatggtttattgatttggtttgtggagggaataataaagaattattattattattattattagtactaatattattcatagtagtattatttgttggtgttggtgttggtggcaatggtactactagtggggatagaagaggaatattattactattattactatcattattttttgtagggttttgatgataagtgactgtagtgattggaggaggggtcgtccatggtggtggtggtgatgaattgtttactatgacttgtggttttgaaggctgttgtggcggtggtggtggcggagtaggtggcggcgggtggtggttttgttcgaaagccgctaattgatcgaaaaatcggtaggttttgccctctgtcttgcctgtacggccttctttggttctcttgtggtacttgtaaacattctcaaatttctccttgcatttctttgcgcttcttttgaacccaagaccagctagcttcctttatatcaaaaaatgaatttaatttttaattttaataatatgttacgtaaaatattatattgatcaatctaataattttaaaactactggcaaaacattaattgtaacgagagaagattgtattttaagtttggaagtagtataataattttgtgaattcaagaatattgatgacgaatgtgtcatttattataactttgatcacataatataagttatatatatcgttatatacttatattgcattaaagttttttcttttttttttcttatatcttatattatatcccatgtggagaacagtacattattaatttttatagctaatcagaagtgctcttttaaaatttcgttttttttatacataaataaatatatatattaactaagcccccatgcaatattagtattgcttttaaactaaaaaaaatgctttgaaattaatatttatttatagaattaactgttctttagttaattaattcaagaatgcgaaccccacttggaagaaagaattgaaatttagttcaatttctccagattattaattttcacttaatttaatctaacttcattaatttattatagctttattgaaaaaaaaatcaaaaacaaatttgaattcatcaaataaatcaaatcaagtaattagaagaagagtagaactgaattaacaaaaaataaaatcaataattataaatacataataataattattaccttgaaacctcttcccacaatggacctttgagactagaatcacgaaaaatagcatccatatcttgtcttatcttcaacaaagccaaagtctcttgacgaggccaccggtttccgccgctccggtcaccaccaccaccaccgccgccgccactctcgtcgaataataatttgttctcttcttcagctgaattgttcgataaattactttcaacaatattattattgttattcctgtcttcgccactacctccctgctggtggcgaagttcaagaacatgatcttgggtggtggctaccgctgcctccatcgtaacgttggaggctgaaacagctactaccccagctcgatgatcattacttgagtctcccatgat

SEQ ID NO: 295641 - DNA, 2165 bp, Cannabis indica
ctctctctctctctctctacgaatttcctgttctttttcattgtttttctgtatcaaaacattccctttctacttttcaatacaaggtctttgaatgggtgtaatcaaatgtctttcattgcttgttgttttgcaatgataaggcatttgtttgtatacgttattttaatgctcttatttcaagttcccaattccctatgtgggtttttgttgaaagtattccttcataatttaggtgaacaataataaactatttttttttcccccggatcactttatttatttttttttttataaagttggttggttaaattcttgctttgaaaggaacagttctcttaaggtgctaaagtaaactaaagcattattgtatttctattatggttttatgtcaagattgggaatctgtgggcttgtagattaaaatataattagtgacaactgtaaagagctaacatagcatgcaatgtacttatttgctatgtattgttttgaaaattgaatatcttaatatgtgtgtggtgcctgccattgttgtttaaggagaattatttagttgtcagaatatagttgaattcagtttctgaaattattgttaatgacgtgtcaataatctacaggagcccactgtttctcttctcaaggatgctatcatggatgctctgaagatcttagtcggtacttaaataatcagaagaaaatcatttccgtagtttatttagtttattaatctcttaattaagttttgagtactttctaaattctacttcttggtgtttgcagacgtgcgaaaccatccagttttgatccattgcaagcgtggaaaggtataagttcattcatgcgttatagccaattagcttttcaatatcactttttttattaggattgtctgtgtgttttccacttggtactaggtgtgtagttaataaaatactatgtgctccacttttctagtttctatagttaatggacaacgtgtactccactatttgatagtgtagctagtaacatgtgtctgcatgaaccaaacaaccattgctatcttgctctaggtcatagttttggtgaccaattctttatcatcacttacatgtgctcttattagttagtaattgagttggaaacttgtcatatttgatatatcaactaaccatattaccattttcgtttctgcagcataggactggttgtcttgttggttgcctgagaaaactgcagaattggtgcttggcttctgtgtttgaagagtaccagcggtttgctggtgtgaaatctagggaaacagacaagaagtttattgagtcatttgatgtgctctccttgaggcattgtctttacagcatcatctaccgctaccatggctatggttccaaaaagagaaggcttctctacaaagaagataatgttcagaagccccagatgacttcagtttagccaacgactccatagtttagttctattttctaattaagacttctttctttatgtttgcatatatgatacatatatatatggtgattccccactattagttttttcttttattttcattttcacattaggttctttggaacaaaacaaccattgtatacttcgttttcaacctcgagtgttgattttttttgttttacataggaacgagccaattagtacggaaatttcatcatctttagattttgtgattttttccttagattttattttagtgtttgttttccattaactgactgccctgtatttgtttatcttctctgttttgagggtttgaactttgaagacaaacttttctcgtcatatgaatttggtctttcattttgtatatatggtttgtcttaataaagtaaaacgtgattgtgaactaaactaaagctattggaatcaactttcaagcaagttatcttaggaaaaaaaaaagttaatgctttgataatgacaaataaagccaaatacagtagaacctctattcaactaatttgttataaaaaaatgaagtcttaatttgggccagttataaataagaataacctctatattgtaattagttatacattttttaagtcccgtatttataaaatatatctctatataagaatacttagatcttaaacgaaaataattttaatataatatagtattaagaattgtttattggtatttttgtt

SEQ ID NO: 295642 - DNA, 4607 bp, Cannabis indica
aaaaaaaaattataatataatatttataactcaataaataataattttttatatataactaaatactatttataaaataaatttttaagctataattgttcatatttgatggggcaccaattttatctcttagcaaaaactttttagctattagctatttaactattttattgtgtttgctctaaattctattttatttttttacaccattttagtcaaaataaattaaattatatctcttattgcatggtaaatttaatttttttaatgaaacaaacagttacaaattcttgtagttgattatgttctgaatgattgtaattaaaaaacatatttcaattgcaatttccgtttgtcaactgtatgttttccttcagttaactgcaatttaacatattttaattgtaatgaataatattcagccgtagtaaacagtcattacaatattattcaaaatatataaatacataagaaggtacactgtcaaatctatgactattatgcttcatttctttaatttcttttataaatcatttcacccaaatagctatgggaatcaagcttgaaattatggactctctttaatattcaaatcactagaaaccttaaatgaaaaacatccacaattgatgccctaactacaaacttgaaacattgaacataatttgcaagtaggctactgccaaaaggttcccctgtttattatgctagcttatgtacatttatgtctagagaacacttaaataatgctctccttagaaagagccattgccaatgatccataaccaatcaagagcaactcctgcgaatattcctccaagaagaaacaccacaaggatatttcccaaagcattttgctcaggcccctgtgaaattcaatcaagaaactcaatttaaaatctaaaaataaaaattgtagcagtgcttatcttatataaagataaacttacacagccatcacatgtagttaataaaaggagtaccaaccttgtaaccctttggtgctgcggtaagaacacaaacagtgaggtaaccattggttaaccccaataaagagatgagcattatcatccatccctggtcaccatattttgcagtgaaataaaacgcaggaacgaacaagaaacgactaataatcgcaatcgaaagcccctttctcgattccaacgtcaaacacttcacaagaggaatgtatctcgatatgaaatccaacaagttgtacatagccactagtacaagtggatacctggaccattaccaaattccaaccatgttaacttatgcataattatattttagaataattcataaataaaatgtaatgtcataagttttaccatgaacccaagttgtgtgttccagtattttcatacaagaaaccaggaaaaatagacaaagtcaacacataaattaggaacaagtccaagcagtaatcgatgttctgtaagattagttgcttattgctcaatcgttgtgagaatttggagttatcttggttgatctgtacaagttttataaattagaactattatcatatgatgagttttgaagaatttgttaaagaaaaattagaaagatggatgctcaaggaagtagaagcattagatagaacaataccccttggccgtctccagcagctgcaagatcagctgccacagttttcgatccttctgaggctgctttgcgaagccgaagtacctcacaattggaagcttaggaaacacaaatgcgtatagaagaatgcagaggaactcgaagaagctggcgattgctaaaaataacactgacaaattaagaagaagccatcatgaatcagtaaacacataatagggaggaattaatattctgatatgaagattttacttacaagttcccttgcgaaggccatgctcagttttttccatggctgcttttgtgactaacctcaagacagaggttagaacacctgatccagccaagccagcaaaaaatgactgcactaaaatcatcaaaatgagactctaaacaacaaaaattaaggagaaatccttgctgttctttactacagtgtgtgatgaatacaagtcgtcatttgagtcgaagaataacctgcatgaattcgggtagcatgaaagccaggtctcccaccattccaccttgaacatgggcatctgcaatcccaaaggcagcaacaagtacacatattcctacataaggccctactccacccctcccgcttgtggccaagtcaacctgttgtgtaaaagcagaactaagctcaaattcactggaatagaatccatggcaacatgcctaaagtagagagttgagtgcttacaactatgagaaggaaggtacttgcgaagaagagagtgtaaccaaacaaattccgctttctggtatcaattttggcctcattgtatgctagtattgccattgttccaacagcaaagggttgataaacaagggtaagtacccgagaaggatggtaattctgccaagtaaatggttgcaaaagtcatttattaaactttttagaccccatcattatgtcagatttgtgctaatacttaatcacttttacatttaaacttattgctgtctagtgtctgaacaaaacagaacccaatatgttgaatttattatatgaaaatagctacaacaagtagttttttgccccatttttcagaggccaaaactgtgagatttaagtgttaaaaagattgattttcaatcgttttcaagtcaaatttagctatgaacataacacttactggaaataatgcataatagtagtctgcaatggtgagcatactattccaagaaacaagggaacccaatcccagaatccagcaaactagcactgctacattcttcccctgttcatccagaattgacagagtttatataaattaagagactgatttcattacctctaaagcagaatttaaaattaaagtttaaaaacgaacctcatgcctcacgttcccagtaaccccagattcatcaccaattgtcatgactgcacactctgcttccaggctattatagttacaagacactgcttcactttatataaaactccaaactattaatagaacaaaaagaaagaaaaaagaaaagtaataatttcattgactgtaaacagaagcgcggcactttatatgaacatcaaatagaacaataagaaagaaaaaagattaaatgatacatctgttaaatacacttaaaaaaataccatgtaacaatcattccattgactataaacagaaataccgcactttaggcctaaaagttaaaatataacatttatataaaatatgaatcttatgtactcctttttaggatagggtgtgaacaactaaaaggaaaacagcaagagagaattggaaaattcaaagccaaagagaaagaataataaatctgattttaagtgtggtcgatgaaagaatgaccggtggctaaaagttgaacatgacccaacctttttgaaaagcaagtgtagactgtagcccacagcaaagaatctttttgaatcattgaatagtagtatatgtatgtatagagttctgcattctattattgtgaatatcccatttttttaagtaatctctcagcattaaatttgagctgacaaaactacatagctaaatagctgtataatcttaaagcggcaaatacaaaagacggaagaaacagctcaaaaatgacaaaccaacaaaaataaaattgtcaacgctttcgctgccttgtcgaaaatgatatcatattaattgaaatttgagcttagatgaatataatgaagaaccccatcatcaacaattaaataataaaaaatttctgtgattaagttcttttattgaaaatggaaaaaagacaatactttctccttaccctggcataggcattttcccctgtagtccactggtttattttgctgccaacgaaggatacaaagagagtgtgagattccaatttccaaccctttgctatacaggcttagtactattattagagatcagaatcatcagatccgtgaatttagaattctggtcctgtattagtagaagaagattcacaatatacttatattgcttttgatttttattcactctatacacaaaacgtgtttgttttacttatatttatatatattattttataaaactaatcattcgacctttttttagtattatacttttcaggaggtagtagaaatgaaaccgtatttaaatataaattaggcaagagtgggaattaaatctagctattccgaatttggtaggcctatatatggtatttggcgtgtaatttttgaaggtgtgaacaattatttgtttattataccaccagatatgcctcagagttggtatttgattttaaattgtttgtgtatcacaacgtgcatggcccgcactcctatatataaagtattataaattatcatacctcttgctgcatgccttgcaccattatataataaattcattaaaacaaagagtttttttctatcccttaaaaaaacaaaagaagaaggttcttccttttaaaatatagtaaaatgcattattataacattaaaatactctattatttttttttcttacttaatttttgtaaaccgacta

SEQ ID NO: 295643 - DNA, 4597 bp, Cannabis indica
cctgtaatatgcatggtattatcctgcatatgacttaataggaaaaagttttgtgtgagaatgattggcttcaccatgaaagatgtctagaattgaacatactctcaaccgagcatcattagctgtatttgcactaaagaaaattgatgaattttgcaaattaacttgctgaccagatgttaattgaaaacactgcaatagctccatcacatggtagccccttcctctgaagccatacattatacatatctatcatctgtaaaaaagcatgtgtgagaaccaacgaagctccccttgcaactttgcagccacgaatcttgcccaatctctcataagtttttatcaaagctaaaaaatccttcacgcacaagataaaaagataaggtgagagtggatcaccttgtcttaaacctctcgtaggaacaattagcccaatctcttgacccctagccacaattttgtacgagatcgagctaacacacatcataatcaaccttatccagtactaatagaatcccatcttcctcaatatagcatttaaaaaataacccactcgatcctattatatgccttgttcatatccaacttaaaagccataaaaccatccttacatgaatgcttccttttcaaataatgcacaatttcaaatgaaactaagatgttatctgtaataagacacctcagtaagaatgcactttgagttttagagatgatgctaggaagtaccccttacaatatattttctaaaaccttagaaacaattttataaatcacattacatagagaaataggtcgcaaatcactcatacttttgggtctgtatttttttggaataaatcacaatattagtgtccattaaatggtcatggaacttaccaaaagttaaaaaatattgtacaaactgactcacatctttgccaacaatattccaaaatttttggtaaaaacctgaattgaatccattaggcccgggtgatttgtcagggtgcatttggaacaaaccgtcctaacttcagcatcatcaatcgaggctaataaacccaaattttaacttctgagataccgtcttgaacacattttgtgaccctctgccagtccgtgttagaagccacaaacaaatctttgaaataaacctctattacctctctcaaactcattatcccaatccatcaccattcttcaatctcagtatttgattatttttctttcgagtactagcacaagcatggaaatattttgtattttgatcccctgcctgtaaccataattgcttagagcgttgtctatagaaaatctctttataagtaagaatttcaaacaactaatattcaacctccttatatttctcgatagacctcgcatccctttgactttttaatagctttagaatcttattgcagttacgaatccttcctttgaaattaccagttatatctctttctcactctgccaaagcattgttgcaacatttaatcgtcatatgcaagggactagcatcaagcagttcccaattatcttttacaatctaacgacacataggctcacgaactcacacattttcaaaacaaaacttcttgaaaaaaattacaggcttagaaatagcaagattcacgcaaattggataatgtttaaaaatagaaatttctaagttctctaaccttgctgcaggaaacaagaaattccaagcttaagtaataagagcccgacctaaacttcaacccattgaataatgtccttacccttttcccacgtatatggatgccccaccggctccatattaataagattatagttcgaaacaacatcttggaaccttgagagaagctaattgggataggggtaccctcccctcttatcactatgatgaaaggttttattcaaatcacctagtaaacactaatgtaatgaagactcttttgctagttgcctaataaatatccaggaatttcttctaagactcctatatggttccataaaaaccagtagcatgaaacaaatgatagccctctaatttcaacataccatatggcttagcaatggtctccaatggctcatcaaacaatctatgacagaacctttcaggatgcccaatgacaccacatataaagcaaaaggctggcgctctctcatatttaaagtttacccagaaccattcttcctttgtaatgccttgatacttaggcactatagtgatttttcaattaacatactaccttgctaatcaagggttttcttcgaaaatcgtgtttaattaaaaccttgactaaaattattaaacattataaacttatatatatttacatagttgggatcccgaattaaacttttacaaatgtttaaaaaatactttcatatacatgtcgcacagtgactataaaatactatccaagatgtctcaagaccgaacactccagttcgcgtcgtcgtaacatgtacaaccaccatccaagcccagagctcaatcttgttcagccttcgccttttctttacctacaaatggtagtagcaattgtgagtcaacagactcagtaagaaaagcatataacaaataatataatatcgacttgtatctaggcgtccatacacctatctacaaggcttaacagataagtaagaacgttctttactagggtacaaccactgtaccacatacactacgtactgctactgtacgagtgtcggtagggtttgtttcataccctgagtacagctaagtgttgtaccacacacattctgtacctgtccgtacgagtgctggtaacaccgtaatgtactctttacatatcgtacactataccaatgcactcagtacaccgtactagtgttggtagtgtatgaatcacaataagcatgcatatatgtcacacatacatacattcacatatataatatgtcatatgctattcttacctcatttttgaatttaagtgagttggtcgacctgaatggaaaatcttgtgctggatgaatgccctcaagctaatactgaatctttcacctagagaaaggcccttgaatcctgctaaaatgaagaactcaacggcaaaccccttggtccaagtttggttcaaagagaaagaaggaaaagatagataaaattttgtttatcctttgaataattaatttttctttaaattgattaaactcaacatcatacttaactaaataaaagagatatggccagctgctatcttatgagaaagccacagaatcccctaaaggaaaattactaaaatacccatgatctttcatactaagaaatagtgagcccgctcaaactcggcattcaaaatattccttatgtttgtcccgctaagaattaggctctagacttacctatgtgactctaacgttcatctatcgtattttttgacgtcgccgaacaaaaatcataaaaattgcataatttatatatagcataaataatacttttagagtttaataaaatctccagaatcgagaaattataactctacttcccatttttaataatagaattcacaaaataataaacccatgcataattataaaaatatcaataattaatgataattgcctttgctaatccatattctaataacatgtggtcattacatccttgttttagagatcctcattcttcgcttgagaggcttttatttatgaatacccgaactctgaaatagtccctccaaattctaacaaagtttttcggacatgatgagacatacttcccaatataagcatccacaacctttaaagctcgatcagacttaaacccaacttgtatatcttgaacctgaacccatatttccatcgtagtcaatggtcgaatactggaattctcacattctttcaatcattctataattagtgaaatcttattgaatgtccgcagagtaccctctatagctctaccaatgtgccccatgaaaaaattgcaataggtactaattttcaatttctttacttacatacccttgcttgactgccatagagatgccattacattttggaaagtgtcaaaattaacgggcctattcgacaatagtttacccaccaaacaccaacgtgcatcaaaatcatcaaccagtccctcctcttgatgaaacaataaaccgaccctttcctcttcatcaacttgtaaatcagctcattaatttctcatgctctttcatcatctgactactaaaagccttaaacaagcaacaccgttaccaacaaattaacacatcagattgacgaacatgtcaaaagacaagacagaagaaactttattaagtcccccttatgactatatgtaatatgacttaagaaaaattcaacattaggctataaaagaaataaatgatcgttcatgaatttagaaaaagctgctagaaataaatgactgtatgtggacgttagaagaaagaagaatttggattctcttcttcatatgaataaatttatgcaatttatcaaatttttatatcagatgagaatcaagttttttttttctccctcttcgtttgtaataattttcttcctactaatttgtgcaactgacttgagttttatattattattattaattaagggattttttatttttatacttttaaaatagttttttttt

SEQ ID NO: 295644 - DNA, 3784 bp, Cannabis indica
taatttaatattaaaaaataatcaatctaaaataaccgatcaaatccatgcttttacaaattggattaaattgaatttgagttattatacaaattgaattggaaccaagatataaaattcgcacttagcgtgaatcaaatgcactatgaacaaaatattgcagattgaattgggtagttagttcatttgagataacaaaagaaaaattttcacaaccagaatattttactcgtgtgtggaatgaattagataaaccaaaatgacatcccaagtcccaactatgctcgtgatatataatatggcacaatacttacttcatagacttcatttcactgataaagtaaagtgtaatccttatgaatattcaacaattctcattaaccattaaatccttaaaactagaagaaaaggactaatcttttttcccaagttcggttttagaagtacattcgaaacattgttttgtaccattactgctcaaatttcctcctcctcaaaaggatctcgctcagggaagtcgccaacctaagatgataaatttgtaaaatcattcaaatctaataaaaccaagcaaatataaagaaactaatgtatgtaaactgccagaagccacagagcaataaagacttcatagaaagatatgtaaaccgcgaagacaaacatgtacaaatgcatattagaatattacatttgaatgcacaaatacaatagaatgtagggaaatgattatgttataacacaagaatattgtcatttcattacattatgttataacacattttgaaaagcattacctgcacgctaataaaaaataagttcattaagtttaagagaaaataactttatatttttatatgagataaaagaggattcttttctctctctcccttaatctaaaaagctaaattaaaagaaaaataatgcaaacttgaggagactctcaactccaattaacttcaaaaaaaagtttcatttgtgttttgatttaagttgagtcaagacatcaccaggcaaaaacttgctcttttggctgaaaagaaggctttttcagtaaactaattgatggatatttaggacacagttcaattaatagagccacgaagcaaagaaagtcaaaagattgacacacaagcaaatcaggaacaatacgaacagtgaaaccttcaatcaaggccatcaaacacaaaatgctttaaaaataataatccagccgatgaattatcaaaaaagctaagttgtttacaaacctttactttgtctggcctaaccattgcaccctgaagcggagggcactgaaagtaacgtgttccttttaccctagtacacgaataaaataacttaatttaatattcatgcacagaaacataacagtctacaaagcaaggggatgtaattctaaaattttaaatgcctcacgcaagtaaagcaaaaccataaaacaagtattcactatttacaaattttacatatgtcatatgtgggtttataaaaaaaatacaagttactgcatgctgatcaaacctctatgcaataaagtagatcttagaagattcatggcaaataaagctaaaaattatgagcttcatatattctataatggaaaataatcactttctcttggcaaatcactgaaaacaaaaataatttctaaaaataactgacgcatcaaacacaaaacaaaaaggcttcttaggcttggaaggtaatctgtggcactaaacaccataaagtttttatagataaacaaaagaaaagaaatgtaagagcttactcacatgccatcatgttttcctaatggttcatcatattggattccaacccagaaaccaggtgccagagattctgctcggccaacaaatttaacaacacctcttttcgcccctgggtcgacttcgcatctatctcctatctttaaatagtcaaatgtaataagaaatgtcaggacaagtcacaactatcgtttcacagtaggagttaaaaaaagagacaggtattgcagtaaatagtaaatacccaggctgctaaccttaatatttgcacacagatcttccatgtaactgtctgttatctgtaaataaatttcagtaaacaaataatcaagctagattccttctagtagacccgtagacatctaagcattttatgccactttaacacagttcacagaagcctcaacttacaaagttcgacatcagcgaacaatatttagtattaagaacagcttgcttggtttatgctctttggaggtatcgtaatgaagttttatggaatcaaaaagtggcaatgaaaaattcaattgtatagagtgtgaaaagagaagttaaatatataattgatcatattatgcctaagaatattaaacaagaggatttgatttggttaagaaggctgtaataattgtcatttgtcaggcttaatttttataaaaagtgctggtagtttgtaaaattggttttaatgagcattacacaaatccgatgtatcgaaaaataaaaagaacagcttgctaacagaaaacacaatacatcaaaggcttacttttgcctcaaatgctgatgggttttgcgataccatcttttccttaaattttctgaaagttcctgaaacacccaaaacaaaattgcaataagcaaaatgaaagaaaaagaatatcccaggtgataaaatctcaaattttaaataattcttaaaatcataaaactccatatgctgatattttattcatcaacatctattctttcaaatcacacaaggaaacacccacctctcttttgtttttccctttttgtaagacaatgaataccgtgcagctcagatcaacttatgaatttcaaagttgaaagaaaacattcattcaaaatctcttgacgtgaaaatgaaactcatttataaaagacgccatgtttcttcttcaatatccatttcacaatcctacaaagctttttattctatttaactcaatacattcaatgctacttgatcaaaattaacaataccattttgaaaaacaacagttgtttagcatattaagttaaaactgaactatatttcctgggaaatttaccatcacgttttttgtaagcttcatctgaaatagtgtacttctcaacaagtgaagtgtcctcaagccatccaccggatgtaactgacgaagggtccagatctatcacatgaatccgatacctttcatcaccaaaccaaaacaccgatttcggaaaaatgttcaaatctattgcatatataacaaagtttgtatgacaaacagactaacccatcaaaaggggagtaaaatccaagaggcctagaatcatcggataaaatagcaattttggagttgttatcatcgtaaagctccaatgccattgaagtcactgaagtcccacatttatgccatagcttctctttgacaccctccactgtagtctgaaagagaaaaaaaaagaacattgatttaaaacaaaattgaaataggaaagaaaaagggcgggggcgaggagtattgtgtggacaacctgaagggagaaacgaacgtcagcgttgaaactcttgagattggcatgagtgacgcgtagaagaaccgagttgtctccgtcgttcttctgtaacatagacgccattactgctctgctgttagtcacttgcttgcaaaaaggaggctttctgtacccaaaaagaggaggaatttggtgaggagcatagttttatttaactatagcttttgtagttatctaatctaacattaagtaaatgtgatttattattatttattgggtaaatactattt

SEQ ID NO: 295645 - DNA, 1232 bp, Cannabis indica
tgaataaaataagtcagtagtgtattaaagtaatgagaatttttaatatagaactgctaagtatggtttactatacattatacttctagtgtgtgtgattttgattcagatcacatatgtagatagacatatagtaaatgtattgtgtataatttgattatacatgactggaccgatatgtaataacatctttcatcaacatgtcgtttatcatgaaagagttattcatatcacaacgatgattattagtagatcattctgaatcctgagtatacatgaactcctatttgtgttcattgagttctttgattcatttgttaaagtttctcagagaagatgattcttacaacttctaagttttggaagatcatcacactccgtttgtgatagaaaataaagtctgaagcttcaagccaaatttttacgatgatccgttaactttcaagaaaaaagatgcaaataaactttcttgatcattttttaagatttccaaaacatcttaaattataaaattctgagatatatcaagagagttatgtccaaaataccatcaataaatacagtaaaaaatttcaagagctgcgactctctctatagaaagttgtgattcttgactataaatggcaactttctgatttctatcaaatgacaattgggggcctaggtcatggaattccattaaattttgtgactctagggggtaagagaggcggctagaaggagaaaaataccattggaggcttcaattcaatttctacatctatctttaaactttgatgtttgtaattcattctttgaatatttagtatgaattctatgaataaatttcagttttagagtttttatgtgagtcacttgaaactcttttatgaattaatatagttttttaatttcttcttcatcttctattcaattccacaaaatctatgttaatttagcaattatttgttggccatttatatttattgtttatgatttcaaatctatttgaatatgctatgttgttgatacaatttaatttagaatgatagtatcgaggttgattgtataatttttatgagttgttatattcattgctttctttctgattaaattttgctatacaaatatagaaagtttccacatagattgagtttataagtcttaagacgattatggactatttttgtcaacttgttttttttttttttttttgaaaagaaggtgaacttcattaacttataatagccaaa

SEQ ID NO: 295646 - DNA, 10345 bp, Cannabis indica
tttttttttttgctttaattttggttttgcgaaaacaattttaactgtaccctaaccgtggggctgtttgtggtttttagaaacatttgctttgcttatgcatgccctctttacttccatgcttaatgttttcttcttgtgccgctccatagtttacttttaggatttttcaaagtttttggttcccacggtcaaaacttgtcagttttgatctttctgactttgtaactatcttgttgaaccctttgaagtatgtgaaactacatattctgcaggtgccaacttctatcaaagttctcgtcgtggcgatttacaagcttttggcgaatcaacctttcgcggaggaattgtaaattgtgtccccagaccgctacaagagtcgcggagcttacctcccgtctacatttttcttggttaatttccttaagcatgatcctgtagcaaacttatgttatttggattagtgagggaaggaggaccaagcatgcaaccaagtcttagccaggttcttttcagggagacaaggctgtctttaagctaacgttttagactatcctttctcgatctaaagtaacaaagctgacttagcattagacaaactttttcgaaatttgtaataatagagctgttgggccacggagggcttccaagcgtgcttcttttttctcactcctcgtaggaaacttgtaagcgtggtcaatagaccaaggcgactgcaatagcatttcgaacaatgttcccttttcaaggattatgttaaaaacatattggttgtgcctttcgcgagaaccaagttggatatgcagcagatttcaagcggttcttccttctaggaaggagggttgactacgcattggaatccccaatagcttagccattttgacaatttttgaagtaaagtacaattataaaattaaatgtaaatatggataggaaagcaataatttaggcacttgtatgtttttgagggcccatagctaggtatactccccccgagtgatctaggaagtttggacgtctccaaattcgtggtcacttgtttaaaacataacttggccggaacaaacatgtgaactcttgcgcaagtttctttttttttttttttcatttcattatactcgaaggttcacattaagaaagaaagtttacaaaaaattcacaaacaactgtaggggagtgtcatatctggatacccccagcctattagtaataacggcacaaatgatctgcattgtaggtgcgagggatttatgatccatccattctcttaagttgaaacgttccctctcctactttgtgctgtatcttgtagggtcattcctagttaggtcctaagacccccacttctgactcttgggaagttgggaagactcttctcaaaacaagatctttaacgtcaaatgtacgacttctaactttagaattaaagtgcatggcaatcttgccctagtacagcttgatttgaacttgtgattgttctcggagttcttcaattgggtctaacgattcttggaggaagaaatagttccaggttgggtcataagtgtttggtctgtgagaagggaccgtggtttctactgggatgaccgcttcatatctataggtcatcgaatatggtctatgccatgttaaagttctcttcgttgttctgtattcccagagaactcacggaagctcctccggccaatgagctttataagcttggaatttcttcctcaacgttgtcttcaagatcttgttcacaacttcgacttgtccatttacttgtgatttagccacagttgagaagctcttcacgatttcgtgttgattacagaagtgggtgaagagatcactgtcaaactgcttcctgcttcccattgtctatgttggtggagtgatcactatcaaactgcttctcattgtttgaggcaatcttgtgtggaagtccgaagcgacatactatatttttgatcacaaagtccatggcctttttggaggtaaccgtattcatgggttctgcttctacccacttggtgaagtagttaacaacgactatggcgtacttgacttcacccttcccagtaggaagggatcccactaagtcaattccccagacagtgaagggccatgaactgctcatgattgtgattttcgttggcggtgcgcgcggaaccttgacatatctctgacattgctcacacttccagacatattctatgcagtctttcttcttgataggctagaagtagccttgccgaaggatctttttagataggcttggtctggaagtatgatctccacagaagcctccgtgaatctcatgtatgatggcacttattcggtcccggccacacacctaaggtagggcacagataattccttgcagtaaagccttccatctaaaatcacatataggggggcttggtactaaatcttgtgagaagcatccttatctggaggtagatgggccatatccaggagttggaatgatcaacgatggcatttacccctgtgttttgatgcttgacgcttcaagacgagcaacaggtactactccatattgaatgatctttgggtttgtagtaagttttgccaacatatccgcgaacgaattctgatccccagggacttgacagatgttgtgcctttaaacccttgcaacaattctcgggagaccattacataggtatccatccttttgcctttggtctgatattccccaaatatcttatttaccaataactgggaattactgtgcacttcaatgtgttgggctccaacttctttggccaactgtaagcctactagcatggcttcgtgctcggcttcgttgttggaggtaaaaaatctaaaacgaagagcgctttgtagctggtgtctttgcggagagattaatataactcccgctccagctcccttttcattggatgctccatcaacatatactttccaagtgggtaactctaggactggctcgtccgggaggtcacctaccctggagcattctatcacgaagtcagctagggcttgacctttgattgacccccgtggctgatattggaagtcgaatcggctaaattcctttgatttattggtgaaaaatacatgaatttagttttccaaaacaataaagaataaattggaaaactaaactagtttcctataatctcttatcagtgtgtgtcaattccacaaaatagagattttatatgaataattaaatgaagatatatttattgaaaatatcattgaaaatcttattcagtcgcgttatcctgcttagaggatctggcttcactagataataaagatttgtgcagacaatcaagtacaaacttattagttttaagtatagaatgctctggccgggccgtggagagaaaattactcgtccagagttctcactattctccatgtgtcaccatgctggatgccacatctctttgtgcggaatttgagataacacccaacttttcctcaatagcctcttatagttccggttctacatctttatcttgtataaggataatcttcaatataaattttttacactgatgtcatattagaccacttcctgtcacacttgaaacaaacatattacacttttttctttttctctcactccagcctttcattaatggcaaaaccccagatttgtatagtgaagaaaagggtattgaaggagtgacaaaagtgctcttggaccttattccaccacaagtagtaaatgatcagcggggtgattagagaccaataacatgattggggttagcttcaataattcgagctaattccattgtcttctcgacactcgatgactccaaaatacagagctcatttcattatcccaccacaagtagtaaactcctctaacaacaacccaaattgattgacaaatatagttcgcattcaattattaaatgctgtcacaattgctaacaaactgcaaagaaagtcctttgcaaagagaaccaatgagatgttagtcccatcggtttctacaacacaaatgaacaaataactgggagtgaccaaacaaccaaacatgcagcatttaacagtaaattagtttaaaagactagtgccctattcacaggttgattaaactgttatgttaatagaaggtttggcaatatgtttattatataatgacaggaagataggaaaaaagctaaaggaattctaaagtttcaatatggattgctgttgagatcatacgtgattgtataattaagaagaagaagatggaacacaactgcatataggattcctcataaaatatttgctaaaagaacagaaagaataaagaattagaatgttagttaacaaagatcagatttatatggtggtattgctcctttattattgaaccaatctaaatgatcaaagagattgatagacaaaaacataatgaacataaaataaactcatatttgactagtgactaatgtagagaaacaaagattgatattaaagatcgatgtaaatgtacttttcaagaaaacaaacaaccaaaataaataaaatatataacaaaccaaccaagccaatccaaggacaaccagtacaatgtctgatgaggagagtggaataagatggatgagagaagtagaataaacgtataagagattataagtaaacctggtggtcctgaacgggtgtcaatggcggaaataatcatcaatttgagatgtcccttgatgcgaagaacattggtaactctgaaggccttactgttggtagtaagtgacttattgcaaatattgattgatgtgagcagttacagttattcttacagagaggagtttaaaaaataaccgctccagagcaaagttttttgaggtatactattccaagtttaatgttgtgtgcatgttttctaattagaagaaagcattaatttatggaattacataaaataacggttgcatataataatatacggttgtattgtattgtataactacaaaccacttctctcctcctctggctgagactatcttaggtgttaatcttcttttttgtttgattgtgatctgatactgtaaataatatcttatgtatattttgcaagtctctcaacataattttgatgtgaagctactaaaattaattttgggtttataaaatgttaaaattaatgacacattcaaggtgggattcaatggaactagaagaaaaagaacttggatatactttttacatgtctcttagatttagctgtaatatgtgtgttatgtatatgctagaagactttaaatttgataatctgagaatggaagctgcaatgagtgtttatttattattaatattttctttaagccagtcatgaatgattaagccttgtatcctctcatgctttaattttcttttcagacaaatgggcagttcccacaaccacaggctattaatgtagacgtagaaaacagataaaaaagaaaacataatattaatacaaccttaaccttaatgtgatataaggtaactgttaattgcgttatccttgaataacttgttgcagggtcgcgatactgtggagctaagtagaaagcgagacaagtgatagtagaaaccgcaacatagttagaacacagagatctccaagcagtggctgtataatcctcttccacttgttataggccacacatgttcccttcatttctaaattttaaatttcctgtagtattttgtaccatgtttattttgttagcatattccattttgaagagtttaaaggtgtagcctgacgtcatattacgcaagacaacagtgcaattggttttggtgcttggtgaagaaagaagacgcctgtgggagatggtcttatgcatcatatcaggttcatcagattttgttttgtttattttcttagctttgttcttataggctcgtctttatttaactgaactgtatttgtgggtgtgggggttgaagatagtttagtttgaaactttagttgtttagaatccatgaatgctttgcaataagccttctattaattagcctttaaaaccccatgttggagtaagaacattaataatctaatcattaattgggtgttatagattttgtgtaatatatctgtcattggtttttattcatattacctcaacttttgttctgtggaagaagccattattgtctttactttctatttgcaacaatctgttgatctgccaaataaaacatgccgtttgactggggcttggaggtaaggaagacagccacaatctttaattcattctctggaatttccaataaagattaaactttcatgcacaatacttactacttacactctcatcttggctgaggtatgcttatccataactgatagatcgtattcgtagtcagaccatgtctttttaaatgtataaaaatcatctgttttgttttttagatcatatcatccatccataccaggataggcataggggtgcattttttttaattcctctatcccatgcatattgttgtgtactgtatatatgagtgtagagattgaatcatgaatatttcttacaagtcctttatgttattttgttattactgctgtttatataatttataaatagcaacagcaggttttcaatagacctgcactctcctgtgctgtgatacctacatatttggactggactcttaatcatattgtgcataagtgtaataattaagtaaagggtctaacaatataccatgtctttaattaccctcgtagtttggttgtctcattgatctgcctaatcatgttgtgcatgcttgatcatggtgcttcattctaaaggctcaaagtaagaaacatgtagaagagtacagcaacaccaaccaacaaaatcaacgaattgatgatcgtcctactacactacaaagctacattaagttttgagtttaactgactaaagagaagactgcaatgcagagaaaaagagcatgagtgtttggattatgactcaggaggacacatttcgtatactatatttctggacttgtcgtaattcttctttatttatttattttgtaataactgaaagatttatgatctttactttcttacaaatttcgtgttttcagataccaagtgtgagactatagtaacatgacttgggattactatcaatagatgtcacaaactatcaaaataaactcgtaaatctcaaatccattaaccttcaatccaatccatcaaccaacaaatataatattacacttggtcattgttagtggaattttgagtacatttttatgtgagtcattgatagtctatacataaattagtaaattacatacaaactttaagtggtaaattgcctttaacaagtgaaaatctttaataaagatgattggttaaagaaaatttgtagcataaatgtatgtcaagcttgctgtctacaaatctctaaaaaatgtgtatgcacatatcactaaatataaatatatcatattcaagcttgacatcaaaattcaaactcataaaacattgaaaaaaaaaagtgaaaccaaaaatgaaaaataaaatattacttagcgagttcggctagtgcagttattggatttaggtatcaccttcacgtcgttaagctattctttcgtcttcagcgacaaatcttgtcgtcaagggtcgtgtcgtgtgttgccctccattggctacctaggacatggagctttctgtcgccatcgttggcttcctaaaccattgacatcgtcgtcgtaagcagccatgctcagaaaaacccatgaatttctcttcaaataattcagttcagcttttttttttcttaaatcaataaattaatctatttaaaaaataattagtgttaattaatatctgaaattaaattatgttagttattgttttaaaaaaaaattctttgggttcaaattatttgagttccaattgctaaaaacagaatcagtgaaaaaaaggctaagttgaatctaattaaacactaagacaatttgatcgcccaaacataaattaggttgggtacatacatctatagtctacaagtaactctcactaccagaccagttcataagcttgcattctaagatttaaattaaaccaaaacagttattatcgcctggcaaaataaaatagaaaatgaagtcttgatatcacccggtaaaagaaatccagctgcaaaggaagttaggactaatgttgggattgaatcctcagtttgagggtctctgacaagctgaaaagagctgacaactgatcaaagccatcactaaagaaatggatagttggaagccaaccacttctaggaagtgccatcccaagcctcgcttaagatagctgaaaaaacatcaacagacatgatcaggccaataaaccatgccagaaggcagggacattgtaggtggaaactttaagctttcgagcatattttacaaactgaaaacgacacagttaaactgaaatacagaagacacacaaacacacacacagatcatagaaacaccaaaccttgtgatggatggcattgttgctacaatcactgcacatgcgtatattattggaatcaatgtctttggtttgttttttcgaagccatatcagagaacccaatgcaacaagagatatgctgaacacctgaatacaacaagtgaatacaaataggtaaatagtgatactaatgcaatggaaatttcactccaaaactcagggaaaagcatgcactgaattcatatgacaggtcttaacaataaaaagcaaataactttaccagatttgcatttgcttcaaggccttgtaggatgaaatcccaagtaaattccaatcctctggcacctacccaaagaggtgccaatctatgcaaaacagaatctgcgaaagcccatcctgcaaacagcgaattaacattaaaaaaagttaaaagctttccctcaagtaaaagaaactacaagctaagataacaacttgaatttcgacttgcaactctttttatttatttgtcccttaacattaacatatattaatttgtttcggtaccaaattcacaaaggtcttccttaccaagtccaactgcttgaaatttatgattttgagatatatttctttgagtcgactgagtcagtgcaaactaaaggccagcaacatctataaaaccaattaaggctttcaaggcttcctgcaagtaaaatagcagaattaggtgatgtaactgcaacccaaattcatgaacaactggaattattttagaagattttaagtatccatttagcatcttattatttaaaatgatgaatggtgaccaatgttaatcgtttctagataaatgaaatgcatggtaatgcacacttgagaatttaggagtccaaatttgtgtcgaagatcttcattaattcaaccaattaagataaaaaaaaatggaactttgaagggcctccactccagtcaagcaattactcggtgggaagtcaagcaccttcatttcaacataatccacagtccattttcaagcttaaaccaaatcaatcttagtgaagggttttttcaacatatattatatagtttcaatcaagccaacatcacaaacggtaaaagccagtttaggaataaatcatataaaaaaagggggggcttttctactaattgaagttatgaaatgaagatcgagcaacaaagtagtaggtagagagcaaaattagagtagaaattacctggtaaggatcaaagttgtcagtctccaataccttaagaaaagttgcaagacaaacaagctgccaacccaacacacaatttatttaggtatacaaacaagttagatgcaattgaaattaatagaatatgaaaacaaaccttgagtaaatctgtaatgagataaacaatagcagatttaatagaggtaccaagcgtatcatactcggatctgaaaatcagttgtcatgaattgagtaaaggtaagattttgaaattgtaagtagatctatacaaaaacaaagatgtaaaagaagaagaagaagaaaggtacagaggcgtggcggagtagtagacggcgtgaggtccgaaggtaagaatggcacagttgaagaagtgaaataacgtcattctcaacaaattaaagcaaaggggtttcagtttcagagctcagagaagacaacaaccaacgaaagattcaatatttcatctcaggcaggcatggttacactgtaacttttaagatgaaaaaattgtttaatggtatttggcaaaatataaatgtgtaatttggtattattaaaaactacatgtgtaactgattagagtaacaaggaggtaattggttattctaaattattttccaatttttattattattttttttcataaattttattgtgcgtttggaaagccacaatgtaattggatttgtgtgtaa

SEQ ID NO: 295647 - DNA, 2429 bp, Cannabis indica
aaatctctccatccataaccataacatatttctcttccgccaagctttttcgtctctttcccactcatttatatcttctttcacagttcacaccttcaaaaccaaacaaaagtccaaactacacacagaaagtctagcatatctctccagctgactcagtccgctgggacccacttagtctcctctctctctatatatacaattatttagctccagaaaaataataaaccaaaaaaagaaagaaaaaagaatgggttccgcaacttgcccggcgattctcctcagcctgttttttatctcggcccacctcgtggcccaatcggcggcccaaacaccgccaacgttcacctgcagtaagaaggccacgtgtcaagctctagtggactacgtggttccaaacgccaccactctcgacggaatccaaactctcttcggtataaaaaagctgtacagtcttctcggcgccaacggccgtccgacctcgactccacgaaccgcaccagtggccgcgaaggagacgatcaagatcccgttccgttgtatttgtaaaaacggaacgggcgtctcgaaccgggttccaacttataccgttaagaaaggagacggactggaccatatagcgagagacattttctcgactctggtgtcgtaccagcagatcgccgccgttaacggcattaaggatgtgaatttaattgaggtgggtcagaagttgtggattccgttaccgtgtagctgtgatgactttaacggaacccaggtggtccattacggacacgtggtgcaagctgggaactcgatggaggggattgctcaagattttggtactacggaagaggcgttactgaaactgaatgggattgctaactctagtgagctcatggctggtcaagtcctcgatgttcctcttaaaggtttgcttttcttcatcttttattatctttgcttttttcaaagaaaaggctaaaatttaattaatggcattaaccatttttgatagtttggatgaaaagtgaaaacccttttaacatttgatagttttctttgattttgtgtgggtgtgcttaatgcttatgacattattattctttaattaataaagcattaatattacttttccattcagtcgagttaccaggcctacaaagatagtgggatggtattgctagtctttgtatacatgattcattacgccattacatttcactaccccacatacacggactcgattttccatggttttatcttctagtcggtggacacacatgaataataaaatagctggttcatatcacatgatcattaatattttaagtcatttcttttttaaatctccataatcttactgatactatgtttgcattaagttattgcgtttggaattgtacttactttagtttattacttatatttgaccgattagagcccggtcatttgtgaagcattgctattagtattgttttgtgattagttagcaatattcttaaaaaattattacgttaatatttaatttaattagagtgcctctagcatttctcgtcatttgtgtgcactttattggtcttccctagatattgccattgggaatgatcacgaaactttatttatctatttatttaattacttaattaattaattaattaatcatctttattgtgagtttatatcgcataatggtatgaaatttatttattactatactaataatgggtttcatttttggatgcagtttgtgcatcatcaatgaggaatggctcgttggataaccctatacttttgcccaatgggacttatgttgtcactgcttatgactgtgtcaaatgcagttgcgattcctcaaacaattggacgtgagtgtatttttcataattttttttactttttccctttttaattaaagacaagtctgatctaattaattaattgtattaattgtcttttgaagattacaatgtgaggcagcccaagttaagctaaccaacaagaaaccgtggtccacgtgcccctccatgcagtgttcggaatctaatttagctttggggaatacttctacaaccgattccacttgcacaacgtgttcttatgctggtttcaataaccaaaccatcttcacccaattactcaaccagtccacttgttcaggtactccacccttcttttaaaattactacagatttaatcttctaaagtattttagatataatataaaagtacaatattttaaaaattaaatagaatgttcacctgtaaaagaaatttaagtatataagtacactatagtatattgtaaaacttattcaatattttagttgatatttcttctaatttatatattgaaatagtagtgactttcttaaaaagaaaatgggtaaatactatttttgactttgtgttttgtaaaaattattaattggactttctgttttgtt

SEQ ID NO: 295648 - DNA, 3197 bp, Cannabis indica
tttatattttttttattttttatcaattttaactatatgtattaaaaatatataattttaaattaaaaaaataacgattttcccacatagcggggttgaccgggttaggtctggacgagttgacagagcataggtcaaatccggtaaaaatattcactcctacatgacatggttttgttttttttgtaagatcttacatgacacggtgaatatctttgatctttgtgtaaagagagggaaattaaaaatattttttttttctttaaaaaactttcctaattaaagctaagctaagctattctttcctcttttaaataaggaaagctcagttattattaaatatttattttatgaattggagaaaagaaaaaggaaaggaaataataataacgtatcaatatttatttatatctaacctaccttccaaggtgaattttctcagcaaggatgattgatgcaaggatggcaacgatgaccatgcaaagaggattaaatgctgtcacgaatactgggcctctagttttcattactaggccttgcacgtagtatgtgattccagagctaacaattccctgttgaccacatatcagtcaaactaattaattagcttaattactatgtataaatatataattaataattgcaactttcaatgtataggagtttttatataaatatatattttttttatttctcggtaaaaattaaaaaatgtatgaaaaaaggcaaaatcaacaaaattgggtataacaaaattggtgttcactcagtgggttcgctccataccaaagttattggccataactcaatctaacaaaatggccttgtaggagagaagtgctctcactttattaagtggatcatttatataatatgactagctagtaggctcaaaatttttattttatgggagttaatttattattaaaaattatttatacttatattataattactctaccagatttaattttatgagaatttttttactattttattatgtaattattaaattaaaaaaattatatttaattttttaaaagataatatttttttttgttagtgaaagctatagccccacattaatactactagatccgtgctaactagtaaatatgagactaatactatggaatattaactaaatattaatcactaaatattttgttgaggtgaagggctgagatatgagcattggaattatattagttaccgtatagagaggagcaagtagcctggagtcccaacctacggcccaagcacttgggtgatgttccacaactaaggctaatgctgtgctttgcaatgcaccagacaagcatatcaatgtagacagagacagttctgccgggtacttcttcaccgtaattgactgtttaattaatttcacaattaattattataattaattaataatattataattttaaggtaagtactagccaggtacgtacttgtaaaacgtagaaacaggaccaggcaacgcagccaatgagaataaaaatagtgccgaggacccagtttttatcagaggaatgggtgagatcagttgattggtgggctgtggtcctggtccaaaacaggtcaaccactgggcctttatacagtgtcattagtaaagcccctgagaagctcactatggttcctatcacctttgcttgacttcttatctccttaatccttattctctctatcctgatcatccatcatgatcaattaattaataattaactaatatgtataaatagtgagcattgttattgagaatttttgatgtgtcgcgttggaatttgttactagttttttatattttttaattaaattaattgtataaaactttatattttaaagcacattagtatgctacttcgtatagtaattaacaacttaaataattattaataaaacttcttttattttaactaaattattatatatacctgaaaacgactgctatgagaaatgtgacggaaggcacggcattcattatcgcagatgtgtatgatgccgatgtgtatttcattccaaggtacccaaatccttgatcaataattggcctgagacacaaatataatatatatcaatattattattaaatttataatatagtttactttttgtttttgttttttgtacacagatacgtacggacagtatatgacatctttatttagcaaaaaaaaaaagtatatgacatctttttaatttgtttaattagcattctcttagtggccaaaaaaagttgataatcgtaactgcatataatataaataagaaatctaaagggtattagtggtccctagcactcttctatgtgttaatatcgttattagtccaactaagtatcgagtcccatataatttaatataataacttttaggaagtatcgctagccaatcgatatgttgaaaaagtactaggcagcttaatagcgatgattataaatatatattaattgtatccaataaaaataaatgctgctgttgcgggctaaattttgaaattctagcctttttacggcgcataattaattgtgttggcaaacgacatgtactgtattttcgtaaaagttcaaaaaaagaaaatctaaaatgtaagaatatattttgtaattgtataccagaagtaatttaaataaaaataaataaagtatttttagtccactggccagtaaaaattgataatattaattatatataacacatatatttatatatatatgtagtccagctaataaatataaaaatcatttattattactctaagaatcccagtgccattatctggaggaagatggggagtgtcatctttggtcttattttcctgtaaaacaagcgcaagtaattagttgtaggacacgtacatgggtacatgcatgcagtgctaattgttggtgtacgtaaaaatgatatagtactgagtacactttttaatttgtactgtacatatatataagatactaatctatatctatgtctatatctatgactctatgtataaatttagctagttttcgtgtcatggcgtgtgttttcttcttgattaatttcaattttttcatgcatcaccttaattttactaagatcaaatacataatacacatactatatttatatttcagaatctataagtactgactagcaggaaaataactatatatatatatatagagagagagagagagaggagagagagag

SEQ ID NO: 295649 - DNA, 1490 bp, Cannabis indica
aaaaaaaaaaaaaaactacatttaattaccctacatttaacatagagataattatgcaatccaatgttaatatcaaaatatttataatattatttctgtcaatttaattatttaaaatgtcatggttgttttattacctcacatgcatactgagataaaaagtcattatcttctctcgctgtggctaatagtaataagtttttttttttgtctctctttctcaatttgagtttcttttttttttaaaaataaataaataaatgaaaaacttaaatggtggaacatactcatattctctctttttaataattttaaaaattattttggctataccgattatcgtttggtatgaagagttgcaccaatgaaacctactctttattgtgataattttaatatgtgagaagtacatattttttttaccgtcaccaaaaaaataagacaaattaaaagttatccttttagtttcttttaatttaattaactaaaaagcgatcaaaatttaatataataaaaaaataaagcatatgtttaaaatgttttccacttacactattattatttggactcaaaattggtattgtgacaatttatttatcattgtgctcattttagcatgtgagaagcatatttttgattatcactgaaaaaaaaatgattgaaatcaagagtagcttttaagtttctttttaatttagttagcaaaaataattaaactttcaatttaaataaaatttaatatttcaaacaattatatatgttacaaaaatgtagtttgtcatttatattaaaagtttttagatagtattatacataatcttatttggtaagaattttgacaagcttctaaaataaaaaatcacataatatcttaaaattcaatacaacaaccaacatcacatattattttataattttgttaactgtgttccttgccatgagaagtatcttggcctcccttgctttgcaggtagaagtaagtctaacttgtttcaatctattcgtgataaagtctggaataaactctttggttggaaagccaaatcttttcctgtgaacggtcgggaagttctccttaaatccgccattcagtctattctaacctatgccatgaacatgttttgccttcctatgaaactggttgagaaaattcatagactttgtgctagattttggtggggaggtgatgatgagaatagaaaagttcattggtgtatatgggaacgtctatgtttgcatataaatgatggtggtatgatattttagggtctctttgtttttaataaggccttgttgactaagaaagcttggtatattattcggttccttggtctctagcggctcgggttatgaagggtctctacttccctaatggaaacatcctctctacagaagaattaaaaaaggactcttttctttggaaaagcatcctgtgggggaaggagctgtctataaagggtggtcgttggcttattggtgatgggtctact

SEQ ID NO: 295650 - DNA, 2643 bp, Cannabis indica
acacttctgattcagaaaaactgagcctctctctctccctatctttggccgacctcttctcctctttcttcttcattgaaatttcgaaattcttagtgtgagaatagtgcccacacacagcaagtgatacctcaaccatagtgaggaagatcgtgaagaaagactttcagcaagaaggagtttcagcactaaagaatcagagaaagagatccaggttcagatattgataatgctctgctacaaaaataatttccaacagttctgtgcctgtgcaagattctagttcccattccattgcaccggcaactattactgaggttataaatccaccagctgcacactcatcactaattcccacaactacagctagtgatactgctcctatgcatgagactcctggctctcaaaatcccaaccctgcaacaccagtttctcttgatgaaaattacaatgctactggtgtgaacaatattactgaaatgcagaatactgcagctgttcctttgcaagctgttactactagttcccataatgctgttgctactcagaatcacttggtcaactctcactccattcagactcgggcaaagtcaggaattcacaaaccaaagatctacatggttatcaaaattcccaaaacagtaaaggaagcactacaagatgagcactggaatcaagcaatgtctgatgaaatgcttcccttaattcgaaatgccacttatacatgggttccattaccacctggtagagaaccgattggttgcaaatggatgtttagatacaaagagaactctgatggcactcacaacaagtttaaagctcgacttgttgtaaaagggtttcaccaacaaccggagtttgacttcacagagacatttagtcccgtggttaaaccagtcaccatacacattgtcattacattagctttgtctcatggatggtgcataaagcaattagatgtgaataatgcgtttctaaatggtgatctcaaagaggaagtgtacatggtacaacctcctggctttgaaatacaagcatctcctccccttgtatgcaagcttcacaaagcattatatggactcaagcaggctcctcgggcatggttcgataaattgcatcactgtcttcttcaactggggttctttccatcaaaattagatcatactctattcattcaacatacatccacatacacaacattgattcttgtctatgtggatggaattcttgtaactggaagtgactcgaaagttgtctccaatatcattgttgctctcaatgacaggttctctctaaatgatcttggtgatcttcattattttttgggaatagagatcgattccacaccatctggtttacacctatctcaagcaaaatatgctcgagattcgcttgtcaaagcccaaatgcaagaagcaaagccatctccaattcctatgaccgtgcgtctctcagctcatggcagtgaaccaatgtcagatcctcaactttatcattcgattgttggagcattacagtacttactcatcacaagacccgatctgtcctttagtgtgaataaggttgtcagtttatgcacaatcctttactcactcactggctagctgtgaaacgaatattaagatatcttagtggcagaatctctcacagtttgcatctgaaaagacccacagatcatgacgtagttgcattttgtgatgctgattgggccacagatcttgatgatcgacggtccacatcaggtttcatcatatttaataggtgataatctagttgcttggtagtgcaaaaagcaacaaacaatctcccgttcaagcactgaagctgaataccaaagcttggcaagcacggtggctgaacttacatggattcactctctatttacagagcttcacattcagcttccaagacctcccactatgtggtgtgacaactcaagcaccatccttctgacaggcaatccggttcttcacgcacgaaccaaacatatagaacttgatctgtactttgtgcgtgaaaggttatgcaaaatctggttcatgtcaaacatgttccagctgtggatcagcttgctgatggcctaactaaagcaatctccaatcaacgatttcctcactttcgatccaagcttacaattcaagatcttgcttctgccacagacgactcgaattgtaatcttgaggggcaatgttaggggtatacgattgtgaccgttagtgacagttgtaacagtttgtctgttacaacaattctgttagatcagttgttagctgtgttctgttgtaactaattccttatttctaactctaatctttgtcactatataaccgtgtatcatcaacactaaatcaatgagattgctcgttgtttcatcaatcttcctttactttctttctgctgtctcttcgtaactttctttcaatccttcctctctttcttgctctgttttcattgtttttcaattcaagcatggtcaagagattcaacaacttttgacagtaaagtgttaagataaattgtctatgtgaaatatggtaataataattataaactttttcatcaaagtataaaaataagaaagatgagaaatagagtgtatgctatttatgacagcttcggtacttgggtagataaaccagaagc

SEQ ID NO: 295651 - DNA, 7315 bp, Cannabis indica
ccatatatttttgagctattctatctctaaaaattaacatatatattgcttgtcatcatctattggcccgtcaccaagttcttcatctgaatctgaatcaaaatcaatattgttcaaattttcacaatttcctatttcattttccatgtcctcttcgaaaaattcatcatctcaattctacttgcgaataaagttgtaaagtacacaacatgctaatacaatccaaccttattttttgatggtgtattgaggagctattgttagtattgaggagatggaatatatttttttttggcagatggtataggtaggttgatttgagaaaataggttgataaatgattggtgtctttatctttttttgattgagagagatggaatatatagaaaataggttgatgaaagattgtatatggaaatgtatattaccgtgtttgatgattgatagaaaaagggaaagtcaatacattaaaaataattaaatatcatatcaattaattaaaataatttgaatttatttttggtatgtaattacacccaagtctcatagggggggtatgagaattggagagagtaattgagacctcccaattacctctaattacacagttactatgtaattacgtggccacacaaacacgaccaaactgtgtaacttacctccaattacactccaattccagttctcaggttcggctttaccaaacggaaccctaataaaaaattttagatatgattccacaaactctccgatcaccttagctatctcacgaaggaccttgactgacatactccctagctgcacattaaaaacttgaacccagatatctagtttattcaaaactagagagtaaggctcttcttcttcctttagtcttccaaggatcaattgcattctatcaaaagtccatgagctactttcaataaccctttgaatgttaatcttgtgatagaactggagcaagtatcgatcaggtggtaactctcttacaaacatctccattttaggtttccatagagaagtcagcatgttttgcatgatgtcaaagtcaaaatctctatcagatagaaaacgtcccactagacaccatctcatatcaataccctcatcttcttcaccaccaccgattgccaccccctcatcttccttctgcacgcgaagtatttcctcctcaactacactcatatcccaactactcgacaccataactatcgtggccacacaaaaactctcacagaaactaaaaaactcataagcgaagagaccatatcaatagaccaagacaaaagaaatacacagaatgaacggaagaggctcttaactgatattatctttgtattttcctcaaccacaatgtataggatatgcacaaatagaaataattgtatatataatagtttcttttataatattttacacaaatatgaaaatatgacaattacgagagatattcaaagtcgaattcaaaatattattataggaagttggctagaagtgagcttgatgtgattgatagaatttgaacgtcgtaattgttgttttaggttgcttgaccaatcaatgggtagcttgtttattctgcttgttgattaataaagtgtttttttttacaaaattttttttttattttatttacagaaaatacagtctgtttttgttgtactcttgttattttattgttaattttttgttatttttatattatttttgttgttgttttgatgttatttagatgtaattttcatgttacctttatgtagttttttgttattttatgaaaaattgtaaatatgtaaaaaatattatttaaacgtaaaaatgtaatttttttttttattaaaaaatggtgccttattatcccttcttttctcttcaagaaaagatgaaaaaaaaaataaataaataaattatttgttgttagacccttagttgaggctattgttgggtttcattcttctatattgtaaatggtttggtatacttattattgttaatttttcttcatatggtttctctctaaaaaaaaatagagattatttgcacttttcatgaagatccatataatcattttcattattaactaaatattatgttttatgttctaaagttcaaagaataatttttattttaacattatttcattgccattaatacaagtttttaattgaattttgatatgattgtagagttaaataaaaatgaggtgaactagggacttgatagatagttgatatgatactgatagcactgtctcttccgataaggaggtaatgtccttgatcatgatgtatgataaatgtattgaaattattctcccaaaacaaaatgacaaaataagaggtgtttggttgaaagaatttcccgtgttatcaaacgggttgaacaaatcaatcattatacattctaacccaaacagagtacatgaagaaccacttacaacttacaatgtgatggaagagggagggacttgtagatataaaagaatcaagtgtaccagtttctatctgaacagcccaaagaaaaagtgtaaattgcttcagcttctatcaacaatattacaatattttatatattcaggcccaaaaaaaataaattgcattcttcagtgactagaataaaaagccgaaaaggagcaaacttcagacattgatatccgaccgtcttgatctggcggcactaccaatttcagaagagccattcagagcaaatctaggcaggttatagttttcagagactgaaaccggctgctgagggtaaagagttggaggtggagtcaaattgcgttgagctggaagaggagggagcatattgtatttgtagggatcgccgctgaaactggaatcagagaccatgacaaagaatgaatgagaggggattagaaagataagcattagcacaattgggaggttgagaatgacagaaaagtttcaaaactttagtcactaaattaagtatcattcatacatgtgttgtttggactcatgaataccgacaacaacaaacaatataacagatcgaaacaaatttcgaaagaaatgaattctttaatgtacctagttttcttgtatgcttggtcatcatcgcttaaggtttcatccaaccgctgcgcaggtctttgatttggagaaacagaccatgagtttgaagctggtaattcatctgaaaaatatcttctcctgatcaactgaaacatggaaaagcaagactttaattatttccagtgcagtactatagtaatatagctataacaatttacatagatttacttatatacatcttgggctactataggatgtcacttcagccctaccagcatctatgttgtttgtatgcaaagaaattatagcccaaatttttttatatgcagtgtacattgtagttttaagaagcattccaccaattttcaagaaataatttacaatgttaaaatcaaagttcaacttcaaaacgttcattttatgaatgtgtaaaaaaattggcattttgaaccctgattttgacaccatacattattcttaatttttcaaaagctggtggagatcccttgctacagtcgattaaaaaaattacatcaatacttttccatataccaaaataagggcaaaagtgacaccaatcctatatgagaattttcttattcctattataaatatatatcaagaaagaaacaatcaaacaggtgaaaagagaagaatacggaccattcggaaaaatttcatcacagcttccttgtcatatcttgattcctttgcagcctgcagatatgttcaacttgtaaagtattgtatactagtacaaaataacactgagacaactgattagacttgaacgattcgaagatatatgtcaaactagggaaagacacaaatctagatttaggacagggctattatatttggagttacaattcatttatatggttattttctaatattatttcatttgatacatgaagatgttgaaaatcaaactccacagtgcctattcagctagtaatattcaccaagaaaaaaatgcggtacagaaatatagagccaaaatgtagctcatactttttacactaaaacagatagtaaattcaagcttgtactcttgaaattcacttatctactccaaaaacaaacctaggaaaagtctccacacagcagttttgagttctttgtacatcaactttcacccaaggatgcgaaatatggactcacaaactcacaaacattgagggaggcatttagactacaatcacaaatagtggaaactatcacactatcagtcgaagtcgaacatatgaaagtaattccacagcagacacaagatagaatacagtgtaaggccaggtaaatatacagcagagttctaaagttttttaccatcatatacgaacgggggatagagttcatgaaatgaagtgttattatactttgggagaggcacgagacttgaagtttgtttttttaacctttttactttcagcgaatcaatcagaagactgattgcacaaaactgtagatgataggctaccacacaaacatatacatattacacaaattaacatcaataaatccctcctttcatgcaacaacataattgtttagaaaccatttagttctttttcacaggtcccatacaagaggtgagttagcttcttaccgcaagaagccctccagagcctggaaaagactctgttagtggaagttcctcactcgatgggagcaaaccctgcttttcaacccaatggcgagctgcatcaacaagatttccactgcttcctcttgtaccctcttttgcagcaatgtcagctttattaccaataacaatgtatggaacaggaaggccaccaggtcctccagatcctaaaggagctgaaaatgttcctgctgtagaaatctcagttgcccacttctgcaaactagtttttgttctcctttgagaaaggtcatgaacgaaaataacacctgcaaataggtgcaatccaagaattaagaataaatacgaactgtggcctgtgccttcaaattttaatatttcaattgttttgatactttgcggaaaaaaaaagaattgttttgatagggagcaaaattaagaaacgatatctaaatatcatctgatgtgaagtccataagaactattactatcatggcaatgcacctaacttgttactaattgtttaatggaatctttaatggaaggaatccccctgtagttgtcttcaacatgcacttgcaaggattttacaccaatggagtatagatatatcagatgctgcctaagaacgaatataatatctaagagaagagcattccacaagtatattgttctcaataaaaaaaatacagtttaaatgaatgtatgtcatgtcaaataaggaaaacgggcagattcttcacaccgcaccacaatgaattaggaaacttgtaatgggtcaaacacagcttcagctatggttctaaactcatttacaccattacaaacactataatatttaagcataagaatatgcaataaacaacgccaatcacgaagaaaaacatatcagtctcgtaattaaaagggataggatagtagagtattagagtccagactaggtacttgccattaatttggctgtagaaaagagatcgacaatctttatatctttcatgccctgaaacatcccaaagttcaacaaaaaaatctctttcactatcgcctttgatgctgtttgaagagctaccagcatttccatacgtagtgtgctgaataaatggaacagtgaatgcattagcaaaaacatgaattccataagagctccacataatccttttaaatgaaaatgaaaatgaaattagtcattctcacctttacatcaacattacacccaactgtttgaggagggcgagcaattgaagaacctttgacaatcaaatgtacaagagaagttttcccaacacctacagcagattatgaatcatagttatggccaatcaaggtatgcactcaaccggtaagtcatgtcccttgccacattcaaagatcagaatcaactattaagcaattataattctacagccattatctatctccttcagtctaccatcttaagcaaactaaatgccatacacaagaccaattgaaaacttagtcaataacagcctcatacacatctcctcacattctcattgttcaaaaacgtgtaagaaaatgcaacttcaaattcccaaaaaccttcaagcaatcgatcaaagcaagcaacaatcattccactaacttgaaactatacctattcatatccaagattctaggaatatcataaaatcaagacattaacaaccatagtcaaaaacatctatgcagcaccaaaactataataaccaattcacatttgcatggagagggaaaagcaacatagtatgctccagcgattgccacatacctgaatcaccaacgacaagtactcgaacttgcccacatggcggaccaccgtttagctctttgttatccctctctcgttccttccagaacatgttgtcctccaaaacccttcaaacccaaaatcttcaccacaacccagaaagtaaaaacaacacaacgtactcttattcaactcacaaatcaagtgccatcaaacacactcaagctccacgagaaacgacaatatctcaaactgggcggtaccttcactgtcagcctaaaatccatgtcttgtcgaaatcaagccaagatccgagcttattaacgagaacccatttccagacatctcccaaagaacatcccgaagataccagaccctcttgtaaagtgatcaataagggaaactatgaaaaaacccagttgcagattcagatccaagatgacaagttaaactgggtcttgttcaaaatctcaaaacggaaactaaagaattgggttaggctgaaaagtggcggttgagtatgaatgaatgaatgaatagtaatactaaacaagatctgaaataggggattttaatttataattggttgatcagattaactcagtgatttccttttgatctttactgtaaaaagcaacaaagatggagaagagaggattgggaaatatgagtaatttttaggttggacaccggtcggtttgtttgtgccacattttaatcaacccaagagcagcttacataaatttgagttcaaattgtccaaaaataaattctgaacccgtccaatttggtttggtccgtttatgtgaacccgcccaaatccatatttggtttggtacatcaattttgtcactacccaagtcactatcttttgtaaaaatataggtgtcgcttggtaacacttttgttttttaatttttttaa

SEQ ID NO: 295652 - DNA, 2220 bp, Cannabis indica
tgctcactgcccagttaagaaggcttcatccgagcgaatatatgtggcgctctgttcggcatatctcttgcgagtagatacataaagttgattccacgtgtcaccatcgtatgatgccatgtcggagtgcaaaaattgggataacacctacaaagtacacattgctcaaacatctactcttaagtagatggccttgtgagtggacctcgctcaaaggtttggagaaaacaactggtattcaagttggatgaccattcttaaagtgaaggatgttcagaaatcatcgctcttgagaaatgtccttggacgaactacaccgttcaattgttttatgtgttaagtagctaaagatcagttagatcatgtaatagcttttataattcaataaatgtgcgttactacggtaacaacacatccagaccaataaacgaataaagatattagttatcattccaattgtgtctatgatatagcaagttatgaaattaccattaaaaatgcatacaaagggtttgccttaacccagtagctggacaaacaaaattgaacttgtgtaatacaagttaccaagagtcataagtctgcttggtcatttggggggcaactacacccgtacaaagcataggtaagtaacaagctcaaaaaacaaaacatttacatgtgcaattatttaaacttaagagaaaatattcattttagaagataacaaagcatgataactatgggattaaaagctgcccgatcatccagttgtcttaaaacaaaattaaatattatccaagtttataagctgcttggtgggccatattatatcaaaaagggcccatgcgtcgaactaaaaaaaacaaaaaaggaaaaacttcaaacagttatagtccttggctctttatatgagtccatatgtgtcatcagcggctggttctcattgctttggttggtcagagcatcagtgttggctacctcggattcttctttatctttttaggcctcacaaaaactaagatgtgtctctttgttttcattgaggtaatcaaagtttgcttttggatttgccttccaaaatttataaaagacatccagggtggctgtctccaagctttccacctccttctagagtagcttctgctcggtaccaaactttgtccgctgagagtcgagagtctcctccaaaaccttcttctccccggtcaaattgaaaataaaggtctgaaggccttccctctcatccttcaaagaattgacatccttggccagagcctcattgtccgcttcaagctgagcggtggatgacatatcactgatctccttcctcaagtcctcaacaagcttgttatcagccaaaagttgcttattaaccttgcttagttgaaaacttttctgctcagcctccatcttagtttcctccacctccttttaaagttggtggtggtcgttgtagctttcaaggtggtagacttggctcgaggatacatacattccatctttaggttgagctacacaatgaagcaaaatcaaagcctgcccgaataaaagcatgttaaagaaaaccaaagaaagttacttactcgagtggattcctttagaaaactgcccatgagaagctcctcagacatgtcctctccttcggccagctggtcattcacctcgagaagaactcgatcctgatagagttagagcatctccttcccgttcttagtttctgggttcatcacggtaggagacgataaaggtttgggtagcccaggcccatcagtacttcctcccttttaacctttggaagggatagctatcgattgagatttagagttcttcttggccagtgggattacatctgatactgcctcctcgagaaccttaattggaaggacagccgagctcttctcaacagtcaatggaggagtcttggtgcttgggataatgctcttgggcgacatatcatccaccttggagcgcttcactagagacttctgaccggaggcatcacctaacctctattgggttttgtgccctaaataaaacccatttcaatataatcagatttactagttaataaagatcagaaatcattttatgttgcatggttcacatgatttatttcatgattatatttaatgtataaattctattaggtccagaacatatgtatttgttcatgattatagtattgtcagcataatggaatataatcatgattatatgttcaaaagtttaattccctga

SEQ ID NO: 295653 - DNA, 5320 bp, Cannabis indica
ggctatgaagcgatgttgcccgtggatttgctgccagcgtctcccaggaggataacctattaccaagaggtaaacacaccttgctagcataatccctggataaagtagaagaaagaagataaagttacagtcctactagtaaaaggttgcaaggaacttcaaaaaactaagtcaaggaaagtaaattcttcagagaagacctagtgctccgaagagtgttcctaaacaccaaagatcccatagtaagagtgttcaaacctaattgggaaggcccctaccaagttacagatataacaagggagcctacaagtttggcaggtacaacaagaacatggagttggttctcctactaagatattggaatggggagcacctccaaaactactaccagtgatcaacttgtatggatgctactcttcagtactagttctattaactcattaataagagttatttagaaagaactaagtacccatcgttcttcagctatggcctctacctggcatgtcgagcaggggtagccacttgacttcaagaagcagacttttcattctgtaagcttgtagaattgattaatgtaagttgcacagaaaaaacacattttaaagaccaattgatgaataaaaacttatttaaaaaaatattgggtctaaaccacttgctaacaacataacttagtgaagttattctctttccaattccacatgagtacagctggtagccctctaagaaaatttccaggcaaggtctatgaaacttggtgaattgcaagcgacgaagagactgtaagtctgtatgctcacttaggggcacccgcaccatgcaaagcatcgatctagcacaaagaacttgcatagagaaatttaaagtttagtataaacaaaaattaaaagctaagtcagtgttggcatactttgcttaatataaaaaaaaagtaaatctgcatacttacatgttcaagaataagaagatagtcaggataaagacctcctggttggtcatatgttcatactaaaagactttaaggctaaacaaaagtagtgttcaaaaacataatgcctatagggcaaaagcaagaacatgaaagcctaaagaccaaaaataagtaatgttcaaaagtaaagggtcactggccatacacgaacatgaaactgaagctaatatgatataaaatcataaatgtaaggtactaataaaatgtgtctactcatgtgcaggtgaatggggagtcaaatgtgagctacatatttggatccccaaagagctagtcgaccatagcctctgtaggttggccggccatgtgatcagcaacctagccagccacctcctccacagactggctagccctaacctcgtcaagatggcccgatgatgactcctcaggctggacaataatctgaacaacctagtctatccgcatcttgctcttgtagagctccctcccttgagcaagtgttctttcacgaaacaaagatcccatgtaggagaggtgaaccttggggctatgcagatatatctcgtatatgacctcgcaggataaggcaacatactcgtccttggtggcttactggccagcaaaagcaagttgaaatgcttggtccttattcccaagctccatatccaacctagaggcctcagcagcaaggttggtcacattttagttcttgataccaagcaagcactccagaccattgatcagatcctgactcttttacaaaagtgcctgtgtctgggtttgtgcatccctctccgcctgaagcttggtcttcttggccttaagcttctctcagtgagcactagaagagcccttggctctaccatgggtaagaatgaacttcaatgtgtcctgaaatcaaaagaaaaactgagttagtgctagaagaagacctagccagctatcccttgagtggtcccttctagctggccagcttctcataaatgtaaccctggccggctagcctcccaatggttcatacctagccatccagcccttatcactgcaacaatttgagaaaaatcaaatatgcaacatgtcgaagtcaagtcttaaaggtcgctggacgtcaggcactccaatatctcatcctctacctcttggagctcttcatcaatgatgggcaaggtcctgccaatgttactacgagcagccttagcaattctctatcaagtggctgagcaggccccacaaccagaattttgggtccccttgcccaaagatctaggtggaggtggagtccccctcgatggaggatctgtgatcttcagtggaccagccagagtaggctttaaagaagggggagatagtgatgaatctatggcatcactagactaccttgaccatgggacaacctgaagaagctccaccggaaggctctctaccaagattcctcaatctcaaagccatatctgcaaaaagaaagtaacaaagttataatacaagttacgaatatgaaatgcaagaaaaatcaaaaagttagtactgtcaactaccatcatcctcgaaggaggaatcatctgaactgctatcattaacaacagccttgcccttacctctaaaagtagtcaggggacagaacccttgcctctaagcctaattggaaaattagtgttaccaacaatgcctctgcgagctaagcattggcggagggccttctcacttttctccatggtcctcacaagcctagacaaagggaagtcctcatccatattaggtgtatgcccacctcctgggcaagtctcctccgctactaaaacattatatgggctaccagacgggccctcaactccctgaacaacagactttggagggtataaaccatacttccaaaagttggcctcgtaagctaacctcaatatattcctcctctttacagggagggataagatataattatccctatccctcattcggagagtggggatggagcctgagtaggtcggcaccctctagaatcgatggtggacctgtgggatatgccaggcaatgaaataagtcctggagtatcctcccacatttgacaaagtcatgctgttggtgttgctcaaccactaatagccgacttggctaaggtagaagtatctggtccagttctacctcgaaacatattttagctcaaaaaagtacccaatcttgtagggggaaggctgaggccaacccaactctacttacagaatgaacatcattgaaaggtactttatacttttcgaggtgatctgagttggacacaccatgtagtatttggaaatatctctaaaggaaggatgcaggggcagcactggccatccatttgaaggcgagatgtggttgctggtttgtcaaaggcatgtcacactagacatctcccaccagccctcttgccttgatcttgtcaagtttctgggtggagatagagagatatgcactgattctggtggtctccaagataaagaacttggggcactgtagcctccttcagaatatggtccaccccgacctcacaaagatgaccaaggatgtttaaaggctacctggcctcatcatatgaaccaaggggctgttagggaatgcagcacaagtcttgtactacctcttcctaacaggcacgacctcttcaatattggatgcactgtctgaattctcctcatctcaatcagcctcgggctactcggccacatgtgtcttagcttggctggcccctggcttaccatcatactgaggatgtgtagtctcctcataaatgcctactctcactctacttgagagcataatagtatgatggtcatagggtggtgccctatgacatgtctgcttggtcctatccataatggaccctgagtgcctaacaacaataactgcggtctctgcgacaagaaaatctttcagtgaagaaatttccctaccaataggcaaagtatcgggcacacagtcctaacaaatgtaagtctaagaactgggaagaaattgcctccacccgaggctcaactctgagatgaaccgctataaatctcactgcgtattcactttaaatgacggtgatgctagaccttgggttccagagaaccaccactaacctcaagatcactcaaggatttgctagagggatcaattggacactggtccttaaagagaaaactaagtaaatctttatcaatataggtgtcacctccccaatagtcactcgggatcatctgcacacaaaaaaaaagggaagtgagcaacctgacaaagcggctagatttagacatgactttggttaaccatacccaagggtacttgctagataatttcatcatacaagactgggtatcagcgaagtagagtttcaagtgttatagcttggacaaatgttgagtcgtaagttgagaattagactataatagactcaccatgtggcatataaagtttttaagggaacaacatatgagacaaaggttgtacatgttcataaggccatgatgggattcttgtcgaggtcaaaagtttcgttgcaattcttgactcctcaagtcacaaagaacacattcaagttttgaaaaaacacactttgatgcagaacaaaccctggctggccttcggggtcttgtttaagacttgatcagccctagggttttctcatgagggtttgccagttctagggtttcaccctaggatgttggccgattcatgcctaaaattgatgaccctggccggttcgtgcatgggtcatggtaccctggcaagccctattaattctttgggaccctggctagccctattatttcattgggaccctagccagccaatggccttgatcctaagcgggtggccaatattctatctatgtctttcaaatatgggtgtaatggcaacactgcccctgctagatatggtgtaacgccctgacccttagggacgccacgtgtgtgcttttacaaacttatttcttcatgatctattagtttaggaaaagtgtgtataattaaaacccttaaaagtttcaaattagaataaaaacttccaaaagtactactataatgtggggatcccctgtttataattttttttataataaattacaaaaccacttatacacaagtaatgttatattttcaaacatagaaaaaggggtcgatcctgcttcttgaaagccaagacaccacgactgatgtgtacattgctgggagaacatagctttaactttcttacctgcaccacgaagcacccgtgagtcacaatgactcagcaagaaaagatattaaatcaaaagcattgtaaacgtagacattcacatctcaatataacatatacatatatatatatatttgtgactcacgcataaccatcatgcatatctatatagtt

SEQ ID NO: 295654 - DNA, 3458 bp, Cannabis indica
aaaaaaaaaaaaaacctaatcatgacctgtggtttagaaaaactactccttatcttaacatttcaccaatatttatatattatcgttattgaaaagaaaatcaagtttgataggatataaacgtcatttaatagttatttttgctatttaaataaaaaaaatttatttataccctaaaatttgttaaagatagctattttaatagtttttattttatataaaatttatatttttaattgcactaagtttttttcaattttttcattcaatttatattcttacaaaataaacctatcaaataaaaataaattagattttaaatattatgagcaaaaattaaaaaaataataatatgaattttttttagaaaaaaaattgtatacatgagtttaaaaaaattatgaaaataaaattaaaataaattttcaaattaacataaaataatatggaatttttttaaaaaatatattaagagtaagtttttaaaaattatttaaatttttatttttgtaataataaaattatatttattattttataaagtccaaatagaattctctttattaaaatatagaaaattaaagagaatgactgaatatatatgatcttgaagtccggcttgtgaaggatttcaaaaaaagaaaaagtcggcttgtgaaggctatatatatttaggttattttatatgcaaattcattgtattttcattgctttttttttcgatggaaaatttatatttaggtaattttatatgtaaattcatttgtattttcatggtttatttttttttatgaagtttgtattttcattgctaaaactgagaaatattttttttcttgtcttttccttttttaaaatattcctctaattttggattggccagttaattcaccttatcttgttgaaattcttagaatggtaaataaatttaaaaaatttataacaaattatagaaatgagttttgtctctctctttttcgtttttggaaaataggttttctcttgcttatatgtttaaataatcttattttgaaaacggctatggtcatagtttctatttgttgagacattatccgaaataggaactcaagttgatgatccacaataaacaaaccgccacgtcatcaactccacactaaaatttttacaccttatcttatccaaaaaaaacccagaatttcagagagcttgttacctaaaggggtctcaagctgatgtgataaccacatcaccaacaacttccatcaagaacgtcctagagttagccacgtgtcaaaagccccgtcaccgttgtttttgtttcttacctccacgacctgaaggggtgtcacgtgttgcacgtgcgaatgccttgactagtcaaacacccgaccgataatgtgatcgtatggctaggaacccagctaatgaaactaaactatattataaaacttgttaatttatgaaaagtgggggccaatttaattgtttagaggaacaattggggggaggcgggtgcaccaagacggcaggtaggcccgcacccaagtggaacgcatagtgcttggtgtaagtgagggttttggggaatgttagagagagagattatggtatggtgtggtgtggtttgtgtgggagacagagacactaatgcaaatctttgaccgttgtaacgtttttttttttaaaaaaaaaaatagagatatttttcttttataatttaacatctcgagagaaatggtgtgaataatgcttaggcattgaataagtgtaaatcaatttaatattgaaaggaaaagatgtgatcaatgtattatatatttgtatataattaaatttttgtgtgtgaaatcctcaaatccctcgtcttccccattgtgtcccattatttatgaattttattctttgttttttttttgattaacttattattacttgtgatgatgtattggttgttgttacgtacataatacatctaattaataatagattgatttgtatttagtgaatttgtcatgtaatgtgaaatggatttttaatatatctcatattaaatattgagaatggttaatgttcattataattgttggtgttgttaaatataagatctaatatatttaaaactttaactcatattggacactattaatattatagtatcaaataataatactcttaaataataaataactaattgtctacaaataattataaaatttctagtgttacgaaagggtactctttatagagattcaaacattgtaagatttaaataaactttttgttatatgaaagatcgccttgatgatgtggcacaaaataatatgacccatgttagtttacaaaaggattgagtgggagataagtgtcgaaaagactatctggaagatcgctggccagaaaacctaggaagtaaggtaacccaacgtcatgtgtaagttggacggactgtgccagccatcacttcgagaaactaggaggacatatcctgaatggatgtccaaccaacaacctcgcggaggaaatgtacatattcatcctaactacctaatccctaccagagctgtcttaaacatttttaaggcgatgttcttatcttaaaatttgggcccctaacaaaaaaaaaagtgcaattaaaaactaataattttttcaaatattacggtgctactattatatattttacaaaattaagcacaaaaaattcaaactattttattaaaattattatttatcccaaaaataacaataaaagtggaattaagaatagaaacaacctttaaaaatggaacttaatatcgttcctttaaaagtgggaaggaacagcgttacatttcatttattagaaaaaacttaaaaaggtaggtaaatagattgggccctttagtttattgggtcctgggcaatagaccaggttgcacaaccacatagtcggctctgatccctacagaataggtcaatctgggtgcctaaaagtgtgggattgcgataatcaagaaaattgaggatatcctgtgattgactcaataaaatccgtacttgtttaatctgtaattaaatatagatattctacctcttcctcactataaataatggattatattacctattcagggactggattctgcattctcaagagagttattacgatatcaaaatacttgtaacctttacagtacagataacaagaaactcacttcactagggtcatgtgatcttattatttctcagataaatacaagaaaaaggggagtaggctattatcgaattcgttttgttgactctgtgtcattgactagaaatgaggtcaatattttagtaatttcattgagagcaaaatccttcattgctctttgcacacgatctatgttttaattatcttcgattcatcttcgttgtaagaataatggttcaaacaaggagggtcgaattgttgggattttatgccctaaataaaacccatttcaatgtaatctgat

SEQ ID NO: 295655 - DNA, 2622 bp, Cannabis indica
ccacttcctggcccaacagcgaggagtcggctatccaacgacccggaatgaaggccacttgataaggagagattagcctatccataatacctttgattctttgagagaggatgtgagaaataatcttgtaaacaaagttacacagactaataggacggaatagatcaaccctttccgcattcggaaccttaggaattaggcaaatatagttgaaattgagatccacatccaaggaacctgagcggaaaaactcctgcacacaatccgtcactttctttcccacggtatcccaataattcctgaaaaacgttcccgacatgccatccggtcccggagctttgagaggatgcatttggaaaacttgattcttgatctcatctactgtgggaataacatacaaagagaagttctcctcattcgtaaccgaaggggaaattaaactgtccagccccacggggatgcaaggggcagaagattgaaacaagtcggagaaaaatttgttgaggatacggcctttgtcactctcactgtctcttctcttgttatcaccatcatacaaggcccagatgtgatttcttttccttcgcaccatggtagaagcatggaaaaacttgctgtttcgatccccgtgcatcagccacaactctcgagatctttgtttccaaaccagttcctttctcttccattcctcaacaatctgactcttaatctgcttttcttcctcactataaggttccatcatatccaaggattgaatccttgaaagcttctcctcaagcatcttaaggttggcgtcattatccccgaaagacttcttcttccacacttggagggcattcttagtgatcttcaactggtgcgctaaactgatatgtcctcgcctaagttctccccccagccatgaatccttgataacctcaagacaagattgctcccttaaccaagcttcataaaaccgaaatacccgagaaccctttccttttctcatatccgtatcaaggatgattggcctgtgatcagaggccacgataggcaagttttgaacaccaccattaggacaaacagaaagccattcagcatccacaatggcatggtcaatccgttcccgaatcaatttccactagatctcttattttgccaagtatatttacaacctttgaaccccaagtcaatccctcctatgtggtcgaggaaggattgcagaatttctccatccgtatcagagaaggctctcccaccaatcttatcctccctgttaagaagcacatttaagtcccccataaccgcccaaggctcatcccaattcttcatataattagtgaactcctcccaaaaccattctttttggttctcgtaaggaggaccatacactgctatgaaagaccaaaatctctgacactgaggttcccaaacgcgacactcaaaggcagacttatgaatttttaagacactcaacgaaatatcactcttccagagaagacaaaacccccccagcagtgccatccgaggggatatactctcccatatcaaagcccgaattccttctaaccacttccatttgatccctaccaattttagtttccataagaaaaatacaatcaacacggtacttacttgtccaagccttgatggcttaagccgcctcggcccgtgctagacctcggcaattccaagataggaaaatcattgtggaatggggggcttggtaagggccgcctcctcgcccatctgaaaatccttctgcacctcaatctcaacaaccacttctccaccgttccattcaacattatcgctgcctcgttcccctcgagcattttcaacaggtcttcggatatattcctcctgaggtgattttctaggtcttcctctcttctttgcagatgaagagctattcttctttttctttttccctgaataatcttcatcatctcctttgccgataacgaaagacggagatccaagatggaccaccgattctcccccattcacactactcaataatcctagatatgggttggcccaaatcatcaacaggaacaaaatgaacaggtgcttttcttttttttatggctcggcccagacatggcttgggctttcaactcctttccatcatacaaaaactcacctttctccttgttccctaaacggtccacttcaccctccaaaacttgggccacattcttttcaaggcccaacccaatgttccataccacaggcacgggctcagggtattgatggggagtcctggatttacataccgactcgtgaggcttatccagcatttgggctgcagagggcccaacattaggcataagggatagaataacctcatcatccctaggattcttctccaacgtggccatagggtggtccccagagttcacacaagggagtggctgtgtcaccactttttgctgtaattcccctgccaattcctttcttcttgtactaaccgtacagctctgctgaatggccgttccacctcctgtctttccactccaggccccacagtcccttcactcctatcgggagtccttcgttcattaccgtcgccgccatcctgagtattcagcgtcagtattggccttgcagttaaaataggtttatattatgtgttttttt

SEQ ID NO: 295656 - DNA, 4659 bp, Cannabis indica
gggacaagatctgattcggtgtcagaaggtatgcaaccgtcgtatttaccttcagatgagatacacccgagtagcttccaggaacatttggctaaggcttttcgagaccagactaatctgctaccatctcggagcacttatgacttctgatccttctctataacagttttattaataagaatcctggagtccttttggtatataacagctttggtatataacaccttccgtgacgccgagtggcggagggtatacactaaccaagtaaccatacataatttgatgtggcgctcttccgtgattgccacgtacacttcatctgagaatacggataacaattctaaattttgaaaaatattttaaataactattttcttattatatataaacaaaaaaattaatagattaatatatatatagtgcaatagagaaaaagaaaagttaattaaaaaaattttttcctcaaattttgaaatgtatcaaatcatgtcctctgaacttttaaggtcgttaaaaatgcctattaaactattgaaattgttgaatttaatgacttttatctaattttagtaaaaaaattctaacatggatgaaagttcagggggcatgatttagtacatgtcaaagtttaaggggcatgatttggtagatattaaaatctagggagcatggtttagtacataaacaatcactgaaatagtaaaattgaatgaaattagacaaaagttcttaaaatctaataattttaatagttcaagagaaatttttaacgacaaaaaaagttcgattttgtagatgttaaagttgagaagcaaaaatcctaattaaaaaaaaaaaaagtcctcctaagatagtagctaggagacttggagagttcgaactacaaaaaaacgttttgctactacaactgattattgaatgccatactctgctcctgagttccattctatccgtaaagtgtttcacaccctaaaatactcatcttcgcttttgggcagctagctagctagctgcaacaataccaaactccaattccaacccccaacctcaacctatgttggattcatttcgaaactcttccaagcttcccaagaaggtatctaaattctcttattttttttttctcgggtttcctttatacttatacatagatatgcatatctatctattgtacatgtatcgcttttcatagaattgggcaaacgaatgcttcgtttccaaaattgtttaaaccttccgtttggttgccgaggaaattagagctactggaaagaaagtgaatttgcgggctcttctttttttgtcgttattattttttcaagtaatccaattcaactttgttaaaaagaaaaaacaagtaatccatccaattcaaatatattgcttaagcttcacagttgtgccatatgagccaaatgatttcttacttaaatatttgcgtctttatatcaaaacaaaattatgacaaattcactcttaccattcaaaacagcaacaaaatcaagaaaaagaatggttagggtcgagtttcaaggcagagaacttcattccaggtcttgttattggtttcatatgcggtttgctttttgatttatcaaaggccggtggaaaccagacaaatacaacgagaaaatggtcgtcaagcaagctccaaacccaagatttggtcttaaatagtggtgatcaagaacttaaaatggtcggcccctgaattgcttctgttcttattctatttggtgtgttatattatattattatggtaccctgacccttatattttgtttccggcttaaaatggtagacttgtgtagagtttcatgtgttcttatttaaggatatcataccatattacccaatttctctcaaaagtttaaggtgttagaaagtatctttataacatagtaacaaggatgcatgtgaattcaaagaatacttgacttaatttgcggcaacatgctatctttagagctaaaaggaaacataatgttgttttatcatgtaaaaaagaaccaggggatgtctcaagcttccagggtaactttctgttgaactctataaattctggggaacatagtttgttagccagtagctatttaagtttctttgtcctcctttttaaaattttatttggtctatttattaaatggaattctctgtttatgctctgagtgttaacgccttggttgctcatggtaggttctgatagttagacaagatctgaagatgaaatcaggaaagattgcatctcaatgtgctcgtaagatatttattagtttctgctttgtgacatatctttccgtttgtactgtttcagcacctgcccttttgctttcgttgaatttgtattcatcatttactttgctgatctgtgatcatttgcctaattatttatttcacaaaaatgcagatgctgccactggcatgtatgcagaacttatgcaaaggtgattgttactatgttcttgttatattaccttgccttgcctctataccccaactcaccttttctctttctgtcttaattctcaagcgccttttttttttcccttctttcaacatttttggaaggagaaacagatatgtaattacctgtctgctaatagttgattagtcaggtttttcttctacattgtttctacttttaacctaaggttgatctgaaaccttacgactctagttttctttctctgttcttaaaacttcgacaacactcatctagtgagtgttctgaacttaaggcttaaaatgatacacataattgcatctacagaacatttattattgaatctttctacttcgtataaatgatatttcatgattgttcctttttgtgcatattgcagccgccgatcccttttgaaacaatgggagcaatgtgggcagccaaaaatagttctcacctgcaagaaccaacaagaaatgttagttctcccttgaaatgtattaactccttttccgctagttatgtgagctaatttttctttttttcaggaataaactgaaggaagaagctgacagcattggccttcctacttttgttgttgctgatgctgggcgaacacaggtatatatatttgttactgattcaaataggatagctcagatattcaaaggtcatctaaggaattgaagtgcaaataggccgtggtagtattagtatttcttataataaaaaaacatttctttttcgaaataaaaaaggtctggttttgtcatttttaatagagaaaagaaaactatcttgaggtgaaaatggtttgtcaaataaatctgaatggtataatgtccacttggagacatactcctgctgctttattatccttcttctggatttggggttgggatggaatctgatttcctctcccattagttgaggtttattatagaactttttactggccttgttatgctaaactttacactttttatcatctttaggttcaaagtaatgcatatttagtttgtacatatagttcattgcctgtgccatatgagaacattttgagctcttttaggacaagaaatggactctatgatttaggtgtttttttaatgctcgagatggctgtatatattacatgatatggtacattttgggttcgaattaggtgtattcattcttacctgaacaagatactaccattcttctgataaaaaaaagatgttaccttagtcggtctaaaattttggccaatttcttgtcattaaatttcttactttttacccaggtttcatcaggttcaagaactgttctggccattggacccggtatgtacttttctgctttcttctctcttaacacagaaatattggatgcttttataccaagtttgctatgcttcattaatcccttgccccttgtattagtgaatataatggaacctaaaaatatctctgcctatgttgtgtataaacacatctctgttactgagcaggaccgaaagtcattatagattcggtgtcgggaaaacaaaatctactttgaacttataaggaggaggtctagtttaactggcttacaacaatttaagttcaagtatggttctatcacaatgagaacaatttcttatctcttaagggatttgcagccaaaactgcaagatgtctacaaatcaggtttcgttttaatttgtttttatttttaacagtcactatattccttgagtagaaagctcccatgttagcttggctggagtaagagaagatatgtgtaggttgagattttcattgtattaaattattgtatgcagtgtagatgtttcttaatgatgaaaaagaactcaattgtatcttaaactgaaactattaactagaggttggattgtgacaatggaattccataatttttatttcaatgatgaatttaaaccattttaaagagtacaaaaacacaatgacctgatcatctacaagcacattcaattgccaaagactcaatatagaaataacacgtcttttgctgtttttagctcatagcttgtaacgcccgtattttatatttactaaactcaaaagataactttaatattttatagcttaataaccataagggttgggatcccgagtatcaaaatacaatttaaaagtattttgctaatatgtacatataatatttttttaaaaaaaactcgctagtatgcaacttcaaaatacagactc

SEQ ID NO: 295657 - DNA, 2886 bp, Cannabis indica
ataagagagagagagagagagtgagagaatcaaatgttattatcagctaaaatagggtagatttttgctttttgtccagggttttgtctttatgatcgtttgttctcttattttctaattataaagacacattaaccgatggaaatctaatattgcattcaccttccattgagtaaaattttggtgatcatcagactaacatatatttcgaagctgtagctagctaggtactcactgattattctctgttaccttaccattatttctcagtcaaagaaaaaaaagtcatcatgttatcttttatttatttatttatttttactttaattttttttttttttttttgcgtttacatattgccaagacataaatagttgcacaaaagaaaaattattatatatttaactgtcatgtaaatttatttgtttgtgttacttaatcaggtatataatagattagacacccactctacaattgatcagaagactcaaaaatatattcttttgcaaaacaaaagattaatttatacaaatcatttggtatacaatatgattaatgataatttttttacgacaatattgttaatgatatgaacaaagataagaactagaaactgtaaatgacaatgttgttatgcaatttaaccgttaaaacagaattagtccacgagtttttaaaagctcttcaattccattacagttaatttgcaatttgacagtattttggcacgcccaagttggcttggttcttacaataaatcactaggcctatttattgatgacctgagcagaagtgcaatctggaaacttgtgaccgtaaatggattcaagtaccattctgatcacctctttcatgatcttttctataggtagagctatatgatgagcggattagaccgactctcttcctgttgctcaaccagcttagtctaacttgattttgattgtttgctgatcactagtcaatgaaattactttctttcaaacattagatttttcaaccatttttgcaaattggatttcttgtaatgagtcatgacatgcatgggagtttaagacttgtcaaatggatttgaagtacattagaaagtctgattaactagctaacatggtcttttacaaggagaggaaatgtgtaaccgtaaatggagataatgatgagttggatatcgttcttgcttgtcacacaaataaccaacttttttttttcgaggaaattacttctcgagaagaacttctcgagaggttttagatatactagtcgtgacgagtatatctaaaatatttgttcataatcacatgtgccaaaatcatatgcaacactaggcgtaaaaaggtgatcaacaacacaagtgcttagtgcatgtctttaataattattaaaaaaacatttgatattgatgtacctcaatttatggtcaaggtttcatgtcatcattcataggtgtctccatttatgttttacgtcaatttaaaaggaaaaaaaaagatcttttatttaagattgtcataaaaaggaaaagaagaaaaagaaaaagatgctcttgtctaatgtatggtgttattataagaacgaggaataaacataatgatggaatcgtatctctgttattataactcgggaacattcttacactacattaatttatttaaatgcatttaattcatatatatatatccataacatatcaatattaattacctataattactttattttaaggagaaaacgtagttgaattgggttgacacgtgtgaggttagtgatgtagaaatgggttgtcaagcacatgttaatgatttatagttttctgtctttgcttttatatattagagggaagaaaataaagagtgtgagaatctagggtacgtgaggtgggcagtgattatctgggaaacccaacacagatttgaatgtgaggattcagtaatagaggtagctttttcatcagctcagcttgttctgttgtttgtattcatatttctatattgatttgggtcccactaaactctttctctcttggcaaaagtgactttgacagctctctttctttctttctttctttctcttggccagaaaacccttctgtcgctctcagtctcacgtgcattgcatagttatatttcaacgcaatactacaatacatatatttaccatgttcttttttatgacaactacatatatattaccatgttatatatatcagtaaaaaaaaacttcatattcgaaaccttttcttcctgtgtttagtaagaattaaagaaattaagagaggtagaaagttcataagaaaagaaaataggaaggattaataaaaagaaaatatattttttaaaaaaattcttatatgaaaactattaagctaattaaaatatatctctcgaactaaaattgaaaattcttccaaatttgtttggtacatgtaaaagtttagtttatatgattttaaattttgtatactaattattagtctaggtaatttagtgattgtatacaatttttgtcccattttattttttctactttgggtggactccacctttatttgcatttatctatttttctcttctatcaaacgcatttattttattttattttttttcacaagttttattttcttccattttttaccacacaaccacaattttttttctatctgttaagtatttagtaaagtgcataataaatatacacattttagaaaatgtattgttactgggcatactcacataaaggcgagaggtcaattactcctaaaaaaattaaaaaaaaattatataaatgtattttgattagttacaacatatttacaattaaaaatgacaaatataaatataatatttgcttttgcatgatggttaagttatcttacacatattatagagg

SEQ ID NO: 295658 - DNA, 7739 bp, Cannabis indica
ccaggaatggaaagttttctacgatgtcgtgatttgccaagtctatgccgagtgagtgacacaactgacaaagctttccaaatgattcctcaagtggctaaccatagtcgtcgagcccgagcaattatactcaatacatttgaggatctcgaaggtccaattgtgaatcgcttgactgagttttgccctaatatttacacaattgggcctcttcatgcccacctaaatgacaagttgtccaatagtctttacgatgtagaccgaagctgtctcacttggctcaattctcaacctccaaaatcagttatctatgttagttttggtagcgtcgctataatgacaaaacccgaattaatcgagttttggtatggtttggtgaacagcaagcatcgcttcttatgggcgatgcggccggacatgttagtggggattgaggatggcgacaattcaatcttggcggagttaaaagaggcaacaagagagagagggttcatggtgggctatgctccacaagagcaagttctggcccacaccgctgtgggtgggtttctgacccacagcggttggaactcaactttggagagtatagtctcaggagtaccaatgatatgttggccttcttttgcggatcaacaaatcaatagtagatttgttagtcgagtatggaatcttggattggatatgaaggatgtttctgataggaaagttgtggaaaggatggtgaatgatttgatggtaaagaggagggaagagtttgttaaatcaacggctgagatggctagattagccaaaatgagtgtaaatgaaggtgggtcatcttattctaatttgaaaaggttgatagaggatataagagttgtgggagcaagtgaaaacactacatgatgaaatgtatttatgggcaattcctttggcaattatgtcataagtgatatgtatccttttaatttattcatgatttaggcatatgagtgataaaataacacacacacacacaaaaaaatgtaatattatggtaaaatatttgtgaaaataaatgtgttatgaaactatacaacgttttaaaacgaccacacctctgaggtactttaaatctctttctcattggtgaagcatgttggaattggttgaatagacttaaggttgaaacatgaagattagtagaaactaatcaatgggatatgtttaaactaatagttcaagttgaaaggtaaacacattaagagaatgtgtacataatgaaatttgttctcgggtccaaaaactttgttttgagtaaactaagttgcatgcccaagaattaagttttgggtctaatgaaaatttcaaaatgcaagttttataaaaactgcaaagcatgtcgcttagcactgggcgacatgtcacccggaacatttctggattcatgtaaatgtaacatgtcaaagttccaggagacatgttgcctaggtttgggtgacatgtagcatgacggaaaatcatattttgcatttttatatcctgatcatgtgacatgcatgccgcctagtgaggcaacatgtcgcccaatgagaaatttcaatgtttctttaaacacaagaaatgatctaaatgaaatacgggttgacacaaataaagcgtacagtacaaattcgagggcggtacaaaaataccgagcctataagccgtgtcggatctatcctttaaaaataatagcaagacatggtgcaactcatatttttatgtagcacagcacgacacaggtcgttttttgaaaagcccaaaaaaatatgtgtaaggccagtgtgtacgtacttacaaacttacaacactaatttataccactgctgctattgcaacagtgtatcacatctggctatgaagctctctggcatcaaaagattcatctcctcaccgcaatagtgaagattatatagtaataactatgaagtgagatatagagatagagatagaagatggatacatgggtttgtttatatgagtgttcaggctatatttggtgctagtagtttgtaaaaatacaaatacatagctgattaaaaaaatatattcataattttcaagaaaattcacaggttgtcctaattaattaaaagtatacgattaaataataataataactaaaagaattaatagaatactgaaatgaataaagggagaaaaagagatttttaaaatgtcagaagtgggatttgaacccacgccctcgtaagaggaccagaacttgagtctggcgccttagaccactcggccaccctgactcttgtgtcaattttcctacttctatttctcttagttaactgttagttaagatacaattgaaatatatattgtttatttatttgattattttaattgcttaatgagatgttcatgctcatataatgggatactacaagtgtacttaaagacttttatgaaactatagatcattttcttaattattaattaatttttagttttgtgattgtttgaaaatacataatttttatttattaatataaaattatacatgtggcgctatgtaataattgaataagtagtcgtgttatcattttatttgtcacgtgtgataaaatttgacaaaaaatcaagaaatagagattcacatgaccaaaaccaagaactctgagctttcagcgagcaacctgatcattttgagtaagaacatcaaagactaatgcatgttttgtggttgataagaggactttgcataattttttctctatattaaacaaaacaaaatttgtttgctacatttttttttctatataattatgataattttttgagtaggacatatgccattgatccatgatcattaacaacatgatttggctccgcccctgattacgaacctagctaatgataataaacacatatgcttagcttattttctcgtgatttttttatttttcaagtaacgtcgaaaccatcgctgcacatacttagctgcaaaaggttttaagccctcggacatggattcattggccgagcaccgaaaaaacttagaccaacaactagagagcacatgttccaagtcaattgccatcaaagtaaatgcttcgactttagtatgtgatttgagattagcagtcgaaataggaaagtcgttataagatgttgagctcaactgccattctacgagttcatttccatagaaatctcccttttgaagacgatttgtaggtgttgtactacttccgaaagtccatacaacaccttgtgtgatgaaaagcaccatatcaagaggctctccctttcgaacaatataacttttctccgaatatgtaactggctttaaatatttgcatattgtttcgtaaacatactcatccatgcttcgaaacaaaggaacctgttaatttattcaaaataataacatgttaaaacactacaaaaaatcttacatttaatcacaacaaaacttgtaactaaaagtaaaaaagctgtgactaattataaatcatcatttttatattctaactaaaatgtttgtagctaaaagtattagtcacaaaaatcataatttgttgtgactataaattaatgtatttttagtcacaatagttgttatgactaaaactaaattaaacttgtatctaaatattatatcttcgttacaagtaattttttattttgactaaattcacaagtaaaaattgtttaaaattaatcaatttatcatattatttattaatatttatatatatatatatatgtatatataatatagaagacaaataacttactttttttaagatagggaaacacatgtgtttcttaatagacattcctaaagtcaaaggaagaatatgcaaaagatgttcaatatcaacatcttttccttcttgcaatctcaattggacatatttcataacctttggctctatacccacaggaattccatttcttgatatccataactctgccttttgttcacttgtgttcttctcatgctttttcacatctaatattttggtaacccaagctgcaaatgactatacacataattcaacattattattattattattatcataaactataagtgtaataacactcatttagtgtaatatatatgtcttaattaattttacctcactcttgtgttgattgttgtcatgatcagcatgctcttcaagtaatgaaaagagatgttttacatcaaaatctttgccttctctaattgtttgagttagatatcttttgatgactttctttttatgtggtggaagatcatggtttgatagatatgaatctatttcaggttgtttgatgcttaattttctccttgcttcttctgattttgtagtttccaattgcatgtatgtctgcaatttaattacattaccatgaataacttagatgagaaataaacggaaatttttacacaaagtacttaaaattactcttatatattatgtatttgcagattttattttttataagttttttacttgtatctttttggagaaattttatctttttagtgacaagtaacctttcttccagtgactaaaagtaatatttaatcacaaattatatgtatgtatatatatattgtgatcgagagattgtcactaaagagtaattctgtttttagtagtgagaacaaaaaacacaaatttgttgtgagtgtgcatattacctgtaaattgccaatgaggtaacaaaaataaaagtaggccaaggatagaaatgagaactgcaaagaaattttctccaacattgctacttgtatcaaggttttgaccaaaagaactacaaaatagaagaaaaagaaataagagagattgcataagtttaagtattttttttttcaatttataaactataaatataagttgaaattacctcaaatttctcaaaccccaccaaaaactacgagagaattttcttagaaaatctgttttgcaaactatacgagactcaatcgcttgagaaaatattccgaaattgaagataactggatttggtggattaactgggcaatactgatccacaattgttagattcttgatgggatgatgatggctttgacaatcaaaaggacctggaatacattcttctattcctacacttttacatgctatgtgccaacaagctgtctctcgaaaaatcgaatgaaagtaccaaaatgccccaaacacctatacacacgcgtacattaattaaatattacaaaattatatggctgtgtacattatagttatactcgtttaaaaaaaatgaataatttttgcttgctataaatgttcgagcttgtttctaacactgtaaataattctaaatttttcgaaaaacatgtgaattgtcatgtaactagatcatgactatcatataagaacttcgagttataatttttctagatgctaaaaataaaaacataccacaataagaacatgtgatgttaatatatatacacttacgtggccgaaaataatgtagaggaagaagaagaaggtgcctctaacccatacacgacaggtgagtgaatcataagtccttcctaactctttcgctgataagtacacacgaagaagacgaggcacatattgaagaaaaagtagtagacttagaaactttcttgctgttaaagatcttgatccagtaatcttggagaagtacattaaaactaccacctatgtacacaaaaatactacattaatttttgttttatgtatgcaagcaacaaattaataggctccaagtatttgtaaattatttaatattatatattatttgttactctactaataatcaattaattttaagatgaaacctcaaattatatatcctacattctaaaaaccatattttccacattctaacattttatttttataataattaagaaaaaataatgaaaacataccacatgccatttagtcaatatagctcaaattttatatatatataaaaaaaaagtactatttttatacacaaacttgaaatataccatttctttaataaaagattgcattgaacctctcaaagttcagaattgacttgtgaataatgaaatagtaaatattattaaagcttggaatcttatacatatggttattagaaaagtaattaacacttaaaccaagactaataaataataataaatagcttatataaaaattattaattagtgtaattacctgagggaggggaagaatggataagacatcaattaagagataagaccaaggaaagcctgtgaaaatggatagaccaaattccttggacatggctagggcaatttgaagtctaaaaatgatgtgtaagacatatgagaaatcagttaaagatctcaaaacaagagatatggccataacattgtaatctttatcaagacacttgttctcatcattcacaattggaatgtaaagaaacaaaggatctatcataactccaattacacatgaagctaagaaaatcttattccattgctctctaggtgatgctgcccatggatttagtattttctctacttttattctatctttgttttttgatggtgagtagtaatcacttcctcttccatctttcatcatggggcttgaattgatttgctttgcataataatccctaaaaaatgtaaaaagttacattaatatcaaatataatttcggaaaattctacatatgtatcccatatgtgtttttaacgtctaaatagttgtaatttcaatttattgtacttatttaagatgtcctgcaaattttttaaaaattcaaaataaaatttaaacagtttgaactacacgtctaatatttttcaaaattatgaaaaaaaaaaatacatgagtgtaacatagaagaaacctgtaatttgtcagtaaatatatataaaaagaacggtataagagagaattattactaaccgcaaggaaactgtatccttattatccttatcttcgtagtagttattcataatcttaacgacttcaagtacaaggaggagtattagaaaatgctggtaagcatttgttttcaagttcaaatctctacagacttaaagtctttttcacagatgatcgaactcatgccatgagaaaaaatttaaccaaaagaagaaagaaagaaagaaagaaaagaaaggtttgaaagagaaactacataccaatatagcaatatggttccaaaatgaagtggacaaaaacataacaaggaacacaaggctcacaacaaagatatataacaatgcatataatatgattatagtacttatgctacttctttctcttacatatataatattcacatatatataatatatgtacatatttaattggatggtttgtgaagaacttggcaataattatttccaacgcggcaaatgtaattaatatttgactagttcaaagcaattaatgaaggaatcttattatttgatgcttaaattttttgtccatagagttgactgtcgagtatgatggacttttttaaccaattagataataataatagaataatattattaaagtttatatgtaattatttagaatatataagaagaagaagaaaaaaatgaatgattattataataattaactagttcatgatggtatatattataatttaatctagtcttttagccttaaaattcctaccaaaaagaattatttattgaagatttttttttatataaaatagaggattaaaaaagtgcgttattaacaagagctataggcaaagaatattacaactgtttaatttgttacaataattaattaataaaaaaaa

SEQ ID NO: 295659 - DNA, 5129 bp, Cannabis indica
gaactagtaacacataataatgagagtgatctttaggtggttggttccaataggagagaaggagaatcatctagtgtctggctgctcccatcaacatcacacacttgaatgaaaaatttgacaccagaactaccagagggaactgcatagtcaccaacataaaacgcttgaactcgcgccactccaaggaactcacttgctgattctgctttctttgcataaatattgtattttgggaatgtagaattattcccatctttcaatttccaaataatctttacactcacagtcatagaatcctcagaggatggagtccatttgatgtgttcaccctcgacaacccaagaagaagagggtggaaaatttgatttctgtgctgaacttttaactgttatgtggccaagcaagcatagtactcagctgaggctgactttgatctgaagtttatcgtcgtctaatttcacaatctgattgtcagacctgtagcaataagcagagatttctgttaatgtgtgtccactaagtgagatgctgctctcctgtatggtccattctgaagaagctccaagattttctagttgacatgttgtgaccactgtactaaatttgcctgagagatgatctacttttgctggtgcaagaagtacagactttttctctcctgccccagaagagaaattgagatttaggccaagcagagaatttgccttagattttacctgcattgataaaattggatcggtacagaaaaaaaaaatggaattcataaaatatattatcagattggataatgctatgcatttgtgcttgaaatgtaatatcaggtttataaacagtttattcaaatcgtgttgatatcaggacttgaacaacttatgcatagtgatttccttgaataatcaaagttcaaatcaacagatgagaagcttacagaataagtaaagtaaagaggtgagttccccaaaggaagctctcccaggaagagtcttgctgtgaaatcgccactgcctttaagacttcctttgaatgtaatattacttccacctctgtaagatccttccttcagactaattcacagtttttgtttagtatattaagcttgttacacaatcaaggaaatataaatcgtaaaagttcaggaattcagggctagctgcaatctttttccttactagagtgagtggactagcctttttaaaatggagtctatactgtggttacccatcacgataagaaattcataaaaaatagtttgtaaacaggtattcatgcacttttttagatttttcatgactggaataattggagtaacagaaagctaataactgaaaatccatgcatactattaataataccgacatactcttgatttttgacacttcccctttgaaaaatacagtaatgagcacaaaatctcaaaagaatcagcaaacttactcaacaagcacttttatgccatctgtggtagagctgtccttgtactcaagcagtggctgcaacaaatgcatgagttagaaagcaaactgaagcttattgaacaacaaaactctaacatcgtgcagagaaaaggaagcgcatataataagagtattgaccgtccagatttcaatttcactcaatgtgtggattcatttaattgcttaattttgtacctgtgttatattattacatcgtttactgagtaacaaacaaaatgaaaaaccataatgaactatttccaataggtaatcccatgattctaaatctaccaaaacaaccattgaaacccttgcctatttgagcacatcataaccttgacttgaaatgttgaaataaggtctagaaataattacatgacaaggtttagaaaatatcacagtagaagaaaaggctaaaaggttatattgtaacagacagacctgaaaaccttgacatgaaaggttgttccatgaagaatctagaacttgtagtccatcgacagagaaatggtgaccccggccctgaaaaataaatatcaagtttttttactggaatcagatttcttcttctgctgaccaggtgaacctattcatacaaattgatgtaagaactcaaaagacattttgtttaaagttggctgcaacctgatcgaaattagagtagaatggtaggactctaggataacgttgtgctattccccacgatttctccacaaggctccaccaactgcagaacacaaatgcatgacaatgaagtactcttatagaaaacattacaatgcttaagtatctgagcctagagcagaaggtacattattatgattaattatagagaacttgagaattaaaatcatgtattttcacagtaatggtatgcaaataaagtctacgtacaactacagcattaatttatgagcctgatttgaatacaaaaaagtgaaagggacacagcattaatagcaggaaaggatctggatgcaaacaaatttcagtttcgcagaattcttcttaaagaaattaaaaagaagcaagtaaaaggttcatacaatcagaaaaagagattcaaaaaacaaaactaagaaaatggaaacaattataaacaagaatttgggaaaagatgcaatgaggacattactgattttgagcagtctgaaagtctggtggttggttagtctcatagacccatccaggagcaaaaacagctgctgacacatcaccctttttcagcacatcaagtgcgaaacttgtctgttatgtttataagttgttagtttacgactatacataaaagagaaatagattgaaaaaaagtgtagagaaagcacttaacaaacagtaccacaacctcatatttatacaaagcatgcaagataggacattatttttattccatcgaaaaggttcatataattgcaactttaaaagttaatgctttaaatctgtcagaagttatggatgtgagacagacagcaacggggttcttttttgtaatacatgaaactttgcatatatgacaatgccagagaggagatgagactcatacattccaatgtccaccgccaaaagtgttccttccaaacacatctatgccgaagtagacatcgtactttctattcccggcaacagcagctgatctactaggatagtgttcctgcatagatcatcaatgaaagaacagacgttcaagcataatgaactggaaatattaactacaagttcaagaaaggtagaaaagaccttccaagaaaatgtaagcaagttagagagaaccatacccgccaccagtaattgagaaagattccatcacaaatatcaaagaaaggcttatttttttcagtcagttgattttgataaagaacagagccgtcaattgtgacactgtcatacctatatagccaatggtatattcggacaaattttagtagttactctaaacctttttataaatcaaagatacagaaagtagaagatgctttatcctcaaagaaagaaaagcacaaaagactaactggaaacaaaagaaacaagcgtgttgcttggcgcaaaagattcaaggaaaaacataaatttaacatgataaatcttattctcaccatatgactaaagagcctggaattttcgaatgcatagtctgggtcaaatggctgataaatgttttcaaattaggaatttggttcacgttcaatttaacttccatattgagctgcaaataacacattctaatgtcaaatacaaagaatgggaggacaatatattgaattgccaaaaccaaataccaaggaaatttttaagttgaaggtcttttttagtttttgttactacagaataacgaaagaagcaacaaaacagcagttaatggaggtgagaaaagcattttaagatgcacttccacatgtcaagttttagtgacaataatttttatctaccagccatccatcaaagcccaaagctacagcgagctctgtcaacctctcagcgtacatttgagatgactcttctgtttcaagcagcttgtcagcaatagctctccctgcatcccattcgacaatgaaagtcgccagtaccttgaattaaattgtaaaaacaaaaaaaaatgttacttagaaattcttctattaatgaattcataaatgagctcaatccaaaatgtgtagtaatccactaggatcaaatttatattgaaacttgaagctaagcaaatagggagaaccaaaaaaaaatcaattgataagaatcgtgtaaatgtgtattcaacaactcaaccatggtactttactcacagtattttcgtttcgttagtttcagttaaattagattactaagatcatgttctgaaaccatgaagggatttcgctttttggaaaaattaatcttcgttaactggtaccataaaagccattggcccactagtaacaacaagagtaatagtacttggttcaaaaaaagaaaagcaagagtactggcactgatttttttcttaatttaatcatttatgttctccaccaaccattcttgtaactttattagacaaagctagacgttagtactatgactatgactagcctgcaatatctagtaaaatataacatttgcactatctttctgtgaaatttaataaaaacaaaaaacagggtaaattcacagggccaaaccccattagtccaaattttattagcttgactgggtcaaccagtctttccctttaagaagtttaagtcaaccgtgaaaaccaaattttgggttaaacgtacgttcatcattgcacaattcttagttagatcacattctttctctcaccaattaaacatcttgaatttcacaaacaccagctacaatatcatcattcacatatatcccaagaagtccttcaaagcaaatttatcaaacatttcatctacaccgaataagctaaatcaatcatggattttaccaaataaataaacaaaaattgtctgataatattttatattttaccttaacgccatgctgatgagctgtattaacccatgaaacaggaggaagagcaacaagattatgagagaagtaaacaaaaacatcgatgagatgccaatgccatatagaataagcctcgccattagtccctccctgaacccatttatcgtctccatacccaccagccatatcatggcacacaagcagctgaggcctatc

SEQ ID NO: 295660 - DNA, 621 bp, Cannabis indica
atatatatatatttataggttttgaatgtagtatctcttttgttgtggttaatgtatagtgtttgccgaaataatctagataatattattattagcgttatgttatattttgtgtatattgttgttacttgaactatgcttcttactacttttgcaaaccaaatgtataaaaggtttgtgctgattggtctttcttttgctcgttaagcagccactataaaatatattgcttgcattggcctgctaacttctacaatagaagttactcagattgaacttctcccgttttagttcatgattactgggagttttaaaaaataggatggaataatgaacagaggaaaaaaaaaaccctcatcaactttaattaatacagtgttactagcaaataaattgcagtcaatttatacttcaggccagaagaagaataaactgctgcagacattgcaaaagtatcttatgttgggtgtgagatagctgctgggtgtcctgtctgtcgttgtcacaaatctatatgtttgtacgactccatacataatccttaaattcatgtttttttttttcatatctattctatataaagtgtgcctctataactgaattattggtttatgagaaatt

SEQ ID NO: 295661 - DNA, 1925 bp, Cannabis indica
attttatttaactcacttgttaatctggcaatacattcatccttacaattattagatgactgtaattgctccatgcctgatataagattctttagtttctcatctgcttgttcaatttcagaattcttactccttaaatttgtctccaaaatattgtactgattccacacaaatgtcttctctgccaatagtgcagatacctcagattgtttttccaaataaagtttatcatattcctgctttaaacttcttacttcactttccaacttttcatatcgatgttcttcactcttactatttcccaaagtctttgtatttctctctctgactccactctgtaaagaccagagagattatcagcgtgtaaccattaacagcaaaaatagtatataaagtatcacaaagaataaagaccaattacgaagacgtacctctggctcagagcacttcaatttaaacaccttaaaagcttccaactcagtttgtgtatactctgcagtgatagagcgctctaaggttataaagctaaaagcagaaactcaaataaagtattgcatggtctctgctaataataaaacattacaaactcatctagtataaagttggaacctcatgaaattaggtgaatgtgggctaacaaaagaaaagcaaattttatacgtgaaaaacaaaatttagccatgccaaagaggaagagtctcatagtgacagtagaatacataaaacgcacaaacagaccaaagaacttttgagtgttaggtgatgtgttattctattctattcagttccttagctcccagatgctttgctcacaaatgccaattctcttccttcttatcgagctttcttgaaatgtaaatcttagctactagctttattggagattaaacaaatttgggggaggaaataaacttcaaattcacccttattcccatccagaacaaatcacaccaaaaaaaaaaagtgaacaataacatactaaggcaagaaaactaagcacattacaagtattataaagaagaggtttttggtactgaagaaagaaagagcaaccaacctaatcttagtttgtgaatatgcgcatccctatgcttcaaacccataaccaattcagccttggccaattcaagcgagcctgtcatatcatgaactaacaaatcccgcctcgcctgcacacgaggtaacgagagaatatattttttcaaaaaaaaaaggcccgatttttatcctataaaagaaatcccaagaaccggaaaaccctaaacataaattacctgagaaatttggtcttccaagaggcgaatatcggagacccatcggtcttgttgcattatgatacgatcttcgaggattttgcgctctttggcgagccactcaagttgaatctgctgggtctgcaacatctccaccaaagcgttaaagatattttgccaattttgctgatcggagggagctttaggccttctagttctagccgtgcccattatgaaattacagtaaggtcaagaagaagaaggagaaggagaacaggaattctcggtgagcgatagtaaagaaagcaggaatggaaaaaaaggaccgttggagcgttgtagatgaaattcaaatttaacagtcgactttccgtgcgaagatttaacgtttcaactactagctcttttatatatgccccgtttcgctaagctctgtgaaattgctgtgtttggataagagaattattaaaaggggagtggtgtaaacttacattgtgtttggttgtatacggggtaacatataattaggtaaacaagggtataagtataaagtttcaagtttgtaaatcgtacgagggtataagtggcataaaagtgtaaacttatcaaaagaaaaaggggagttctatttacaccccacaaaatgataagtacaccttattattaaaaaaa

SEQ ID NO: 295662 - DNA, 2354 bp, Cannabis indica
aaaaaagtgctactcttacaaaaagccagttcatacatcaaatcaaatcttttcatttttccttgaaagaggaagaatgcaggaagaaaaaacaacatagtgttctgatatttttcattcacaatttaggaagaccactagtctgtgttgtcaagggaattggttaaagttcaaacccttaaaatgaatctagatgctttatcaacaaaacttaaggtagcacagaggaacttctaatcgaagctaaagatgccatgaacacaaatttagtgaaggtgcttgaaatagttgtgttggaggccaacaaaaagattggattgcaaccaagaaataagtaagataaaatagaaacgtaaaaaactcttaagaatttttaaatcctgattttacataaagcgattatcaaagataaaatctgcagataagaagtttaacagaagtgtaggaattataggattttaattgtatggataaatgatcaccataagaacatgtcctggaagtataataagatataaagctttcaaatgtcaagagaacacgaaagaaactctctcatgcatgaattataattttgttcgttttcttccaaactttagtgagcacgaaagagggaagaaatgggagaggcagataactaaaattgagcattatagggaagggtgcagttgcaaatctaagaggtaaagttactaaagtaccacaattacacttgctaatcacaaataccaacctgcatactgttacttttttgcattgtaggagtaggggccgcctgaaattaaagaagtttcttttgttaagaaagaaaaaaagataatacaatatattttcacaagagatggtttgcatgaagtctaattaatccaagtcaccttatctatgtcaacattctcagatgtgactttgaaacggcctttttgctgaacaacaggtgcctttgctttctcatcaagttcatcactgtctgcttcagcgtgatagattttaccaaattgaaaaaacatagattaattagaagatttataaaagtacaatttgtaatctttgtcggcattctaaaataatgaggaataaaaaagaatcagcacttgccaggtgatttcaatgctcttgaaggaacatcagaaaccacatcatctacaggatgcggaattgttgctgcattacaattaaaaataatctgtggctgaccttgcaacttatcatcactgaaaattcagaattgatccaagaaagttcttgtaaatcacagttcataatacagtaccacatagagacaacaatgtttttcatgatctttaaaaatttgatatacgaataggcacaaaatctaaaagagccctttgatatgttcatatgaagtactgaataagaatgttgatttattttcgattgtacaattttttttttttttctacatattaagagtcagtagccaaaacatttatgagtcataaatcctatagatggaaagaatggtcatccacgtatcaatgtcaaaatacaaatttgacatataagaaataatataataatatagttaggcatgtatgttgaatgtttatgtgaaagaaatatgtttacatatagtacttgtcctcatgactagttgattccggtgatgacaaaatagctgattaatctgaacaggtgattgaatatgagccagataatgaatttcctgttcaccaccatcaacaagaactcgataaaaacatcaatataagataatatgcttatccagtgtacagattatattaacgcatttatttaaaacatgaaagatgataatttaatattgtaatgtgtctaaattaatttatacaaatacacaaacatatatatgtgtaagataataccgtctcagaaatgtcacgtaagctttggacttgtgattgctcttcactcccgtccaaagcaccgtccaaagcagacagagaacctgagcttcctgtttgactattatcagatattgagccatcgacatcctcaatctgatagaaagacaagtatattcttccataagaaaattgattatactaataatgatagattcattcttattatcattcgagaaataaggatgataattaacataccaaggaagcttgagccttaacaaaatcgatatcgaaatgccagccactaactccccgtttatattcattctacaacaaaattaggaaggtcaaatatgagtcatagctattcataatcacaatagcatttagggaaaaagtcctactgggtcaatgtccagacacaaacagggagatatgaccaaaaacagcatttgctgtgacactatgagtagcggtaataagaatcattatattacttctatgtttaaa

SEQ ID NO: 295663 - DNA, 2344 bp, Cannabis indica
ccattgaacaaccatggctgtttgtcaagaattaaccgggcatcctccttcgagtcaaaggaaatgcggacataagtagccatatgtgcttcctcaataactttaaccctccattccccaatattcttccacatccttgagaaaatagaatgaaaaagcttaccgttcattggtttcctggatatcacttttcccacaaccgtcttctccaagaaaacctttgcctcctcctcatttacttcccagtcctcttcagtttccaccgccagttggcttgccatattcacaatttcctccactgcatcgttcgtagtaccactcatcatcaagaacaacacaagaagcatatcaaacattgtcacagggtcccaacaaccatagaactcagagtctctcgactattatttatgtagaaggaattattgaatactttaaaacatccaatataaataaataaagaaaatccgtggttaatttagatttttgtaattgtaaatagtacaaattattatttatttcttaaattttatttttagattatgaatttaagaatttatgtctaattttattaacgtgacaattgtcttgtatgatttcatttagtaaaattgaatgaaagtttttgaatcaaacaattttaataatttaaaaagaaaaaattaataacttaaaagaatttaaaaatatgatttgatacatatgaaagcttaaaaaaaaaaaatatcttaattaatttattttactacatacttaattggaaaattttaatttatgtcttcctcatataaagagctatattataattaagtcatgtctataactatacaatgcctataatttactagaaatattattattattattattttaatgatttgagcttgatttctagtgttgttgtcaataatttttggtgtactctaagaaaaattaagtatagaaatttcttcataataagagagactggcaagaataataaataaaaaggtgtaataccactaactatctttatatgaacacattttttttgaaatatcactttagtaaaaatcatctaataaaatcacaataatacatgaatataagaacaaagaaataatattcgaataatattacgaatattatttctcttttctattattaagtggaggaatctctctcaattcctaaatatgtaaaagggtggttcacaaaaaaagttatgtaaaagtgaaattgtttaattctataagaaagtgaagtacttttcattcatttatttctttactaattaattaaaaaagtcataaactaatacggtaatacctacccaaaaggtggagtaaaataaagaaaaatcctagtcattaaactcactctacaagaatcttcttttaatttaatcaagtacttattccattcattaaaaaaatacaaagtaatgtgttaattagggttattatgctttttttttttttgtcgtaagctactcaccaacactccactcccttcatagagtttagggaaattggttcattgactacaatttttttttttaatttaaaaaattgcatgaggcatgttccatgtcttgatgaagaggggttttatttatttattaaagaagagagaatgaaaaattatatgatgaaaatctaagttaaagtttgaaagttggacttttttgtttatgatcaattatatacagcaaatgggataattttatatttaaataataataatcattagtttatatttcccactatcaacattatgtgatcatcttaataatgatatcatccttttacaatccaaaccacaagatttagcaaaagtttcttatgtaatgaatgattggcttatcaatcttttaaatttgattttggttaaaagatatagtgagatttagtactttttttttatttctgtattatatcactattaatataattacatcaaatctcatattaattaattaaataacttttaaaaatataactgggtgtccaataataatgttctttaaatttatttttaaataatatatgaagattactttttcttaagggtgttcgcggtgggtgtggtttttgttgacttattttttaaaatttaaccttgctacatgctagtttttttaatttcttcaaaccgcacacgcaccgcgaaacctaaaaaaccgacaaaaaatcataccgcaaaaaaggtgtggtgcggtttatgcagtttctgcagttttgactatcactaaataattaaactatcacaaatacaacaaagcttaagcaatacttgtcaaaaataccataagacttgaaaataaatatgaaaaaaaaaagtactcaagtttaaacaatacaataat

SEQ ID NO: 295664 - DNA, 8767 bp, Cannabis indica
aagaaacaatagtcttttttttaattttttttctatgaaatattaaataatttattattaaaaaaataaccgatccaaaataaccgatccaatccgcactattgcggattggattggattggatttaaactcttatgcggatcggattggatccaaaatatgaaatccgcacttagtgcggattggatgttgtttgagcaaaaaagtgcggattggatcggatgaacacccctagataggattgtagtttctatgtgagacgttggcacatttgactattcactatttaagttcacttttctaatatgagttttcaaaagaaaatagtttgtaatttttttgaagaactttttattttactcttaatattttgtatataaaatagtcatatgagtagttataaacatagtattccttacaccgagtataaagactatgtcttgagttcatatcccctgcaatatgatataataatatcataaagacagtgacaagaattatattaaaaaaataaataaatgaattcatacatatattaattaaattcttaggatacatatatatttaaaaatatttatgccaatgcatagaactaaggaacatacatgatacattcatatgaaatgagcataattgaaataaaagagagaaaaaacaaaagaaaaattccttatatatatatctatgttttaatatttgaatgtgtgattttcaagaagtttggaaacagtagaaccttgtcttttagtctttcggcttttttatattatataaaatcaaattagaaataacatatttttaaacctaaaatctcaataatattatataactcatttattattaaagcatatctaaatatctaatagagatacaaataaatgatataaagttataatatagttcatttagtaacatttatgtttgtgtcaaaaagtaatgtaaatttagtgtatattaaattttgtgttaaatttgacaaaatatttattataatgtaaaatttgcatcaccataaatgtataattttattatttatttttatatgcttttaatattttattagtatatttagttatactattaattattattgttatggggcattagtagtgttcaacaccttctataagtggcgttctaaaagttattttattaagttatatggaacctaatacttaattacactaataacaatatgacaccgaagaaaatgctaagtatcaataatactttttagcaatgctcttattttaaattatttttttattgtctttacattataaaataataataaaattaatgataaaactataaaccttttaaaactttaaataagaatattaaattttgcattaaagttttataattatgcactaaagcataatgttaaaaattaatgcaaatatattataattttgagcattcttttagagtgaccaacaccaaataagttgacattttatgaatgagcgattagtagttttttcatattatttaataaaataaatatgttatacatgatattaagttgtacttataagtcattcaggaaaaaatgtactcataatgatattccttgtagtttttgaaaaagaattagtagaatgcaataaaagtctattctatgacaatttgtgctcttttagcaattttctatcaaaatcggcaatgaattaattgtgatttttgtcgtgttaatatttgagttgtttatctagttgatataggagagtcttggatgatattttcgtttcaaaaaaaaatataaaaaaaaaaacacttgtcaataactaatcttcaaaagaaagtataaggtgcttttacaatgaactatcttaaaaaagatgcattgatagctaatgcactatttacttgtttccatattcaaaataattttttagttcaatttaattttatatttgtgactagttatttaagatattttataaaattttaagaaattcggtataatttacaatatggaaatcagtgttcaatttcacacgcgtataaaattaaatagttacgcatacaacacactgtttgaattatatttttaatatgttaaattttttttgaattttttaaaattttacaagatatcttaaataattttaacgtatataactacgataaaaaaattaactaaaaaattattttaaatactaaattcctttaaagtgtttattttaaaattttccaaaagtttataatctttatgaagatcattaaaataattattgggattttgaaagtacaaacaaaaagaaattataataaccactctttttcctttattaatttaaatgtgagtataagtattagaataaagaaacaaacaataagaagttgccatagtgtgagttgtcacactcacaatcaaactcatttcacggtagaaataaaacagtaaaataggcaaaagtaggtatgtcatggccctataattagactcagtcctctttggttggaaactcaaaataaagcaaagcaaaagttttattatgccattactatttataaacacacctctatccatcagaaacacacattcctatgctaataatacacaacacataataataataataatagatatatattttcccttattttgaacaaatatatggcaaaaataaaaaaacacacataaacaggtgctattctcaatgctcaacatctattctaataaattatttgtttatgtttcttaatactaggcctcttcttgcctaactaggtgtgttcactatatgtatattatatatgccaactcataacgaaacaacagctgcaaattgcagagggtagctgcaaatgcatggctattttggcaaattgggataagatcaaagtcttgcattatagaaaaagttattctcatgtcttgttttaaaatactttctaacttttctttctttttcaatgacaattatagtagtggttttgagtgaattgtgtgacgattgaaagactctaagattgagaaatttggttgtatttattcagctttagcctcttccgaccggtccattgacggtggtgtcgttttcataaccctctattatccttattggaagaagcaaaaactaaggtaaaaattataccttacttttttcaccaaacaaaccaaacacaacttattatttatattaacattcacttaacaaaatttaacatattacattacaaaacatagtcaaatattactacgtacacacacatggctattcaaaacctagctagacaaaaaaagacaaataagacttcataataactatggtcttttttcgttttgtttttttttcttaacacaccaacaaacaaaacaagaaccgaatccgtttttcaatgcaagaaaacggaatactgggtgggggctattatttttgtaattagacgaaaaagacttccatggctgcctccttgttagtttcacaaactggacaagaaacaagagaggtttcgcaagacttgcaagaacaaaggtgtctgcaagggaagaaaagaacacataagctctgtgttttgcagctgtgacaaacaaatttctggtcatttttataaagtactgatccctcgcaacatgatccggtatcttcgaccaggttatggttgttgttgttgttaacgttcaaagctttgtttctgcctttgaaataagcgagtgtgtttctgaggtccacaactgtagagtcagttcctatagccactctttcccatgtttggttttcaatctctacattcttcaactcatcatgaagctcctctgatttgattctaactcgaaccatgtcttcttccttttgcctaatcaagctcatcatctttgactcgaaactactcatcagaacagataattgttgcttactttgttcatgcaacaccaaccttaacttctcactctaaagtaaatacaaaagaaatatatatcagtataattaaaaaagaagaagaaagaaactctaatatatatatataaatatatatataaatgatcatgtagttacttacttgtgattgaagaatgaagtcaagctcctgtttatgcaactccagctgagcatccatagccatttgaaaaacaatatcagaagaagatgatgacgatgaagaggcatataccccataataattattattattagtattactatcaaaaacgcctgcagtggtgtagttttggggttgaaactgaagtggtggtggtggtggtggtggtagtggtagtggttgttgtagttgttgttgaaaggtttgaaggccataagagaagtcattatgaagatgatgattatgatgatcatcctcaatcacgagagtaggaggaggaggaggaagaagatgaagaggttgaggagggttgattgaccaataatcttggacaccacaaataaaaggtgcaggtgatgacaaacccatattattaccagaaggaaagtaatccataatatattttatgagaagaacgataataataataatgatgaaaaagatggtcactatttttattcttatatatcaaacgaattaatatttgggtaggtttaaagctataagattcatgttgttgtttacacaagaaaagatgcatgacccacctctctcttttctctttcttttctttctttctttcactcactcttaatttgttggcttggcttggtatattgtaataataagagcatttgggttatactgccctttctaactgaagaaattgaaaaaggttttctttgtgaaagaaacccgtgtggggaggagtcgtatatatagcggagctagctaggaattacaaaaaaaaactactgacaattggacgtgattaattactatatggtatgggatatatttatcctattacggggattaaaaagtaaatgcgaatttggttgttttttttttaggattttattaaattattatatgtgtatatttgagtgagtggtcagaacttagtacaactttttttaaccagcagaagcattaatgagagaaggtgtaacaaaggttggggaaaacgacggcgtacacatgcagattttgtgacaaagaagtcacacaaatatagagagagagaaagagagagagagagagagtaattcactcaattcagacgtgaaagggtgagatttttagacgttatagggggatgggatggaaagataattgaatgactagcaaaaccaaatttcttttttcttttttatttgttttagaaaaaacaaaataataatactaattaaaattaatgaatttttttgcttatcatagatgttatatttgttattatataagcaaagtgacatcagagaaggaacacattttgccaagtggcattttcaagctgttgtggtagatatcttttcatgaagggatatgtaaaaagaacacttttatgatgctttcttttagttaggtaatttattaatatgaaaacttattataacatggtagggaaagaaaagaaaaagattgatttcttttttcttgggttaatgagagaggtgttttaaaagcctgcaacgcagtttatagcagagcattgacacatgagaagaaatttggcgaggctaaaccatgtattaagatttcattatgaaatttggctctctctctctctctctttcttgtctttcattgtattaacaccatagaaagaggggagcttccgaagcttgaaaatcgggtcaaacagtatgtgcatcatgcaatcagattttacttgggggagtaggtgagccttttagtaatagagaaagaaagagagaaaggatggtgatgagaaagagaaagtataatgtcagatagggggccatgtcatatttggttaaagtggataatcagtttgtactttctgggtactacatatatgacatgtttattgattatgtgggatattgttttggcatatcaaaagattcaatagcacagtagcccgtagccatgagaactagcctgtgtaattgagctaaactgccaaagtgtcattatatctctttttgactctctagtctctctctcaacatctcatgttgttaaatattatataaatgtgaaaaatgaagatattcacttctcaatgctcgaggacagtcactgtgagatgtgagaaaaaaaaaactagctaaagaataacatcacctcatgtataattgactgacatttgatcatttattcagatacagagctggttttgaatctgtatggggctaggctactactaataaacatcaccaaaacgctttgctgagtgattactaatttactactgccaaatcaattaataattatcagcaaagtcatcatccaaaccagtataatttatataagtttcaatttcttttctttattattagtaaagtagattgtaaagtaattcattaataaaacagtagtagcattatgcctgaatcttagaagactttcccactgcactttccatgcgactgtaccattcttcaatccgggtattgtccaccatgtctcttccagattgaaggggcctgataggcctcagaaccccaaaaacagatatatcagctaaatttggatttgaatcacctgaaagaaagtaaatttttgcattattagaagcacttattagaggagccaaagacactcaaatcttttacagtgatttcaaccaactctaaagcaatgactacttgtattctaatgtgtaggttaggcaagaaaaaaaaaacatatagaatcttttttaattttagtaggcattataagttgatgcatacatattttgctgatttcttataattaaaaagataataaactagagaaccatggctcccctccttagctcagtcagtcctatcaagtatagtccaatattcagtagaccttaccatgaaattgtcttcctttgagagcatccacccatgtttctacagcttcatataaggctgcacgctcatcggtgatgttatgcctcttcttcagtttcttagagacaaaatacatagctgcagctcctccatattttgctactatcctttcagaaaaactaaaattgcctgcatgcacaagcaaccaattttaaagtaagtgagcagataactttatctatacaactggtttcaccaaaattttatcatgcaaggcgcgccgaaggtccaatttatctggggacgttagctgtgctgaggtctagaagactaccaaaaattctaatataaacttacaaaaatattctggatttagctggtataccatgagtagtgatgtaatcaaacgactcaattgcctcagaaacagttcgatatatgtttggtgataaaacatgcaccaaatggttatccacccacctatatcacaacaaatattgcattttcagtgttctagtatgatgaaattaaacataaaacatgagcttggaagatggtcagatgacgcaaaagagccatcatacctgcaccaaatcttttcttcttctctgtccagggtgtcgctctcaggattgatccttttatacagagtatcaattatatctgcgaagaaaaaaaaaactagactttgagcaatttgcacactaaagatgggacacaagaaactgatatataaatcagagtaacatccttagccctttgccaaatgaattttgatttggattctccattagattgaaataccaaacgatacacaaaaactcaatacatatgtcataaaccacatagttggcaatgaatgacttcgttctcacagatatgacagagaactaacctgaagaatcaaccatctgttcaccatcaactttcaaaataggaacctttttgtaatcagaccactttatctcttttttgttcatggggttaacctccacaattttgtatggcaaatcgtaataatccaaaaaagctacagtgaatgaaaaagaaaatcaactaaacattaatagagcttaatcacatctaacaaatagtacaatgtaaataatcaagctcataattcacagaaaacattcaaaacagtggcacagctgcacaattaaaaaaaaaatacaaatatatatatgatctttttttttattttacctttcaccttattgcagaaagggcaggcttcatattgatagagcacaacgtttttaggttgaaaattatcggagctcggagactccttggcatgagtgtttcgagccaatgatgctacattagagaaacacgtggtcccagaaaaggggctcgattgcccaatgatgccatcggataaccttccggagcaccaaaacgtcccgaaacgcggcgagcatgagctgagagttcctggttgaagaagttgaagttgagtggcgcctaatccggcagaaatggctcgactgattagtgaaactccgttaagccttctgatcatgatcgaaaaaacttgaatacgatttagggttttaaaggggttttaagacagtttggagttttgggtcacctactactcacacacgcctcttcttcttcattcttctacttgtctacttcataggatacacgtttcaccccaaacaaccatacttttacttattattattattattattattattattattatttataaagaaatcaattcagggtcctatttgtactattttagaaaatacatggtccattttgtcatttaacaaaacacagggtctaattggtaacttttgtaaaacagagggtctaaaatggtatttaccctttataaagagtaatttatgatagactaattaggatttttgcccccttaactttgacatatactagatcatgcc

SEQ ID NO: 295665 - DNA, 1773 bp, Cannabis indica
aaaacaaagggtccaatcggtaacttttgcaaaacacaaggtctaaaatgatatttaccgtatttgatttaattttttaggacctgtacttcgttttatttttttaattatacaaatttagtttgtgaaaaatatgattttaaagttttaaaattgtaaaaatatgttttttaggaaaataaataaaaaaaaataaaaaaaacctaatggtaagaaaacagaaaaaataaaaaactcaatctcattacaactattaatgaattataaaacaaaaaagaaatatatgtaacagttgattatttttattgaaaaatatatttttataaataaaaagttcaattgtaaaaataatttttttttcatgttaacgtatttttattaaaaaaaattgtttattgtaaaaatgcttttatagaaactcttaatccaaaccttaattatttattttatataattttaaaattatcaaatctaaagacctagttatgtataaatagattatatcaaacgttaaaataatacatttacacaacctctacttatgtttcaatagattattaagtacattagcattaatgtaaatccatttacaacaacatctaaacgttaccactcatgtatgataattaagtttgatcttgttaagacttgagtctccaaagctgctggtgtgtagtgcagcagcagagtatctcaaccctgtacatcagaggacagctcagcaatattcctgaatattcccttaacggtcttgtacccgggatttgtgaaatcattgcacaaatctccatgctgataattctgttaattattgctcaattgtacactgccatatgtcttgtaatcagtggccactaattgtaaaatccttctataaaaggcaaagcatttacttagcacaattcgagctgagatttatcaattcatttactctctatttcctttcttggtatcagagctatttaaaggctaatgccatgtccactggccaatctcagtctccagctatcacccctgccaacaacaatggaggttcagcctccaacaacccagctcagtcgacccatatcaccaacttcacacaaccattcaacaccctaaatcagccctttccgttgaagctcgacagaaataattacactatgtggaagactatggtctccaccattatccgaggccacagactcgacggatttgtcaatggcacctgaccctatccagatgaactcatccctataactatctcgattggtgaagaaggagataaaattggtgttaaaatcaaccctgactatgaaaactgggttgtaagcgaccaactcttgttgggttggctatacagctcgatgacagagtctattgcaaccgaagtcatgggatgcacctcctctgcctctctatggaaagccctggagaatctctatggagctcactcgaagtctaaaatggatgacactcgaacagccattcaaacagtaaggaaaggtaacatgaacatggttgaatatctaaggcaaaagaaggcttggtctgacagtcttacacttgcaggagacccttatcctgagaatcatttaattgctaatgttttatctggtttagatgatgattatcttcctatagtcttacaaattgaggctcgtactagcactacatggcaggaactgcaggaactcttgctcagttttgatagcaaaatcgagcgtcttcaaaacctgaatggaacacccaaaaatcctactgtaccatctgctaactgttgggttttgtgcc

SEQ ID NO: 295666 - DNA, 2915 bp, Cannabis indica
aaaaaaaaaaaaaaaccattgtgagccctttcaataagtaaccttctataattgtatacttttaaaaaattattctgatacttaattatactattaacagtataacatcaaaaaaaaaatactaataatacttttactattttcttaaagaaaatacctggaagagcaatgaaacagtcagaatggcgggccatctcggccttcctttggtgcatgtctgcaactgttcttacctctccgattgtttccccggttatctacttaattatataattatatatatatatatatcaagaaacaaaaagttaaatataattatatatataaactgtatttattaaaaaaaaaagtgggaggggtagtaaaattagggaaacctctttacgcatcagagccttggggattattctgagaatatatgaagagattaaaaaattatatcaactcaatatatttatatataaatatatgtcataataacaatagttatatattaatataattagtacgtacccaagtacgtgtccaccactgcgatggacttcttgagatacaatgcccattagtccaatacttccccctccataaacgaggtctatcttttttgaaaccttttaattaaatttaaattaacaaagaaaaaacaatcaactatacataattaacccacttttgcatgacaacaaagatatatatatttatatatataccagctcttggccaagctcaagggcagcatcacggtagcaatctcttttaccagaactacttccacagaaaacacaaacccttttgaactttgactcttctattatggatttgtgatcttccagttgatccatgtattttattttattaattatacataaatataatagctagttttgaaggcaagtaatataaataggaaaatcatgaatgaaagcatataaatagagaaaaaggatcaatgataataaggaaatcgtgttgtgccacgtgggaacatttcccattgtcaaattcgccgacatgattctgttatctccaccaatcctcatttttctattcttatccacttctagttttctaaatatttcaactatatattttcctaattaaatcttgatattttcagggttaacttaatactattttataaaatgatgaattggattctgtattttatgatataatgaatttgaattgaatcttttatttttttaaaatagtacacaatagtactatgcgtttaagttttgataattttcttttaatataactattagtttgaagacaatttttagcatgaaatttactttatttttagttagtttagactgtctcatttgaaaagagggagaaagtaatcattcatttacaagaatatatgaatcacgatgatattagatttttatttaggtttacattaatttttattggttttattaaaatttgggttgattgaatagttattagtaaagtaaagtgagtagacaatgtaattttctcattgttgtgttagccatattgttagtgataaatagttaatgagctaaacatcgtgtgggtattaaagtttagttgaaatataagtgtgaatttttttagttagcctttgatgagcagactcagttcaattaagattatgtaactaagtccctccctaactttataaatacatattatttcatgatcacaattgtatacttttgataatcaaataaataaaattgcttttgatttagagacttagggagaaaattttagttgataatattacactattaaattgtgataattgctataaattaatcaaatatacatatctaattattatatattattattgtgttttatattataaacgaattaatgttagttttattattaactaacagatgagtaataatattgatatatttatatatatatatatatgtatgcacttaaattacatgtattaaaattttatacactgatatatttgttaaataatgagattattgtgtgtaatagttaaacgttgtgattctcaattagtatagttaaattatatgagaacaacttacggataattttaaaagacattttgtgcttagaaatctcactaattaattcaagtgtatacactacaggttatttattcctcgagtatacgcaagttagacctacataatttaggaccctcaatcaaagaaatccgaaaataaaaaaagaattgttattaacttctttttctatattagatctccaattgtaaattatggacttttttcagttataataaaaaataataataattttacaaaaaaattgtgagttggataaataaataattatacaatccaataaaaaaaattatacaaatacttcttacacacacttttaacccacatgattcacacttcttgggattgaaaccttcgtgtgatgcaataaggttagcaacgatgaaaaaactccagtaaagaaggaagcaccattaattctggcaacatcgcttgagaagaagaacaaacttaaatcgaaaagcaaccatatacaatcgacagagaaaaaatctacagaaaaactggtatgaaatataaatccaaccctaatttataataattcagattccataaaactaataatcttaaatttaatttacagatttataaaatatagatgtgtaagaaataaatctcaaattctcgatcaatccaaaaatcaggtataatgactaaatatatatcactacagtaggtaatattatgactgataccttaacctttttttttcttgaaatatttcaatactgaatttattcaattccgatcatattcattatttatctcacgttgcaaatctaaaacattatttttttatataggctaattaagatttttttctccagaactttgacatataccgaatcatgcctcctgaacttt

SEQ ID NO: 295667 - DNA, 5614 bp, Cannabis indica
taatcgattaaagcttcaaatttcggtacgtatctagctttcttttattttgggtcttttttatttactactttcttcgtgttcttatattttactgacttttatgtttggcttccccaatcctctgattggaaattcaatttcgaagactcatcgttcatattttgtatttaacccaacaaattgttattggcctttatgtgtggttttggattcactgtattacgagtttttattttttgaaatttatttatcaaaatcaaagatttgatgttaatatggttctggttttttgcccggtttcttgttttttcaattttgagttttctttcttgtttgacaatccctattggattggttactacggttttttcagtttttttccaaatcttgcaaacgaatatggtcgacaaggatttttagttttttttctttttttaaaaaaattaaagataattaaagcttgatgtgatgtgatataggtctttgttgtttttaatttatttttttgacattattattggtaaacatgcaagtttctataaaatttcattggtgcacaattaactgggtcaaatatcgtgtcgtaatcgtgtgaactattcaaaaccagatttttcttcttgtttttatttctattcttcaagtgataatagtatttattccgtatctccacagtgaaatttctatcctggagagccattaattttcctactgttttcaaatttcgggtaccataatcatatcataccaggaaatattgtgttcactaattgaaaatcattattcttttgttgttttttggctgtcacttcatttggttttattaatcactgatccttatgagttgggaccctatgtatagttgaatgaggaatcctttctctccactatgtggggttgaatctatacaactaagaaaatatctcaatcaaaagactgtgcatcttttgttctcatgcctttgtttaccatgttaggcttttatggtcactctttctcagtattcacataatttatactcaaaattaatggttcctttgatcaggatcactagtatcagttcacggtcattatcaagttcttattcaactcaaaacagtccatgttctgatgcatatgcatacacttaacttttccttttatttccctatgaatcaactaatcaggccactgttcatcacaccatagttttgtttgatgctctgacatttggctatagctcaagcaataatttggtgccttttctaatttttcttatgttatatgaataagaacactgatttagtactacttttaaatattacaaaacacagggcatggtatgttctgtctgacaacacattttcatctcattagttttttgtttttgttgttccaagtcacaatcatagtctattcccatctagtcatcactttggatttacaagtatttttgaagggatttttatggattgtttgtttgtttttcttactgatgttaacatttaaatttcacaagacgtttctgattgtaatttttatggcacctttcattttagggagataattatgtttgtcatttgtgaccaccacttactttgattagtccattttagatagatgcttttcttttcttttcttttgagtcattgattgtaacattcatggttttatttgtttataaagactttgatgttaatattatcttcccagttattgtattgaaaaactttcttcgttcctgcagatttcagttaaatttgcattgttgctaccgcgatgaaaagctataatctgtaagaactcgttcttttttcttttatgttttactttgacctctcaacgattctctctgattaaactttttcattgtgttcagccttgaggggtcttttgcttaatggactgcaagccaaatagtagtgacaagaagacattaaaaaggtggtttttcattgataaaagggtcgggtaaagaatttctttatagaagaattcttttttaaaaaaagttagtttatttattcttcatcgttggttgcacaaacaaatctggatcccatggacgtaaaatcaaaccatactgctccagttctcactgatcctgcacccttgagcaagtcaagacttggggtacattcaaatttgtttccctactcaccaacaggagcagccttttctccaagtcttttcctaactatacctcggaaaaagactggagtacttgacgatgttcgttctagctcttggttggatgccatgaaggcttcatcgcctcctcacaggaagataacaaaagatgtcaacaacgagtctcctgcgtatgatgctgatattgcttaccgtacttggatggtatatgttcatccttacctgtattgtactttttctctgcctagataatttgcttttgatcaaaaatctcaatattgttccttttatgctgtttcaatctttcaggccaaatacccttcagctctcaaatcttttgagcaaataacaaataaggcaaaaggaaagcgaattgcattgtttcttgattatgatggaaccctttcgccaattgtagataaccctgactgtgctttcatgcctgatgcggtaagaatttctctcagattcgaacctggtctattccacttctcaatcatttgttctgttcatgaagattttgtattttttacagatgcgaactgctgtgaaaaaggtggcaaaatattttccaacagccataattagcggaagaagccgagataaggtaatttcttgctaatcatgtccttagcattagtttttgcttttagtgattaagccatcttgttgcaaggtattgtttactgaatgtgtcctatgctgtgttctttcaggtttacgagttcgtaggactaacagaactatattatgctggtagtcatgggatggacatcatgagccctgttgaacaatctatactagaggatcatccaaattgttttaggtcttctgacaagcaggtaacggctgaaaaccgcactattacccttcttatttcttacactcgagctcttagaatttcttttactcaacactttctttctctgtaatcaccacagggcaaggatgttaacctgttccagcctgcgcgcgaatttttacctatgattcaagaggttcgttgaatttcatttattttaatttgttgttttcttgtggtttgttcgatttgatactaaatagatgttttcccactttgttcaggttcataaatctcttattgaaaataccaaaggaattgaaggagccaaagttgaaaacaataagttctgtgtgtcggtacattatcgtaacgtagatgagaaggtattttatccttaaccaaaatttacaggcttttgttcctcattcttagttttgacactatggctaatcttaggctacttcaatacattttttcagagttggaatatagttgcacaatgcgtagaggacattctaaaagattatcctcgactgcgcttgacacatggaagaaaggtattgtttaaagctaaacatgcataacaatttgctctgtgttgttttcgttttaaatttctcttaacgggtttcatttgttaatctcactaggttttggaggttagaccagtcataaactgggataaggggaaggctgtaacatttttgcttgagtcactaggtaactatgcataattattctatctttaaagagagaactttacttcattcccatctttgtaacataacaaatatctttaaacagggctaagtgactgtcatgatgtgcttccaatatacgttggagacgaccgcaccgatgaagatgcatttaaggtggggaaagaaaaattctcttcaaaatttgtttaatctttcatggcattctttccaaagatctaaaatctcaacttgaatggaattgaacaggttttgagagagagaaattgtggtcatggaattttagtgtctaatgtccccaaagaaaccaatgcattttactctctgagggatccatccgaggtacaatttgtcttaattctcatttgaatcaaacccttttgttttatgttgtaattttgtttctaatattttggttttttacttaggttatggagtttctcaagtctctggtgatatggaagaaatcaagtgccttataaacaaaaagaaaaaataataatactatatatttatagtagattattaaagaagagagacatacatatacgatgataagggtaccctactttttctagagatttttataccatcagctttgggagtataggctcttatggcttgcatacaaggcgtttctaaagagacgaaggtctattttggtgcctaacctagttgctctgctccatggttctggtctttaattgtaaattcatttttttattttgtttttatctttaattatcctttatttttggctttgagttcccactcatatatagttttcctttaacccttttggttatccttatatccatctaatgtgtattagtcattcgtttagttccattcccacttttcaatttaattttggttaacttttagatatcctgaataatttgttaattcttttaaatgagattatataattacaatatgtttttctttctcctggttgtcatatttttctgaggctctttttgtttctcctggttcactgagaccaatgcttcaataaattatattattggttcaacttgtattttggcaggtcagaattttttagtacttcgaaaaagagaattaaaaacgtcaccgtatctttgactttgaatgtaccactttaaaattgagttcgttatagaaatgaattgaatctattaaatatttttaaatgtacgaagtttgaaagcaccccttcaagcttgacaaacgagctaatttattatagccttatgtatatttattatatattcattgttgtgacatatcatagaaaattggcatgtagttcattatttaaatttatcataacattgctttgtgcgaattattaacaaaaattccaataaattattgaatttttttcccacaaaacacttgtaagcacgttattcatgtcaggttcataaagtcataatatagttattactttttttttaatccaaaatactattaatgccctttcttaatgcggacaaattattagacaatccatataacctataaatgtttagaatataatgaaggaatatgaagtgtagataatataatacacaaaatacatataagataatataatattgggtgattaccatgcatttcttttaaaactcctttaaaagggtgcagcacatttacttattttggatgctagaataattttttagtgagcatattgctattcagcactagtagcgttcaacaccttctataggtgtcaccttatgattggttagcgatatttcctaaaacttattttcttaagttatatgggacccgctatttaattacaataatcgcggtatgacactaaggagagtgttaggcaccagtggtgccctttagcaattcttctttttttaatattcgtttacattatagttatttaagatagggcaatttaacaaaatactgcatttggggtaattgttttcaattttactgccacacggca

SEQ ID NO: 295668 - DNA, 4213 bp, Cannabis indica
gcggatcggattggatccaaaatatgaaatccgcacttagtgcggattggatgttgttgaccaaaaaagtgcggattggatcggatgaacacccctaggtacaattaacatttaagaaattcaaccactaacggtgtttggtgggctttaattgttataattgaactttttagatttgtatgtcaggctgttttttagtataccaaatatttattgtttaatatatataatatttctcattatttaatgataaaatagtttgtgctaattttcatacgagtgggaaaacataaatactaaatagaagagtgggtgggcaactaaattgaggaataatataagaccaattccttaaatttaacagtcaacttgtgagtgtggctctacaaataatataatattttttacgaatatgatccaatgctaattagtaattagttcagttccaaagcattctttttttgcaaataaggtatatagagagattagagaatggcgtatcatagagtaactattccactaatagcaaattaggcaagtaagttgattcttaagctaagtgtcaatttcgtcttatggttttactttgttgttaatcaaagatcctcctacatgataataatttgcagcaaaaagaaaaatgataataataataaataatgaattacaattttttgtgaactctatgtcgatgtgtatggagaccactaacatgtaccttagagaaataagaaaaagaaatggtcatttcttgacttctattctaatactcgttattgttaaagagtcccacattgctaatgtgtgaaaagataatagaatatataagaggaatgggctactccttctattgccaattggttttgggatggaaccccattcaccttatttccccaattctaacagttataaataatccaaaaacgaatcatttaagccctttcttcctagagacaaaaaaaaagtccatttcttccttcttttattcaactaatatggcctcaagtatgaatgaacatattatttatgtattagacaacatattctcatgagttttggagcaactacaactcaggaaaagtgaaacaagagaggccattttgctcagaatctgtaacagagatctaagttctaaataggaaacattaataaaaccaatgtatacgaagtgacaaatttggcaaaacacttgacgaatgtcataaactatacaaatttccatattaagaagtcaaccttacaacatgttcaacatttttagcaatttaaaggacattaattacatttcatgacactacaaaggaaacaaactatctattcttagaatccaaactcctactcttactgtacaatagccaaaagacttgccttttgagaataacataggtgatggctaaagttccttctatcaccatctcaattttcccatcttcacaaattgatatggccccatcacccaaatctttctaacaaaagtgaaacctcagaatcagataagttcttcaaacttgaatgggagagtcaatagatcattcttcagttggctgtttcatcaaatgaaaagcacaataaataaaaagaaatgataccaaccaactcatagtagaaagactaaacagtaaaagaaattggctttgtagagttatattatagatattaatcgatgcaaagtaccacataagtgtgccatcctgaacctgaacaatcttcccaacaatcctgtgatttacattgccaacaataataaaatagttatgaaatattaacattggtagactagagaatgtatagcaaaactaagtagtgcaaagaaaacaaacaggctcagacgactcagctgctgcctgatctttctcatcttcactctgcaaatgaagaactcatcagaacaatgcagatagagaacaccatgcagacaatggattaatcaaggtgacattgaatgaagtagaaaataaagacgcatcataagcattggctttggtttggtttggtcacataaatgaatatgtcagatttaagacatcaaagcgtgagagtaatgtaccttataagtatgccaaccatcagaatcatcagagtgtttagagctttcatagaatgcatcaccctgatatatagagcaaaatattaggaaataatcaattgattaatattagagcactagagaactacatatgctgctgagctcctgaaagtagacaaggtccccatgacaaacaaaactgcctaattatctttgaataaactttgttatgcaaacaaccaagcatttactacaccaaacttagaataaaaatgaataaataaaagtaaacttgtacaatcgagatgcaataatggcttcatgataactacatctatattacaattaacagtcattaggataaaacgtgctgaaaacatagtggaaactcaactttatgatggttcctctaaactaagtcttgattaattcaacttaaaaggtaagagcatttgctctggcaaagaactttactgaaaacccaagtgccagattaggcatcatgttagcatagagaaaatggaattaggtggcgtaagagacatgtaaatgtaatacatatctccacttacctttgacattatacatgcttctttacgcaaagctttcccgtgaacaaagtccacataacaagcttcacgaacgtatggttgcctctcctaacaaaagaccataacaaaatatgatgaaacactcttcatcattacataaaaataggcattagaagattttcattgaaaaaaagtttacctcctttgacatgttcttccaagtttcaaaccctttacgatcaatctcaattgaacctttactctcattgttttccttgaactcctccctgaaacagacatcttctccaataattaatgtcacaatcaacttcctttttctaacaaaagctattacaaatattaggagatacaactatttgaatatctgatcctaaaagttaagttaattcctcatttggtgtcaaagtcaatataaaacttcaaactctaactagaaagaaaactttgtgggataaataagaaataaataaaagataaaaagaagctttagcttttatttttatttttagcatcatttgatataatattgtaaagttgtagcaatcaagagatagagatgatggagaaacaaagaaaatgtacatgaaaaaacaaaaggccgatctgggttggtcccagaagaactcttctttcacatttgggttcgctcctatgcctttgaaccttttcaccttcagggtggtttgacagtcatgcatatctgccaaagcaatcgccactgacacgccacacgcatggctgcaataaatatatatatatatatacatatataatcgcatcaaaaatctccaaacaacaaaagaaaaacagagaatgtatttcgatgactggaacaaaaaagtaccaattttggaaggcactcccatcagaagcacgaggaatcgctcgaacccttttgcgggtccttggcgcagctgccattacaggatggattggagctttactcggccaagtctgcaaattttttatattacttcttcttcttcttgtactactagtagtggctctcgctaactctaatatacgcagtaggtcgacgtcacatctttattcgattagaagcggcgtattttaactcatactcagtttggtgagctaaattgcgccacattttatgtttggcgcggaaccagttacttacttaaggtgaaaatgaaaagacaaccgaaaaacattcccgctgtgactaaagaaattggcggacaataattttatattggaagaaaatagtaataccaataatcgatgtttatctagctaatcacagtttcacacgtcagaggtgttggaggtactactatttcgacgtgtacattggtgattggctgaattttgattaataatttgtagctgtcgtctatagtcgacacctcacttttttttaaaaaaaaaagaagacacactccatttagatacgaacttgacctttttgtctctaatcctcttgtctattttatttatttattcatgaataaactaactcaagaactattatcactagattatgctctccgaaattttatagtgaaattatgtaatttataattcacttttgaatttaggtgtcgtttggtaacacttttatttttaatttttaatcataaaatgaaagtaa

SEQ ID NO: 295669 - DNA, 6190 bp, Cannabis indica
atattttattagtataataaatttatataattttattcttttaattaaattactataattagttttcttcttaaattttatttttttcattatgtacttataccatatatatattagtaattattataagtatcaaatcaataatcataaataataaaatttaaagttacatgttataatgactacacattaatgctccttaatccataatccacattcaaagaatattatgtatatatatatttatagtaagtttagtaaatataatttaaatattattaaaatgtatgaatttttataattaaattttttttgcacatttttttttgtaatatattaatttttgttgtacattaataaaaaaacccctttgattaattattagtgttatttcacactaagaatcccattaaaggaggggaaaataaatattatcaacacacaaagcataagatgattaggtatatacttgcttggaatgacaaaatcaagtggaaaatcattacaactaaattaaaaattatctttaataaaatatcacaaaatgtgcagttggctaaagaacaaaactaacccgtcgcctcttttcatctatttcctataaataacaattaacaaaattgtggatggtgagcaagtgcagtacttatcgtcctcgacctcggccccgtcccccaccaccaccaccacccctacccctacctccatttggtttcttggagaacttgcgagaatccttgagaccaaagtatttctcggcatctttctcaacttcatcgtcatctctattccttctcttcttcccaaccccatctttgattttctacagtacatatacatatatcacacattcaaagttatgagcaagacataaaagggaattgaaacaatgacaaagtcagaaacataaaccaatcaatatatatgtgaaaagatatatttaccccttgggcaattcttttggcatctgaaacacgctccaacagtagcaagacttctacttcttcagcgggatacttgggtaacgttttacctgaaacatgtaaataactcattattgttagctcattcagatactctaaatgatgccttccaagtcacaagcacaaaaatgtacatcgcttaccgatgagcttttcaatctgtatataccattccaactcgtactgattcacaagggagattgcaacccctgatcgaccagctcgagcagttcttcccactctatgtatataatcctgttgccaacttgcagttagaacagaatagattggtacaacaagccttcgtgaatttttaaatatcaatagtaaagtaagagatttatcttatgaagtaaaccagaaaaataacaagaaaaacatgcaagaattccaccaacaacagcaatgaatgattgtattgcattgcatgcaagaaaaaaagctgatatcatagactcattagaatatcatatggagcttctaagaaaattagtgaacaccaagtaatacacgtgaaggaaaaacgtcactcagtacggcattttgacatagtcagtcttagagagaagttattgatattgatgaataataaacaagcaagataaagcaaaaaaaaaaactcagtagcataagtcaataacatataggtcattgtagactctgttaggccagaattgtggatggacgcaaattttacatactgatatatgttctaggacagctaacagcaataccactgaccttggagtttgatgggatatcataattaatgaccatatctacagctgggatatcgagtccccgacttgccacatcagtgcacacaagtatattatattgtccagacttgaataaatttaaagaacccagtctttttgcctgtcaggaaaattccaataaaaaagtgattgaatatttaaactagtgtcaaaaaagggttttctggtaaatatatgtatacctgggtcatatgaccgctaattggtatagcctttaggccaagatttgaaagaaccaatgctaggaaacgggttgcatcacatgtacgagtgaaaaccattgatgtagattcggatcttgcagtaagaatataaactagatagcaatcctgttgcagacggaatatgatttaatacacaagtaaattaggcttagcccgtttactaaacataattagaataaatcaacaggaaaaataaatggaaataaaatataaaataaccagaattattattttatcatgttgtttacacaactaagcaatcaaaatgctttaatttgactaaattgttctttctaaaaaaaatgttaagatttttattggatgaaagagattttttctggataaatttgtcttttaaattttaattattaaaaattaaaataaaacaaagatatcatccctcaacaaaatggaaggagagaacgttcatttacccataatttaggtgggtctcacaaaatattctcgttacttattaatagtaaataagtgaatgggaattgttatcacatatttgattcccgttacactttagtaaacatgccaagtttaatagatttatgaaacagaaaacatgaagaaagtgaaaaaccttgtatttagcaggcacgaagcaataaagctgttttagcgtgtcaactgtggagtacttagatgctgcttcaatctgagatatcataaaaccagtaatcagtttcactccaagtcaggagaagtattattgataacaaatttagaatatgaagttcttttttcaccttcacagggttccttagacaagccctttgcagcttcttgacctggattatattacaagcataatttgatcaatgtaagaggatcttattgcagagtagatcaagtcatataagttcagaaaattgcaactcctatctagactatcacccaacagtgaacaatagaaaattgctattatagtataacatgttaaatcaggtcaaatattttcacaattaaagactaaacagccacaaatcaaccaaaaaaactttcaagaagcaattgatatcacaaaaattaccattatccagcaatacaaagtgttcaggctatgattagcaggaatgggacacatgcacattcactttaaaaaattcacatgtgaagtgcatacagattgtaaccaaattttaagaagaatgagaaacaagccacaaaacattcaaatgctgcattgcagaagatattcaaagttcattactattgaaaatatgcaccatcatatgatacatgcatctgtgaatactttatataaatataaatattaatcacctttttggtcatggtagcagaaaataaatacgttctccgatcacgagggataacattgagaatttcatcaagtgatttttcaaaatcctcattcagcaacctatctgcctcatccaaaacctgtataaagtgcaaaccaaaattatgaacagcttaaagagttttaaaatcaacatttacacagatgcccaaatagcagcaatgatacgctatagaatgcagccaacccatgagaccgtgaccatgattcctcagtcaaaaaaatgatcaactagttttctaaatggcgaaaaaattataatgactgcaaaaaccatcggaatataaacaaaacaaattcaaatttaaaaaataccagaaatttcagcatccgaagagaaaaaccctttgtgttggttaaatgatccatcaggcgaccaggtgttccaacctacccaaaaaatagaaatttggaatatcaaaaacgtgttgaataataaattaagcaactggtatcaaaggtcaattgccactaaatataatccttttaatcccatcagtcaaataaacctgcatctacaatgtaatcatcactttacaatattctcaacattaataaatatcatatgatctattcagaaaaataataataaagatcatatgatacatccttcattttttttctttgaagaaatttcattgatatactaaaatagatattcatttattacaacaattcatacagtttatatgttactaaagggcagtttcaaaatctcagcaaataaaaaaaaaaaataactcacatgatcacatcattacaaatataccagtcaattatacgaaaaaaaaaaacactttttgcttgatttactgtataggttaaaacaggaaaaaaaaaccaaaagaacaaaaaaatagaacatctttcattccatgcacaagattttcatatcattattttacgacacgataaattttaggaaagaacaaatagtaacatattccagcacagccacattcttaaatagtgaacacattgcatatttgacagcactatgagtcttgattcaacacttacaatgatatgtggccgcttcgcaagattgatagactgttgcatcatgtctactcctccaacaagctacagaaaattatgtaaagataataagctaatacagtaaataaacaagacaagaaatttccattcagtcacctcagcatcttagctcagattctttaggctttatttgaactaattattttttaggggaaaaaagagagaacattttcctaacttttcataatgtctgcttttaaagttttctacaatatcaatcttttattataatttaaagccttgctaaagattggttatagacttaaagtttgccgatgatatagatatattcaactccttaatcttcacaatccaaacaagagaaaataaaatctctctaattgttagagatgagatgagggaaaaagtatctactattgcaaaggctaagaaaagaaacattgaggaattcattgcaaaagaatttaaccaaaagagagaaaggataaaaaagtcaccatttgaagaaaataaaacgaatgcagcttagcaaatatacttttactttacaatttctaaaaatttaaatctgtgaaattcaaaacaaacagtagaatctatgtttctggaaaagctttccaaacaataaaacaacagtaaccttcaaacttatcagaaatcttaattatcagtttcacatgacgcataataaagcaccattcaaatatagaaacatcgtatgcgagaataactatcaagcaaactagtatgtctgaaatgctcaccactgcacacttaacaccaatttcggatcctaatgcttcaaactgctcagaaatctgaatagcaagctccctgaataagatataacaaatgcagataaaatcagaaccttacatgagatataacaattaccactcaacaatattattcactacacgaaaactaaccttgttggagacatcacacaagcaaagaacgattgtggattctctaaaagggcttgcaatatgggaagggcaaaggctccagttttaccagaacccgtttgtgcaagtccaattagatccttacctgtaaattcaaattaagcaaccaaaatgttatagcccaacaatttttctgtatacataaatgtcttcaaattataaattaatcaaaatctcgcatcaaatgtactactcagccaagaacaacaaattaacataggctaaaagaatttattatagttaaagtaaagataagtttagacactattttatgccatctactccaagtatatttagtgaactaataacattaaaaatacaatatatgtacaaaaaaacaatcacgcaatgcagaaactggcccaataattggctagatttcacataacgattattgccctttactcaaattttaacaaagttagagagcaaaccatcaagtgcatgaggaattgcttcagcctgtatcttcgaagggtttttccaacccaatttatcacaagcgtcagccaattgatcacatatccccaactctttaaatgttttctgaacctcctcgatttcctctgccattctcaaagacccctaaaccaccaaatatatcatccccatgagtttatcttataattaaataacatataatcatctttttcagaagggtactgatagtctcatctcaactctgagcgtttgaagaataaaagcgtacctgtgagagaagcgcaggtggtaatgaggaattcttcttctgtgattagctggtgaaggaggttgatagtgtttcagctgatgagttagtgacagaggagaaaaacgcaataaggtcgattgagagattgagtaaccctagctctaataactaaaatttaaattgataattgta

SEQ ID NO: 295670 - DNA, 1554 bp, Cannabis indica
ttttttttttttgatgaaatgtcaacttcatttgaattaaaaacatttctgaatacaagatatccctcaaataccggcccaaacatcctactcaaaaatgctacaaccagagataaatcgagcatgcctagcaatagcatgagcaactcgatttactgatcgcctaataaaacgtaatcttacatcatatagagaagacaaaaaagaacgccaatcctaaataatcaaaccaaaagtagaagacatcctttgattacttcggattgtttggacaaacagcagactgtcagattcaagctctacattatgccagtttttgctcttgatccaacttagagcttctttgatccccaaagcttccacaacctcaacagggtaagaaccagcatggtgacatgttttggcctcaatgagcttacccaaattatctctcgctactataccaaaaccatacgagttgtcttgatgaaatagtgcagcatctacattaatcttgatgtggttcttatcgtgttttgtctaaagctcaaccacatcatcactgtttttgaaagatagtgataaaagaacggctttatcttcttgaacttttcgctaatggtcaagagtaatagaacttgtggctataacatcattaatggtggattttcgcttgttccaaacaaccttgtttcgagctttccatattgtcgaacatagtgttgcaactcgatatacctggtttgtatcactagtattctgcagaagctcaaactagctgccaaaggttgatggtgaagcaattgtaatcgggcacccaaaaacaaaccagcaagctttggcaaaatcacaagtgagaagagcatgcactgcagtttcaacatgtaagttgcagactgggtattgagctgaaattgacacatattttgtaacaagattgacgcaggtggggaaggaaccgaagatgacacgccaccaaaagttagacactttgggtggtatcgtaaggtgccaaaggttgcgccaaaaaccagaattatttggctctggtgtgactgatttttgacgttacagcagagagtatgcacttcacatagagaaattgcctttgtggtcagctattcaagaccaaaaatggggccaacaatgctattcaacggaataccaagaattaaattggcttcttgaactgaaaacaggtcattcacaatatccacatcccagctgcgattatccaactgaaacaaggaacttatagtttgattttgcaacccaggatgattaaaagtaatgaacctgttattaggtgttggcagccaagaagaaccaagaatactggtgtttgtaccatcacaaataactcgtgttgcacctaaacggaccacatcttgagcaccccaaatgctacgccaaacaaagcttggattgttgccaagttcaactgaaaagaattttgaattttggaaaatatttggctttgtaaactctatcagcaagagaatcggggttacacaacaaatgtcattgttaggttataattaacctatgtttcgggtctttaaaattagcattatc

SEQ ID NO: 295671 - DNA, 2057 bp, Cannabis indica
tttaataatattttttttattaaaactttattatatagattgatttttaaattttcattataatatttgataattaatgatcataatataaaccgctcaaataacattgtatttttgctgtgtgacttttgcggttttaaaatctcggttgctgtttaataaattataaaaacttcatatatgcagtttgattttaataaaaaaaaaaagtacaacccgcaccacacattgcaaacactcctatttagaggtcgttttgtgagtactatatatgtagtgtaaaacttattaacatttataagtaaatatattaaaaaggaaatttattttaatttggatgtgaattatagagcacaaatggcacataataaattatatgtaaaatgtttaatagcattaataattattgctggttattgtccgtagttgaaattaactatctttgatgagttactatatatatatatgtagtacgaggacgtagtaagattatcgaggtcgatcgaatttattaattaatatcatttgattaattattatttagccaaatattctaataaagttaagttatataataaatcaacatacaataaagaaacaaatgaggtgaaaagaaaaatgtttttttattaactagctaggcaaatttattatatatagttgtcacaagttaaacaattcttgccaacttttctctttttccttttatttgatatgttcttctagacaggaagcaggtcataaggctatacctttggcttggattctttctttacctcccacactacttgacttgtatatattttaattcaattataaattatttcaacttaataagaataaaaaaaaaaaaaaaagtacaaacttctgtgttttgctttcatacatatcttagtaataataaatattaggatatcactctcgataattctaagcctcacattctttttttctttgttttaaaagacacacacaagaggggtttatggtatatatataaatgaatggtatctaagatattgatctatagtgattgctttttctcaaagcgaaatccccaaacaagggaggccaaaagaaaaaccaataaatcattattgttattgcccttatctaaggaactccctaaatacaaggcaatggctcatggatgctgccccatacccacatgtaataataattaataatagtaataataataataataataattaaacgttctccaactttaggtcaagcaagtgtatagtagtatttttattattaaagcccttattcctctctaaagtagtgtatagctaattaaagcccatcccatactttgcccatcaacgacatccccatgtggacccaactccacatgggggtgcacacccacctgatctcagtgccttggatctaacggtccatgttggttttcgaagggaatctaatggactcaatcttccaagtcttcaatatgggcggccaaaagcctttgtcccactcttgtccccatggtacaaggacaactaccctaactctgctcttttatggaacaacaaacaccattagctgctatgctataatatgtgtccaaattcatgcatatccttatatatattttgtcataattaaattgcatccaatctaatttctctccccccctctctcttcatcactctctttttttaaagcgtggcttcaacttcccatgccaaattcttattgactttatttatttattaattttttactttgtgttattatataggagttatactattttggaaaaatacctttgtcatttatcttgaaactaatttgataaggttaatgcagattaggctaattagtaattttttcccctgaactttgacatgtactaaatcgtgcccctgaacttttttggccgttaaaaattccccccgaactattgagattgttaaatttaaggacttttgtctaattttagtaaaaaattctaacatggatgaaagttcaaggggcgtgatttagtacatatcaaagtttgaggggcatgatttggtagatatcaaagtctggagagcatggtt

SEQ ID NO: 295672 - DNA, 1665 bp, Cannabis indica
taaaagcctaatattttttaatttttttattttgggcccccgaaaagtgtgggccctaggcacgggcctagcccgcctatgcctagggcgagtatgtccatttctaaaccatacacttgtaatgttcacccttatacctgaaattgataaacctaataagaaagagaattttttcccaatcattctttgtaatgttatatccaaagtcatctctaaatgcgttgctgacagatacgaagatcttttggggataccatttctgattcttaaagcacgttcgtccatgggtgccttatccatgacgatactattattggattttaagggcatcactgtatgcgtaaaaacaagtttgggaatggattgagattagccttgaaacttgatatggcaaaaacatatgataggctttgtaaactgttatgttcttctctaaacagagtaaactggtgtcatgaatttagggcagactaaatactccaaagcccaactttgtactgtggataataatgcaggggatattgataacagaagataagctacatagatttggaataattgatgatgctagttgtttattctgcaatatgtagaaagaaacaaatgagcatctgttttttgggtgcttattttctcacttatactatctgaaagtgaaggaatggctccaatggaaggtgcaaactactttgataaccagtttgattagatggattgagagagctaaatgcagtaagttcaagaagaaggtgttggctgctgtaatggctagtttagtgtatcatttttggaaagctaagaatgcagtaagctctgtaattgattttgattgattttactcattataatgtatacacttgtatagttgtcacattaggtctcccacaatgtagatgctattagtttgtaaaaagttggtttttggagtaatgaagagcttagctgattcataaaaaaaaaacgcatatgataaggtagaatggaggtttgtggaaaaagtaatacttaaactggattatagagataattgggtggaaaaaattatggagtgtggtccatgaaattctcttttcttctcaaagcattgtgaaaggggaagtgaggccaagtgcgtgaagatgatgccgctatccaaccggaattggatgtctccattgtgacattgtcttgaaaggggtcgatgatttcatttctcttcatgtttttatttaaaatacatttatttagatttaacttatcataatagactaatatatgtattaactacctggtaaattgatttgattttcccagttgctaattataaagtaatctcataaaacatgatagtaaattagaaggtttataacaatactaggacaaaaatgcaacaaacataggcccagccggagctgggtcgatgcctaggcctctatctcggtccaaaagtttctctagaaagaaattcaatttagctatctgctagatttttaccactattttttaaattttaacacaactattttcttgtaaaagaatcaatgtgctttttttttagaaatgttataatttacattatttaaagggaaatttacatggtatactaacttttgtcatttttttacaaaaatactgtcaggcggtatttttacttttttactgtattttttttataagtttcatact

SEQ ID NO: 295673 - DNA, 4834 bp, Cannabis indica
agaaagaaagaaagaaagagaaggtggaataaagcaaaaagaaaaagagcttcttctctgtatatttctctcagattcatcagatcccaccctaaaagcaaaaacatccacatctctctccatttttctcagtttcttacttttttttttcctggttctattttgagaagggtttctgtttgttcctcttctttcattaatattactacccttacttttgtttttctttctccagttcagtgtttctacaaacccattgaaactcattcttgtatgagttcaatcttcggctttttcgttctgttttccggacgacaaaagtgggtttaggattgtttctagtgaaatcatttgggaagttcgtcggtttctaaagatttttttttccttaatgcaccgctttgcattactctggtctggttcttgcaccgacttcattagggtttctctgagggtttaaaatttatcagtgtccttgtttctgaggtcagattcaacttactttactccatatttatcctctcctttacacttttttatttttttttttttatttttacttttttattttttttttttattttttttttatatatacatatattttggctgggtctgtttggtttctggtaaaactaaggaaactaaactaaataaagggttggaaagagaatttatatgttatggattatgaaaataagtttactcgttagatgttcttctgtttggtctagatattgtcaccgaagttctcataaacaaaagaaaaagaagtgttttcctcttgtgactaagccatttatttctccacattttctcagttaccaaacaggcgaacgagttttgcataatttttcaatgtacatgtttgtgttaaagctacttaggtttctcagatggtagcttctctgccttactaactttgtgattttaccatttcagtcttttcagtgctttcagcattcagatctgaagcttgggtttctcaattctcagatgatattttgttaaaggtcattctcgtacttacatttaaattcttcatgatctaggttttccctgcaacgatttttctcatccatagttttttgtagtttgcgttttgttaacattagcatgtcgtttcgattaccatccttgcatataatggttttgttttcctttttaaacggttgcatatattcttgtttgtcttaggtatatccgctttattctttttatagttataaatttgcgaatatttagatagctttattttgatatgtgtggtaacggctacttgaccatgtttttatttctttcgattttctaggtttctgggaacctttgaatttattcaaattcagttcccttgttgatattttcctaccgttcgtcatccacatcggattttgccatctgggcatctttggtttgaaccaaaaagatgcagaggcctccgccggaagatttctccttgaaggagacaaacccacatcttggtgggggaaagatcactggagacaagcttacgagcacctatgatctcgttgagcaaatgcagtatctctatgtccgagtcgttaaggccaaggatttacctggaaaagatgtgactggcagttgtgacccttatgttgaagttaagctcggaaactataagggtacaactccacatttcgagaagaaacctaatccagagtggaatcgggtgtttgctttctcgaaagatcggattcagtcttctgttcttgaggttactgtcaaggacaaggattttgtgaaggatgatttcatgggtcgtgttcttttcgacatgaatgagattccgaaacgagttccacctgatagtcctctggctccacaatggtataggttagaggatagaaatggcgttaaggttaagggagagcttatgttggctgtttggatgggaacccaagctgacgaagccttccctgaagcatggcattctgatgctgcagcagtgagtggggctgatggtcttgcaaatatgcggtcaaaggtatatctttctccaaagctttggtatctgagggttaatgtaattgaagctcaggacttgataccgaccgacaagggtagatatcccgaagtttttgtgaaggctacacttggaaatcaggctttgaggaccagaatctctcaaaacaggggtatcaatcccatgtggaatgaagatttgatgtttgtagcatcggagccttttgatgagcccttgattttaagtgtggaggacagagttgcaccaaacaaggaggaagttctgggaaggtgtggaattcctttgcagtacgtggacaggagattagatcataaacctgtaaatacaaggtggtttaatcttgaaaagcatgtgatcatagacggagaaaaaaagaaggatattaagtttgctagcaggattcatatgaggatctgtcttgaaggtggttaccatgttcttgatgaatcaacacattatagtagtgacctccgacctactgcaaaacagctgtggaagactagcataggagttcttgaggtgggaattctgaatgctcagggattgatgccaatgaagacgaaagatggaaggggaactactgatgcttattgtgtggccaaatatgggcagaagtgggttcggaccagaactattattgatagctttactcccaagtggaatgagcagtatacatgggaagtctctgatccctgtacagttataacaattggggtttttgataactgtcatttgcaaggtggagacaagggtggtggggcaaaggattctaggattggtaaggtaaggattcgtctttccacccttgaaacagatagggtttacacacactcgtatcctcttcttgttctacacccaaatggggtgaagaagatgggtgaaattcatttggctgtgaggttcacttgttcttctttgctcaatatgatgcacatgtactctcaaccgctgttaccaaaaatgcattatattcatccattaacagttagccaacttgatagcttgaggcaccaggcaactcaaattgtatcaatgagattgagcagggctgagccacccttgaggaaagaagtggttgaatttatgcttgatgtgggctctcacatgtggagtatgaggagaagcaaagccaactttttccgaattatgggagtcttgagtggacttattgctgttggaaaatggttcgatcagatctgcaactggaaaaaccccattacaactgttctgatccatatcctgtttataatattggttatgtaccctgagcttatattgcctacaattttcctctacctcttcttgattggagtctggtactatagatggaggccgaggcatcctcctcacatggacactcggctctcacatgctgactctgcacaccccgatgaactcgatgaagaatttgacacattcccaacttcccgacctaccgacattgtaaggatgagatacgatcggttgaggagtattgccgggagaatccaaacagtggttggcgacttggccactcaaggggagaggctgcaatctctcttgagctggagggacccaagagcaactgctctatttgtgctcttctgtctgattgctgccattgtcctgtatgttacaccattccaagttgtggcacttctcactggattctacgttttgagacatccgagattccgtcataagcttcctgctgtgcctctgaatttcttcaggaggttgcctgcaagaactgactgcatgttgtgagcagggccagttcactgcaaatcgccattgagttttttgtcacaagaaccttctccattgtggtgacaaaagtgaagaagatctagtaatatataaacctttgtttattttcaatgtttaacagtcatggaaggagcagaaacaaaaagagcttatttattcccagtgttttttagcagctgatgatgtatggacccttcacttgaaggtagtagttttttccatgaattttcagttcatcatgtcagctgcatgatttttcttttgcccccttccttcctttttcgtttttggacttgaccttattatgttaattatttatgttatttgtaatcttgtaggctgtgattggaattagtttattctgaatctctttctatgcgcttaattagattttgacaaagttttcttcagaatgattatttgaaccttttttgagttctgtaccatgtgatataaaacctggtctacaatccacattccatctatttgtgatctttatttagattctcttttacatataagttaaccttatttaattttggctaattaggatttttgcttatgaagtttaacatgtaccaaattatgttctctgaatttttgtcgttaaaaattcttgttgaactattgagattgttagatttaggaatttttgttcaattttaataagaaaagtataacatggataaaagtttaagaggtatgatttggcacatgtcaaagttcgaagagcgtgatttggtagaaattaaaatttggagagcatgatttagtacataaacaataactaaattagtacaattgaatgaaattggacaaaagtccttaaatttgataatctcattggttcagggaaatttttaacgattagaaaaattgggtgatacatagtagaaaactccatactagtagctttttaaggtgtagattaatgatattaatattttaaaggggaattatttcatagagtgattctacaatgcacccccttaaaagagatgtactgatgcacccttgacttgttttggcatccagaaaaatattttagtttaatttttttctatatttgtgtacgttata

SEQ ID NO: 295674 - DNA, 3305 bp, Cannabis indica
agtaataatctagcatttcaagttacatagtggaatttgctcttcatttgagctttatttgatttgcttacttatctgaaatgtaatttcaggaaaatcaactcttaccgattctctggtggctgctgctggtatcattgctcaagaagttgctggtgatgtccggatgactgatactcgtcaggatgaggcagaacgtggcattacaattaagtctactggtatctctctctattatgagatgtctgatgaatctctgaagagttacgaaggaaagcgacaagggaatgagtacctcatcaatctcattgactcacctgggcatgttgacttttcatcagaagtcactgctgctcttcgcatcactgatggtgcacttgtggttgttgattgtattgagggtgtctgtgtccaaacagagactgtgcttcgtcaagcccttggtgaaaggattaggcctgtgttaactgttaacaagatggacaggtgttttcttgagctgcaagttgatggggaagaagcttaccaaactttccagagagttattgagaatgctaatgtgattatggctacctatgaagatcctcttcttggtgatgttcaggtctatcctgagaaaggaactgtagctttctctgctggtttgcacggttgggcttttactctgactaactttgccaagatgtatgcctccaagtttggtgttgatgagtcaaagatgatggagcgtctctggggtgaaaacttctttgatcctgctactaaaaaatggaccaccaagaatactggatctcctacttgcaagcgtggttttgttttgttctgttatgaacctatcaagcagattattagcacttgtatgaatgaccaaaaggataagttgtggccaatgctacagaagcttaatgtcaccatgaagtctgatgagaaagaactgttgggaaaggcattgatgaagcgtgtcatgcaaacatggcttcctgccagtgctgctctcttggaaatgatgatctttcatcttccttcccctgcaacggctcagaaatatcgtgttgagaacctgtatgaaggtcctcttgatgatgtttacgcaacagctatcaggaactgtgatccaaatggaccccttatgctctatgtatcaaagatgattccagcatctgataagggtaggttctttgcctttggtcgtgtctttgcaggcaaggtctctaccggtatgaaggttaggattatgggtccaaactatgttcctggagagaagaaagatttgtatgtgaagagtgttcagagaactgtcatttggatgggaaagagacaagaaacagttgaggatgttccttgtggtaatacagttgctatggttggtttggatcagttcattaccaagaatgcaactttgacaaatgaaaaggaagttgatgctcatcctatccgagccatgaaattttcagtctcccctgttgtgcgtgtggccgtgcaatgcaaagttgcatctgaccttcccaaacttgttgaaggtctgaaacgtctggccaagtcagatcctatggtggtatgttctattgaagaatctggggagcacattgttgctggtgctggtgaacttcatcttgagatttgcctgaaggatctgcaagaggacttcatgggtggagctgaaattgtaaaatctgatccagttgtctcattccgtgagactgttcttgagaagtcaagccacacagtgatgagcaagtcgcccaacaagcacaaccgtttgtacatggaggcaagacctttggaggatgggcttgctgaggccattgatgacggtcgtattggtccaagagatgatcctaaagttcgttccaagatattatccgaggagtttggttgggacaaggatcttgctaagaagatttggtgctttggccctgaaaccactggtccaaatatggttgtggacatgtgtaagggagtccaataccttaatgaaatcaaggactctgttgttgctggattccagtgggcctccaaggaaggagccttgtctgaagaaaacatgagaggtatttgctttgaaatttgtgatgttgttctccatgctgatactatccacagaggtggaggtcaacttatcccaactgcccggagggttatctatgcttctcagatcacagccaaaccaaggcttcttgaaccagtttaccttgttgaaatccaagctccagaacaagctcttggtggtatctacagtgtcctcaaccagaaacgtgggcatgtgtttgaagaaatgcagaggcctggtactccactctacaacatcaaggcatacctaccagttatcgagtcattcggtttctcaagtactctaagagctgcaacatctggacaggctttccctcagtgtgtgttcgaccactgggatatgatgatgtctgaccctttggagcctggaactcaggcagccgcgctggttgctgatattcgcaagagaaagggcttgaaggagcaaatgactccactttctgagtatgaagacaagctgtgagttcaatttcacatccattaaaagcctcaaagagcagattaatatgcttgaggataaactataagattaagtcaataatatctggaatagtagccagtgtgtattttttatggtgtcatcgtgtccttggtagttagtttatttaagttgcattggttttaaggagttgttatctttggatttggtgttataaactgcgtacgtcttgcatggtttatggatttggtgtcagctttggcgaaatatgtattctcctcagctaattatgggctatgttatatctatcgtattaataaataaaattgtttaaggtaagttattatttaagattgtttatcaattatgtttaacatcacttctaacttttcaccttgacaaatttatgcatttatagcattgtcatgtatgatagaaatagaattgttttaatttattggaatttattttctttttttcacccttaaaatctaaattccaaattagaggaagatggtcgtaaaacacacaaaatcttcttcttcttcttctcgtaagagtgtggaaaggtatcaaagtccgatttctagattaatggtcattaaatcaattcatgtggatgcttcttttggatagttgttagggaattggcattgtctaagtttcaacaggtgagtgattgccttttgtttatggatttcattaacagactagatgctgtgtatgcagtatgcttaatagagtaaagcctctgacttagtggattctattcctgcctgtaaagttgttttttcct

SEQ ID NO: 295675 - DNA, 4173 bp, Cannabis indica
ttacatccctccacacacacactcattaagatcttggactctctctctaaacttgactctgaaatcgaaattatgagccttggagatgtattgagaaagtagagtcacttctatttatagatgttagtgtcaaagccaactgttataactaacatcaactttctttaaattcatctgagtagagttaagattgaactactgacttgacagaggttaactgaatatattcccaatatatataaatattaattaattacaatctttttaatatgacgatcttatagctagctagctaggtagatttccaacaagagagagcatatagaactcgtcccttccaaccttgcagcatccattggttatcttcatcgaccaaaaattccttttggtaacatgtctccttcatcattttcttcactttcttcataatctcttggctcagcggaagttgcttcaacccagctcttaagttccttgcgtgccactgcttgtaggtctctggcctttcgatcctttttgagccttcacaagcaatcacatttaagatctctttaccaaaaccctcttgctcgtacaccttcctgtcttgctcatattcaggaggtgaattggcctccaacatatcaaatacagatgagaaatagtagagtgcctctctgaatcttgtagtgaaaaatggagcattgtaagccccattaacaatcccatgaatgaaaatatctggacgaatactcttcaccaattttagaacatcatctcttgagctgtgcaaccctgcggtagtgtcatcaagcaagtatttgaatgaatacagagagtttacaacaataatttcattcttgttaatgttgagatcttcacatgttatgttctcccatacttgtgatattattggtttgtactcgaaagggacattgaatcttttacagtagtttcccaaataatctcctgtttcttcaagccttgcagctggtttaaacccaggtagagggagatctataccagtgattcgaagcaaaggagggcctccgggcctcattgagaggcgctggataaggctaggccattgaaaaccatttaaaatgccaaagtgaatgatgtgaagagtgtttgatttctcagctaactctaagattgtatggttaatgaaaaagttagataacttgatgagaggacaagctgaaagaaacagtctccaagatttcaaggaggtgagaattgacattcttttagtagagagtgctgtgtataactcattcccaataccattcaatcgtgcctcaagtgcattaccaaagtagtgagttagtctctgagatccattacctgaaatagatgtgtttctcctaatttgaagtagtaattctgcggctgtgtcacgatcattgactgctacagcttctgcacaatgagtgagaagagttctcaaatcaagcaaatcttcatcacatcctgcagcacatttcctcttcctggtttttgcaatataattactagcattagacacttttgatgatgactcgctcatttcacatttttcgagttgattttcccaaccattggccagtaaaaccatatcaaaagtttctgcatatagctcagaatcatgatcagtagaattccctgccaataatctcttgtccttcattctagccaaagtctcaatcccaagttggcttatatttttcattttcatcaataatccactattattcaagtgatgatcatattgacaatttttaccttcaaaatcaaaccccattttatgagcaaggtgggaagtagttgatgaaatgagctgaaaattgttgtagttgatcatcatattgttattggaactatatggttcgtgaatagtactactgaaatcatcattaagcaaaaagggtttgtccacattcttattagcagcagtactaaaaacattaaagcaatgatcacagctattgcaattgcaagaacgagtagtagtagtgttatgtactgtgtctaagttaatcatgtgctgtgatcttgatgaataattactacgtgaagcattaattaaccgttgttgttctgctgagctatgttttttctccgcaagtgcatcagaaaaggacctttgagcagcttcaacagtagcatctgagaaaaaataggttccttcttccatgtcttcctccaacagaatcttgcttatgcaatttagaggatgttcttcttgatgatcaggatgccaagtacccatgatctctgcaaaggtaaacctatatagagaaccatgaaataaacaatgtgttatatatatatgaaaagtaattaactttattattatttgcataaaagtaattaggctatatattaaactaagttttttttttgttacaatttataaatgattgaaatatacatcatcagtgtaaaaatgctagagtatatattgtgtcaataataaacaaaactttaattttgcgtaagaaaaaagagaagtgaaattaataataatgctgaaaactaaacttggaaagacattaaattaattcagcagtagtaattataataagattaaaatggccttacctgttagaaaacttagtagtttttaattgagggaggtgtgagatcgagtgaggttattgttagaagcaacaaaggcttgtgtatttataggaataagttggcccacagaaatttattacttctgccagttgtgattatacaggcgtacataacagtatcttttgatcgaccatgtcattgtcagctgtacgtaacagtaaatatacgctgtgtatttggtttcacatttgcctcacttgtatatttaattaaattatatatactttataaatattttttatggtattagaagtcaaactcacaaaatcgtataacacaagtagcatctgtgtttttagcaacatatctcctactttgagacaagtaggtactacaataacaatacaataatccttaattaaagactaaagcggttacaaaaaccaaatttaatttatatatgtgtacatcttgacctggacacactattattagccatataccaataattaacttaattataatatctgaaaattaaggacttttatatattcagaaacattcaacaagccacgtagaaattatgaaaattataatggtatacgtacctacgtaaatgtagatgtggtatataataataccacacatatatgatttatgtagaaggtttcattgagctactccaagtttgtagatataaagaacggttatatattatattaatttgttctgattagcatgcatatttgatattatatgaattcataattagaattaattaattaatgtatatcaattatcatgaagagagatgattaagagttttaacctacatattcatacatttatttacatgatagtactattgtaatttatataatggtaccagcggatacacatgggcacacacacaattttggctcatgaaaaatgacaattaatggagactcatcacaatcacagttttgttgttttccgtttccttttctataaaaccatagtactctatcaaaaattgtacaaaggaaacaatgacctataattgggctagcttgagagaaaagaaataaaacaattacttataattaaaagcttcatgtgaggaattagcagcagcattgaatcaattggagttaattattgtctttgaataaggcggcgccggctttaacctttctgatatataaaaataaaatctctgttacaaacagagaagaaaaaaaaaattgtaagttgaagtggcagaggcggcgaccctcctttttatttttttaagttgattttctttcgtcgtgaatcggtggtgacgtatagttaagtcaaaagccctgtgttaaagtaattgaccacagcaaataaaattgctattaagcccctaatcctattgttataatattggaatctttccttcccttgatttgttcacaaacaaaccaaactcagtttgactataaccaattaagaattttgtgtactaacaaatctactaactatctataattaataatcatgtttgcatgtacaattttcaaaaagtgtccacatatatactcttaatggtattaactatgaagttaatattagaaaataaaattccttattttaatattcccagtttgattatttaattaa

SEQ ID NO: 295676 - DNA, 5574 bp, Cannabis indica
aaaaatgcatagtattagttattattatcttatgaatatttattttattaaaatttggcaaaatttataaattaaatcttaaacaactgtcaaaatgatttatttctcagacacaaaatttggagtgttataaaaatatgagacatagtctgtaagatgttaagaaaaacacattgtcataataatttaaaataatttattattattttgtagaaattaaattaaaattagaacaaaaatatggtttctcataatattgaaaaagaaaaatataaaatgtgtttataaacacactctacttcccaaatctcgtttcttgggccatattttcacgaatatcaaggaaattattacattatttactgttttacccttacacaaaaaaaaaaaaataaaaaataaaaagttgtcttattatttatttatttatttattttctgattcttattattaatataattatttttcctccttactgatttgccttgcttcatcgagcgagcgagtccaaaaacaaaaagctacaaattttgatagtttgcttcttcgatctgtggcctcatcttcttcttcttcttcttcttcctcagtctcaaacaattcgccattagagaacctcaaacaagcacgtaagaactaaaaccaagttttgggtttcttttgtttttaacaaatgagaaatatttgctccactatttgttttttaatctttgttggattcgtttcttcaagtgtaatcatgtgatctctaaattctcttaatgggttttcatttctgtgtactatgaagtggtttttaacccttattttgctgcagaattttgggtttttttttccttctaattaatattgccatttttttttgttttgttttgtttacttaataaatcttgaatttttattctggggaagagaccaggttcattgggtttggattgggatccatgttggatctcttggtttttgttttattgttgtttattaacattgttgtttggtttctcttttttattattgtttctgctaaactgatctcgaattttgtgtttttttttctttagatttttttgtgttgtcttggggttgcttgccaagaggggataagactttcccacattttcatatgttttaaaatgttggtcttctgagttgggttttcatgggttgaacttaatagtataatggatagcttcagtgaagatgatgaaaatagatattttgatgcccaagaagagattgcttctatttctgatgcaaattctgacagctttgattctagttcacattccaaaaactgggctttggataattcactctatgatatttggaacaggagccctggaagtgttagggagcgtaggaatagttttttcaagtggatggggcttgattccaaccaagttgggatgcttcaactttcagaaacagagattgacagagtgtgtgaggagagtgaggctgtgttgagatgttcaggtattgagaatgagttctattcgagtcgatctatgatgtcgtgtggatcttgtactagctataattttttggataggtctggttcaaaggatgagtttgtttgcagaaatggaagttttggtggtgcaatggagtgtaatgtggaggaagtgggtgagtatgagaagaggagtgaatgtggggaagttgaattcgggcggttggtttcaactgctgaatcttggagctgctctggctcatctcctaatttgtcacaaaagatgagggatttaagcattttcgagggaacagcgaagagggttaaaagtatgtggttgaataaattaagatccatgacttgcattgttgacagacaaggagatgctgataaattgagaccaaatgatattgatgcatatctaccatcaagggctcaaagagtcaaggttcgccaatgcagcaagcaatcaaaggaactttcggctctttatttggggcaagatattcaagcccatgaaggttctattttgactatgaaatttagtcctgatggaaagtaccttgctagtgctggtgaagacggggttgtaaaagtatggcaagtagtagaaggtgaaagatccaatgagattgacattccagaattggacccctcctgcttgtacttcacaatgaaccatatgtcagaagtgaaaccacttaaagtggataaagataaaatgggcagatcagcaagcttgaggaagacatcagactcagcttgtgttatttttccgcctaaagtttttcgaatattggaacagccattgcacaagtttgagggtcacatgggggagatcttggacctttcctggtcaaagaataatgtaagtgattatataatttatggttaagatacattgaattcaagcagaaatgtctttagttctatgaattagatattaaacttaattatttgttttgttttaatgaagtatctcttgtcatcgtctgttgacaaaaccgtccgattatggcaagtgggctgtcattcatgcctcaaagttttttctcatagtaattatggtaagcttctgtcatttatgttcttttattcaattatggacattttggtttaatatattactctagctgatttcattcatggcaagatccccagttcatgtattataacatttcaaaatttattttctcacaaatctttgttatgctgtcatgcagtgacctgtgtccaatttaatcctgtggatgatgattacttcatcagtggttcaatagacgggaaagttcgtatctggggaatttctcaatgtcaagttgttgattggactgacataagggaaatagtcactgcagtgtgttaccaacctgatgggaaggttggtatttttttgtttctttaatctctttttctgaccttaaaatgtcaatgcagactctgatctttgaaatggctcgtatttacaagctttatttgtcctgcagggtggaattgttggctcaattgctgggatttgtcgcttttacaacatctcaggtttgttttctgctgaactctcgcatttgtttcgaaagtttaattgtggttagcacaacttttgcttaaagttaatattgaaggattttacatattctttttattgattttctttcttgattgcttaaaatcagataatcaattacatttggaatctcaaatatgcttgagcagcaaaaaaaaaatcagcctccagaaagataacaggctttcaggtagttccttcttactctcttgtggtttcatatgcagcttttgtaatcaatttttgttttctcttaaatttataggaatggtttttcccttaaaggatgtattgtaactttttgttcattcatccagttttctccgcaagattctagattagtcatggtcactagtgctgattcacaagtcagagttcttcggggagtcaatgtggtcggaaagtatcgtggtatgttaactcttgtccttggaacaaataatattctgtcgaattaagttgagaggtttcgttttttcatccgcttgctaaatggcatctctccatatttctgcagggccacgcaattcgggaaaccaaatatctgcatgtttcacatcagatggaaagcgtatagtctcgtcgtgtgaagactccaatgtatatgtatggaactgcgttaaacaggaagaaactgttactctctcaaacgaaaaaagttaggacttgtgagcggtttttttccaatgcatctgttgcaataccatggtctggttttaaaggtggaaactcagacagaggaagtccatttcacattgtggataagtgtgtttacgaaactccattgatttcttcactagaaagtttttcgttaagccaagaattcttcttggagtcttttcccaaggcatctgcaacttggcccgaggaaaagcttccgatgtcaaaccaggccatagaatctgcaatgcacaagtctcaactgaagtttctgaaagcttcttgcaagaacagatttagttctcatgcatggggtatggtaattgttactgcaagttgggatggtcgtatcaaggcatttcacaattatggtttaccaattcatcattgacattttttcgggtttggcatggctttaagacattcctttactcttcatcgggtacctcaccatcggtcggtggctttctttcgctagctagtgcttcaaacatcatgtacaaaggattgaaaattgatttttgggcaacatcaatagccaaagaaagatttctttagtaccccattatagtaggcagcaggcatgtgcagtgtgtagaaaaatcttgagaatttcgggttatgtcttttttttccttctccaatggggtcccttctcagatttctctattgccaaaggtcaaattaagtcatggcaagtgtcaaaaatggcatggtttgttaatccatctctgtatcagcaagtggctgaggttagttcttctggataaacaaccaactttatgatgaaaactttttatttgccagttgaatgaatgatggattttcatttcgattatcaccgcgctcggagcccacaaagaattagacttaaagtgttttgcttgggcagtagtattgatgcagggcagcagtagggccttgtagaaaactctttcttttgttctcttaaagatgagatggaatccaagctggtggtaggagtttctttgagaagaaatggtggggaactttggccattacctaatgttggctggtctgaatgattaatatgtttgtctgccatttctgaccactcttcatggtgggacctgagctacacaacatcaagttttggctctgaagctatgtaaggatgtcatatccatccctctctcactctctctcatggcttctttaaaaactcatttggccatttttcactgagaaaacttctagttttcagagcaattaactgctactgctgcatatattcatccatggctgacctttgctcttttacctttagatcattattgcctaacatatgtatctactcagttataggtttagtctaacatcaaccacttcttatggttttttgtttttttttttaataaatagatagaaaaagcatatattatatgatggagatttgtaattgtaatttctggggagtaaaataaaatatctcatttagcttttactgatgtttaagttgtagatttttatatatacatcaatgtcttcaatcatattaatcacatatatatagatatgtgaaatctttgaaatgacaaattgtcctaaaccaaactttgttctttacacccaatgtaggtcatatgttaatgccatttgttgggtatctggtgtactaataagcatgccatatactaacatgtactaaattattaccctcaatttgtactgtatatatttgtatctatatatataaatatttatactcgtttaggtgcatcgatacatctcatttgtgtttttgacgagatttaaatagttttaatcttaatcttttatatgacaatatacaacatagttatataaatattttataaaattttttgaaaaaaattttctaaaaatatttaaaacgtttcaaaaaaagtataagttc

SEQ ID NO: 295677 - DNA, 5115 bp, Cannabis indica
tcgcttgaccttcctatttggcccctcctcggttctttgtctggttccgccactgcatgagagtataaagacgggagggttaggaaaaggagggaaatttccaatggtcatcaagatgttgagttacttctttacttagaaattatctccataagagcaaaaaaagaaagtaaagccaaaggctttccttgcctcccaatcccatcactgactcaaaagaaagtcatatcccgctttgatgatacgtttgatcttaccgccccacccccaccccacccttaacattgccattgccatatcgaataccaacaaacaagtgatgtggatttttctctactaataatgagagagagaccagtgggcttggctgattcaaaacgcaatcacaggggtgtgacaaatcatccaaacgaaaaggccccacctactccgaaaatacataagtacacacatataaatacaaatcagaatcagatcactcaataatacagtccagctttagataaatagaaaataataatagtagtagtagcgttcatcatccaagtttaaaaaaaaaaacaaaaccctaaaatccagtacactgcgcgtgttcacaactgataagagatgatacgagagagaatgcggcaagaatttctcatgcgttagggagattggaaactcacacgtttaagagtgttcctgtgaggtgtgtgtactttcttcgaacacttacaatacttcattaatgaacctcactatcagttttgatcagggagagagagaatgtcccactaagtatatgggaatatatggtccatgcatattttggcatttattacccatatcacattgttctaacaataataataataataataaatttaaaagtcaggtgccaaaacaacacatctgaaaagaacaaacacttagagagaaacgaagattaatcagtctgcgcatttagttctcaccggctacaacttaaactatcatttgaatcaaaatagacgaactatgttcctttaaagagttgacaccagctttcacttctctacctgtggtgcagaagagaactctatgactaaagaccattctcgacctccactccaagatcaatctctccatttcttaacttaatgatgaacaacaagatctgcggaaattgttgcagctttatcaaccttctaagctggtggtaacaaccaccctcccttctcttctagcagccgttgcttatgatcaaatgaatatgaaagcaaaatagaaaggtgaaaaattaagaagcttacaatacaacagtggatgatccaataataccatacaccctcaacatttgccccttctctgagtcatcaggaagagaacaaaaacattgaggaaaaagtgatatttctaaagtgctcttttcgatgccatgctactttacttaccccgtgaatgtcactgcaaaaatcctgttcaggaacagaaattgttagctcattttttgtaattgcaggaaccacttgcagcaggcttatacaaaagtcacctgcagcatttgacctttcccacaggaaaagttccctaatttcttcgcaattcaccatagggaaacttgaaccaacttcttgtagccaaactcttagaggatatcaacaaactcaggagtatcatcccttggtccttcaagagatcgatacatgtataaaatttgaacattatcacctggttcatcatcgctgacagcagtcattagttcatctctcataacttcaactaccagccgaggcatttcttgagcaatctctctacaaccctgacgggttagcctacatgaagacatccagagaaatctcatgttgtaataatgatgcaagccagagcgcagtgctgcatctccaaatgggctatctctgatctcaagcttttgcagtttaggacagccctctagcacatatttcagcccattatcactatcccccgcaaaagcaacagagagggttcgaactaatttcccatattctccaatataactgaaagctcgatcagtcagtaatccagatacagcaagtcgagtcagcttcttacagttcataacaatagctccaaacccttcatccattggttgacctgtcacatgatctggtcggagtcttcccattatacagagacgaaatacaagcagatcaggacagttctttgacatggccaccacagctgcattagtcatgcgctgacagaagtacaaaatagattgcagtttcctacaaccttcagaaattgcttgcaaaccaacctcagaaacaggtccctcaatatcctcattagcatcaaaagggaaaacccttagttctcgaagttctttacaagctgcggcaactgcctgtagcccttcatcacatattgtatcaagaacctgcattgaggaaacgttagtttcttaaaagccaaatcttttcacaatgtcactaaaacatcacagagcttctggcacatacccataaagtttgaagcttgatgcagcggcttataactggttttagttgctcggcattgatatttgcatagctgaaattcagagaagtgagattagcacagactgggtagattgcaggtaagaactctggcatgatttccctgaaacctgaaagacaaactaaggatttgcaagccgcaaaagcagagacatagtctggttcctgttcaccctgcatcatgccatcagatgtgccaaatgaccccgtccctagatgtgtgagttgtggagctcggatcattatgcggtatagttgcccaatagaaagagactggttcagcctaagtttcttcaattgtggagacctaaccaccagagcctccaacgcctcaaaatttaccatgcaatctacacagtcgaaaatcagagattcgagacaggtatggctctctggaaaacaatctataaaatcttcttcatcgtcgttaagctcacattcaatcagatcaagcactctcagttgtctgcaaaaatatatgtatcagcttgtcacattcagctcgtcatttggttctccattgtaatttcacaatccatccattttagaccatcccattgagatagatatattcaagctaaagtgctgaactaaaaagatactgttttagggttgtaaaaaggcacagatcacagaagctatcaaagaactccaccaataataaaatcaaaacagatctaaactttcttcttgcacattcaccagatcaagaaaaacccacaaaaaaagcgttaaactctttaccaatgaactaataaaagtctaatacacattaccatgaacattatacaagcatctcacatggacaaaagtagcatgaaatttcaattaaaagctctctgcaacaatatatattattaaaataaaattcacagagaaatatatgatccagaatgacatgacgtacctgcaagaactggcgaccacgccgaggccacaagtcccaaaaccctcgcagcacacgagaacgagctccttgaatccggggaaggacttagcaaggtaagcgagatcctggtcagtgatggtcatgcgcttgagataaaccttctccagccaggggtaagctttggccatgaacgcgacccagggcgagaagtaggccccccaatcgcgcggcatgagattaaagtcggcgaacctaggttttcccttgatcgccacggaccgaatcttagtgaaccgagcagtggcgcgtcgtggcgagacagcatagcagtttccgatgtagagctccgatcgggtaagtgcctccgcccggtaccacgacttgcataccaatgaggcggcactccggtcccgccgagacgtaaggaaacacaagacgttttccagaacgttctccagtacctggtccgggtatggcgcctgtatctccaccgaagtcgacccggacccagacccagatatcccagaacagttccgggtcttggtcgaggactccgtcatgctctccgggcatccggatccgaacggtggagatcgatcgtcatcctcggacatttgggttgatgggtcctctatcatacgctttctctctctaaatccaagattctgtgatctgggttttgatctaataatcgaatggaatctctcctcttgtgcttcagatcacagttattatggggcttttgggagcaaatgggatttgggttctactcagtatgatgagagtgaagttgagagttcagattggggaataaggggtaaatgaggtaagggaggaagaagggcttgaggtttgaggtcagtttaactcataagagagactgtacagtacaagctctgctctgtctgtaagcattgggattctccatgctcttctctctctcatctgcaacatccaatggctctccacactcctcttccattatttgcggggtttattttttatcctttaccagcttgccttttttatttatttatttactaatatttttttaatgcaaaaagttatgggtttctgaattaacttgtttttttgtaaatgtaaaaattaaaaatacttatctctcattattttccagaatttagactatgaaaattatattatttaaaaaatatgcgtctccaaattattactctttcaaatactattgaacaaggcaaagttgatactatgtaggtgttacatgaattcaatgaatccaatattattataaggtaaagaagcatctgtattattcattataaaggtttaggcatatttggcttcttttcttttttctctttcattgtatattgtgtacaaacaaaaatctcttgtcttggcccaaaagttgaaagtacagttactccctcaccctcttttactttttatttgttttagagtaatttgcggcaaaaccccctcaactatcaatttacttgcaaaaaaccatccaacctcatattttggtggaaaaaccctccaaagtactgttccgtttacattttaaggtgccgtctgtccaactcctaattttgcccacgtggcaatgacaagtcactaaaaaattatcctatgtggccatattttacaaaataaaaataaaactttaagagtaatttgcggcaaaactcccccaactatcaatttacttgcaaaaaaccatccaaaaaactttaaggttgg

SEQ ID NO: 295678 - DNA, 10135 bp, Cannabis indica
aaatttagttggacacttggagctagcataagatggattttagagaccaactaataaatatcttgctagcttttcataaattttatgtagggttcaacaaatttataaccctagcttattaatatgtctagatacaatttttgatatagtggtgtgggacattttcaaaattgtctattaggatattaaatgttttaatatattttctaatatatatagtcaaatttatgatcatcactttgcataatatatatttagtacttgtctttatttttgcaaattgatcttagctacactccacacctatatccaccaaaaccttatttatatatatatataaatatataaaaagcattgctattatatcacagtgcttaggatcactatattataattttataaatagttcatgattattaaaagttaaaataaataaaactctatattgaattacatcagatataacactatatgtaaatactaagcataattggtgcccttagcatttacttagcatttgcctattgaaagtcattttatgaaaattatcaatatatagaaagctattcctcgaagtgtaatatataaataaaaattatatctttcacctacacaaatatcttcatatatataaactaactaataaaaatgttatttaataaaaatattttatctatgtatgttattttttttaattatttattaaataaatatattttatctatgtatgtcattttttttattaaataaatatatttgatctatgtatgttattttttaatttgattaaatcaaaagaacagagttaatccaatatgaacaatataaaaaaatacaggtcattttaatatttcccttattttttatttgaataatagaattattaataattttttatttgaagatcattaactggtaacctttgatgggtttaatttgtcaaatgattaattagttaatttggaaacctagtaatcttaacacttctttgatacttaatactagtcagtggtttattagactttttgttagggttgttgttagttaattttattcttttttattgtaaatgctaatttttttctctgacctatatatttatgtaatggattttcactacgaaaaatttcaattttagtcctaacaaaacttataactaagtaaaaaagctatgactaattataaataataattcatatgtgtgactaaaaagtctgtgaggtacgctgataagttgtaaatgaattattagaaagaatactacaactctaatttttttaactttattttccacaatgctcagtgctaatttttttgatattaacaaaaaattgagaaaaactctaaactataattacaacattaaaagtaaaatagtatactccaaattttaatatttataattatatatagataatttataaatatatatatagatatacaactagaatgaatagcaaagtttagacagaatatcctatgatatgtttttcaacttattgatttatttttttattggaatataatctaaattttgattctcttgatatcttcataatttgaatcaaaattttcctacaatttcaaggataaaatatttgtatatatagctagggtttgaaaattcatagattgaaacatgaattgtatacaaagcaccttttgactttggttttttctactttcggtgaataaataaagaattaataataggagaatatttattttatgagttagttattaaaagatcgtataccatgcctttggtccatgcatgcatatttaattactccaaacaaactcacgtgcttttctattgtcgactaacattttaattatttaacaatttgtaatttatttattatttaatttttttgaaagaattgtaatttttatttatttgatgagatcgataaaagaggaagaattttctatttgcaataagtatatattgtcatgtaaaaatattattaggattataaaccctaatgtaaataaccctaattaaaaagaaaatataaaataattattataactaacaagacaagacaagacaagacatgaaattttataaaagtactcacattagaagacgtattaaatacaacatttttacaatttttttttcgaaaaaacaaaaatatcggtaaatttgataaacattaaaaaaaaaaaaaacccttattattagtggcaacttttttagtcacaacataatttttcttgtaactaaatgtgattttagtcacaacaaaaagttacttatgaataaaatagtaattagatacaagttgtcactgatttagttttattcacaataagtattgtgactaaaaacacatttaagtgatcacaacaaattatgatttttgtaactaatacctcaaaaaaacttatttacaatttctgtatgtaaaactcatgtatatgaatacgataaatgctcaaaccaatgcatattattctttacaaacatactttggccaaacaaacaaaagatctacttttaaaagttccaataatcatcttcacaagtaaatcaattttaagaaattttaggaaccaaaaatttcatttctagctcttcgtaaatagtacaccaaagatgcaatacctacaacataacacacttttttgaattttctaagcttttctcgggatatccgaatcagttgctaaagagatttagatttagcattccatttgagccattttctcacctcctgcaagcatctcttactaactatacattttaaaaaacaaatgagcaacaatttctttttccaaaccacacattgttatctttattttcggatggacggtgacattttcaaagtataattggttcgcataactctaagccctagccttcgcgcatacaaaacctcgttcagatcggagatgggccttagcccatctaaactccaaaagccttgcctccaaaaatgaggcccctctgcttccaaaagcccgttaagccttccaagaggcgaaataaatgaagccctttggacaactgttgggacatccagaaaggaagtctaagaggtgcctccagaagcgtcttgaagggtgacgtggctgccttctaacacttggtcctaccaaatcagatcatattccctatgttagaacataatagtgcgtgcaccaccaaatggagtatttcttctttgtctaatgacacctatataacattcttgtctactgtagcagcacttgcacgtgacagttgtctagaccgtgtgggcccatttgtacaaaaaccttcgcccacgagctagaatctttcagtgggcctcaaaggcatgtattccatgtgtttaccccatagtgggcctattttgcacaaaaactctaaataggtcataggtatgcccgaatttaagcctataaaatcccctttatccttttatgcaagggggacaaaagaactttcaggttctttctaagctttcttcttgtaagaaaaaattaaggggaaaacattataacaagagttagagttttttaaattataagatctatttgtaatacatcaagccttcataggccaatacattaactcgtggaatagagttcattaatacccaaactacataaaaaatcactatctcttttattttaatagccatttaatttcttaagctcttatttaatttaattttgaaaatctcgataaaaattttagtactttcattaagagctataaaaaaaattaaagctacctcggatctgcaaaaatggtggctaccaggaagaccgtcgtcgattaaactcctcttctaggtctggatgtcgtcatggatgatgctaattcgttccttccagggcacgccaagccgagcaatttgagggacagagaagtgttcgaagttgaagactgaacgactgaaacaacccagcgtcgggaacaatttattgagaaaaaactaaaaaatgaggaataggagagagaagatgacgatgaaatcaaagatggatcttacttatcatgagcaagaccccaaggtaatttgagtatctagtgagttagttgaaactcaaagaaagctactagaacaagaagctttctcctgatgaatggagaaaatgatggcacggctgcatgcgaaactcgacgatacaaatgaagactctaaagaagatactcaagaggagcctattaacagggaaaaaagagcaaatcccactaatgttggaacctcagctcctataaaggataatgggaaagcaaaggtaggtgagcctcatcctaagactatcccattaaaccctacaaataacgtgaacacaaccaaccagcccttgcagacaaagaagagaaaattactactctgacaaaactggttcggaatcagagtggagaaatttctaacttggaagatgaagatctataaccatgtgtcaagcggatcatcgacgctcaacttttagaaaatttcaagatgccacagatggagttacacgatggaaggacggaccccagggcccacttgtctaaataaaatcgtctcatggaattggcgagagttagtgatgatgccaaatgcctttatcttttattaatgttaaccaagtccgctaaggattaatggaagagactatctcccgaattgatttacgggtggaaggagttacagtctacctttcagaaataatttatcacaactaaggattatgacatggaagtcagatccctaattaatctcaaacagtaactaggcgaaagcctaaagaatttcatccaacgaatgatggaaatagtgaccaaaaataaagttagcgatgacatgaagcttgtggtcctctagttcagattaactgcaagctcctttttatctaatttaatgtctagggcctaatggatcatctatttggaggattcttatatgcaagcaattggagccgctcttgtaccagcaccacctgatgcaacacccatttaccactcccagagtctacgaatccgctgcctccaaatatgcactgacacatactaatttctctggatttggggcggcacaaactagatgcaatatcgctcttaaaaaatcaacgtataagatggaggctctgaaatcaaatgttagccattccaaaaataagaggggtggaaagaggtagaaccagattgaggctccaaagaaaggaaggaaagaatatgaacaaaaatactctgagtacaccaatctgatcgataattgggagaatatctacagggaaacctataatatggtccagaagcctctaagaatgttctaaagtagaaagtagaaaaaagactaaaataagaaatgcgagtacacaccaccaacaaatgtgactagctacctgaaggatgagatagagacattaattagagtcagacaccttggccaatggatccaaactccgatcatttatcccgaatagtgtatagctgacggatagcttgtcattttgagacaataaggagttgtatattttccccagagagtgggtctcccttaagctcatggaagacaatttttggctttacttgctttgtctcacacgctatgatagaaatcctagctctgggaccaaaaaatcattatcctctagggttagctccaccacctattgacagccatgtcgccactatctctggaggctcacacctcgctcgaaatactcgcattccaaaaagagatatttgaacaagttggaacatgaaggggaagtttgtgcttttgtacaatcaccggcctagcacatgcgtgaccctttggttattgaagcacaaattcaaaataaaagagtttccagaacgttagtagacaatggtagttgtgttaatattttttttcaaatttgctttccaagaaattggattgactgaagcagctctttcaccttgtctaatacaactacaaggatttaatggagattccttgatgttgaatggaaaaatctagcttccagtcaccttgaagggggaacataatgcaaatgccttcaagcactgcatgtttatagtagtggattatcccactgattacaacgcaacactaggacgccctgtgctagttgattttggggcagtcacttccatctgacacttatgcatgaagtttttatgtgataatggaagtgtgggagtagtgtgataatggcatactttctctagcttttcctgaatctccagcaaggtgggggactccaatgataacctaaagatgttcttccaatggtggaggcattaactggtttttagtgttatctgtttgggcggccctttgttcttggtcagtcttgacatatttttgtaagtgcgagttatttttcctaatgaagaatcgtatttcttgcttcaagttgttgcattcatttgtgttgtgggtgtagtccgcatgaaaatgacagaacttgtagtatcccttttgctcatgtccttcttcataggagaaggttctctatatggcaccatggactgggtggttgcaaagattgtctctatttcttctgttaggatagtaagtgcagtgaactttgaggcattctcttgaggatgttgttcggagttgccactgaacctgcttttctttccattaccctgcatgttgccattgtttgacctctttccaccttggtcgaactgctgtgattttgtaaattttggtctagctggatggatgtattggctgcagtggtgtgttgttgagttttcttttgtctacctatatccacaagccaaactacttctttgagccttaaaaatccatctgctcggtccaagaattctgacattgacccacaattagtcttttttatgtctttcccagaggtttaatacctcctagggttacggctagccttccttcctcggtaagtcctttaacctttgtagcttcagtcatgaacctactaatataggtagcacgagtttccttatcacgtttttcttcctcaggaggaaccttcaccgacatccaagaggaatatttttgctcatgtatatccatggtggattgatctttgccaagcagaccacatgccaccaagtttggctcataaagaagaaaacttgaagctctcatcccaaatggcgattttactaaaatttgatggtgagtcgacacaactttagaaggagtgggttttaacatcaattttgtcaaataaaaaatgaatattaagataaaaataagcacaagtaaactcattgtaagataaataataaaaatggattatagggcatacgaggcttttaaaaggttgtgtgggcacaagggtgaagacctgctgtctagaaaaattgatccttatattccttcttttttggaagatcaacaataatcctgcgatcccctgtaaaagtttcgagataaaagaagccttcagaataattttttctcgctggacttgccttgagggtatacatacaagtaatcttgtatggctcgggacctttccaacccatcatgtggtataaagacctcaaagaggccaaaatcctataaccattggagtttagttgtaatggagcgatctagacataattgcagtagtccttaaaatagctcttaaaaggaaggatagccccaacatgtatgtactcaatactccaagccccaattttcattgaaccacttgtactacactcaaaattattagtgaggcggctaggtggaaaaaaactcttctcgtccttttcagttgattggaaaataaagccactaccttattcaatatcgtattttgtaaaaaaaaaaaggccaacatatggggccattaaagtcacttttgattcaataagttcagcctcaaactgcactaaggaattttggaaaattttggtttgcgagcttttggtggggccatcatttggaaatctaaagcacttgacgaaaaagcaatgttaacaggaggtaggataatgaggctgtaggttctcgtaggaaggaatgtttaccctcaataattttacctatgaatcgtctaaatcgagcagaaatatttaacttgtttaattcttcagtctgatcacgaattttttcatcatttttctcaagttttgttttagtgattactaagttaggattgaaaggcagggcaaaagaaaactgaatttcgtgatctaaacattcttggttttcaaaattagagttaaatagattcattttccctcttttcaaaagaagaaaaatgtaccaaaaaattctatgtaatttgaaaatataaaaatctaaagtcataaaagatcctaaaaatcgctaaaaaaaaccctaaactagcccaatcaagataaaaatcctatttaaaataaaatagaacaacacatatcataagatttaaactaaagtaggaagagcacatacctggtttggagtttgatgatgaactggatgaagtttttcctagagctcgacgaatccaaggctcagggataaaacatttcttgagttttggaaaaatagttgcagagatgcggagaaaaaagcaaagagacagtgagggcatgcaaaggggatgtagtcaattttgtgcttattgtacttgggtaatagtagtaaaaatagtggtaaaaaataaaattgataggtgttttcaagcaatattgtaagcaccgtacgactaaaaaagatgtttaaccaatggtgattaacttacgagtcaattaaaaagatgtgcatttattaccaaaaccatgattagctctttatcgagaagacaaaatttaggtattgggtacacagaggacaagtggaaacagagatttaattttttttcaaaacataaaagaaaatacttttagggtaaaaattattatgctcatattttgagtactaaatatggacataacacgtgtcatataagtctaaaaattgaaaggaaataataaaatgaaaaagaattgaatgaatattctgcctcaggtatatatataagctgcgatttaaaagatgtgatgaccttccgggatactattagtactatggcttacgaggatgacatgattacaagttaaatcctcgtgactagaccgaggtaaaggaggcaagtgaatagtaagaaagaatgagtaaaatgaaaatggtagataacgagttctctcagagtatgcaactcattgacctacatacccatgagtatgttgaaagactaaggaaaataaagcataatacaacttaattcaaaagactaagtctaagaattgccttagaaaagctatagtgacgacacacacttaaactagcatctcccagaatacaaacaactatccttaaacatcgtcgaataatgcgagccataactggaatgtgtcatctcggcaaaagcaaactgcttccagataagatcaaaaactggttatcaacagttattccattttatccacatgttgttaatatgaaacatgtggattgtccacgtttcatgaatgattacttaaataagatcaaaagagaataactgtcattcctagaacccctataaatagggacagaacttagggggaaaggaattgatcattttgtgaaggacaaagaccctatgagaatgagtgaatattcatatttattcttctgtactcaaaagttttttttcgctagaaatatccagaaataatattgactcgtggagcttgtagatttaactacaaaactacataaaatactctgtgttatacatatatctattaattataagtattaattctttatttacaagacttcatttattgttaacagaaatctgagttaataaaaacatatatagatgtattaatattttttttttaagaaagtatattgtagaattttttttataaaatacatgtggatgaaaaagtgaaaaaactaaaagggaatatactaagacggacccacccaagggtccatgttggccccaaattgtagtgaatttttatttttgtagatttttctaattttcatcaaaatttacagtttggtcccttttgtaatttttcttccttttgaccctcactgttaaccaagtgtaaccttttatataaggatgggaattcaaacgtaaaatatttgagattgaggacttaagtgctaaaagtgagttaggatggtcttagagatttttgttgtaagccttttcttaactttagaactcattatattatatataattattttaataa

SEQ ID NO: 295679 - DNA, 2900 bp, Cannabis indica
gctacccaaatgatcgccacctgaaagatctccctaccatttggattactttcttaggagctttgaaaagagaaacataatacgtaggaacgggaagacgaggattgattgtactaagtattagctaccccaattgacaaaagggtgcatttccatctgtcaagcctcttagcacacttgtcaataattggctctcaaagccccccacccttggcattctgagatacttcatcggccagctacccactttcaactgaggaagcacaatgtaacaccaccctctcatccacataatccaaacaattgacgcttgctcaagttaacttttaagctggatatagcgcagaagacttcaactatccttataagcatctgaagtgattttttgtaattgacaaagaatagtgtcatctgcaaactgtaaaaggttgacttgaaccttgtcttttcccatcgtgaagtctgatagtttacaatttatcggagacaattgctttatctactatcctccctagtacatccgccaccaatgtaaataggacaagcgaaagtggatcgccttgtctaggtaccctagagtctttgaatttatctattggtctaccattaatgaatatagagaatgatgttgaagatagacatcttctagtctatttcctacaagtctccccgaaacccttcttgctcatgaccaagtccaagaaatcccattatacccgatcatatgtttttttgaaatcaattttaaagaccattccacttgtgcctccacttctgcaatcttcaacgacctcgttagctaccaagacaaattctgaaatctgtctcccttctacttgttacgttatttagaaaacattattaagacttacctaatgcatgttgttagtttaaatatgtttataagtcactagtgcattaaaatgtatagatatgcatgatatagtagttaagcttgcctttattatagtcaaatattttacatgtaggatttcacatttacgcccatgtgatgtagttttacatagacaaacgtatgatatggaaatatgtggaaaatgtgcatttcttgtgaattatgtgaaacatgtaattttctatgctagtatttccttgttggatttagaagctcttttatttattatatgcaggcactaacaggtagagccatatgtgtaagatagttagttgaggtcaagcagtgatgtgtgtgtatcaatgaatgttatgtgtaaagtagcgtgccaaaaatattatgcaatgaatgttgttcaagtatttttgcattatcactttaaaggttgtaattgttgttttaaaattgggtaccatatttgtcacttttaaataaaagtgcaacatctaactttggcgcgctattgaccaccctcaactataagaccctcacgtaatagttaagattatttatttaattatctaatctttttaatgtttggttttttttttttttacttgattgtgaagaagagatgtttgcatagtgtggataaggatttgtttcctgaatccttttggaacgggacagacttccccaactggtggttgatagattggacaggagaggccctttaattaggatgaaatatgaagcgccattttcgagtgagacagtgataaggcacctggaccaaatggatttacaatggctttcttcaagaagaattaggaagtaatgaaagaagattttgcaaaggtttcctctgaatttgaagagaacggggtggtaagtcagaatattagtgatacttacatttgtctagtttcaaaaaaggcaaattcatgtaagggagaaggctttagaccaatgagcttggtaactagtctttacaaggtgatctaaagcctatccatgagattatgagacatgttgaaagaaataatttcagaaaaacctatcttccacttgtcaagttaccgaagaaaagaatttcatggtataaaagcaccatgagattgtttcatggtataaaaacatcatgagattaacattcatttatcattcaattaatgttaagtttttggaagaaaagaaacctatcttccactggtcaagtctcacagtcactttcccaatcacgagcacagaaaactatgtaaagtcagaaaagaatgacagaatggaattaattttattcagccatttaggcgtgtttaaatagaaaaatacagagtaaatgctttacataaaaatagcaactaattgatcctatcttatcaaaaacagattacagctattaaaaaagattacagctaattacttctaaatctaatagaataaaaaatactaaataacaatcctaataattactgttaatattctcgacacccctcctcaagctggagaatagatattgatcattcccagcttggatagaaacccttcgaacatagcagtaaaaagtcccttagtaagaacatcagcgagctgctcagatgatggaacaaagggtatgcatatatcgccgttttccagtttctccttgatgaaatgtcgatctatttcgacatgttttgtccggtcatgctgcacaggattctgagcaatattgattgccgatttgttgtcgcagtacaacctcatcggtttatctccttcaaccttcagctcctctaagatcttccgaagccataacaactcacatactccttgagccatggctctgaactcggactccgcactgcttcgagaaacaactggttgtttcttgctcctccaagtaactaagttgccccagacaaaggagcaatagccggtggtagatctcctgtccgtagaacttccgccccaatcagcatcagtgaagatctccactcttcggctcccattctttgaaaacataattcctttacccgggcttcctttcaagtaatgaagaatc

SEQ ID NO: 295680 - DNA, 3010 bp, Cannabis indica
atatatatatataatttacaaaattatagactgccctacgtgttctcttgttccattttttttttcatatattaaataatttaatggttattttttacgagggttgattttaataatttaagtgataattaacgatgaagttggttcttctgactaataatgacattaattattgcatggctgttatttaggtgattgttatgagaactgttggagttgccgataaagcaatatttcgcgtatgtcgtacaacttctgccgcagcgtcgcgtgttcggaccggagctgaccgttttcggttcgaaccaactgtaaatggtacaaaacgaaccgtaaccggttcgttacttcccggttttcgactctaagccggttcacttcgttccttagattttctaagtgcttttgtttacgcatccgtgacctcctcgccgattcccggttcgatatcatccgcctccgtttacgctcctccaccacggaaaccggccggtccggacattctaaagaacgtttgggatttgaccggttactgttcgggtcgtccgaaccggaccctgacccggaaccggacatgatgggttttggcgattggggcagattatcccctgaaccgggcgagttggacgtgtattcgggcggttcgggagttgggatggtagtcgtcggcaaaagatcaaggtaataatcccagggtgtgaatcctccgtcgaaggacggaaatgggtttcctagaattgagtcggaggaaggaaacatgggtggaaaagttgaaatcatggttaaaactatactatactaagtagcttctttacttaaccagagtttctgtaataagtatagggagagagagaagttggggaaaagggactaagttcagcccaagggcctcgtatttatggtcaatgatcacggtaccaatttagtaattagtattctatgctaggggtattttcgtcataaaccgtatgtgtatataaacctgtataagtacatatcatagcttttgagtcaggtggcactatagtagggtccacatgaagcgagtttacttttaaaagcagtgtgacatattgtatatgggtccctcttcttaaagattgagattttatgtttttaagcttagtcatgaagaaacaaaatcggctgggagccactatatacacgtgtcctcttttggtacgaagttcatgaatgtagccaatagtatgggagcatgatgacgtggaaccacgtgtatggctcggctaatacagtgtagctttagccgagccgtttagcccgtagacatgacaaaagtcattgccagcgaccagcaccaactaggttcgtgattgaccgatgtgggattaactaataggttagtactaatatggattgattctcaattaatatagctgtgaaaattctgagttactctacagatgacgtcttgggtggcttttgtttaattatttgctaatcagatctttttcgtggtaaaaaattctagtatccaaataggcaatttatacccctcaattttagagagataattaatataatataacaaagaaagtgattatcataagactgttttttggtgatccaaagtaataatatacatactttcccatgaaaatccccaacctcaaaatttctatagcactagggaatctatgtagctcgctatagaaccatcatgggctacatagaaaagagagagagagaaagagagaaagctgtcaaggaaggaaaaattaaaaaaaaaaatagtgaaattagaggcaaaagcagaaaataacttaagccaaagatggatagcatgaggccgacacttgaaaaagtattcaagctctagacatgaaccagaatttagagtacatgggcaaaagaaaaaccccacatttttttaatggtttatattgtctagttcacgatccaaattccatatcgtacaaaatgttacagctttgttctttttttaatgtattaatgtatagtttattggctgaatattcttcggttaagttccttaacggcaaagcagcccacgaccactatatactattcacagttagattagcaaattaaagagaaaagaagatagaaaaacaattgaaataattaatatgcaaaagatagtactttgagagtaggccttcttgtgtaacatgtttattgtatataagataagctaattataacctcatttgtggaagatgtttcttcttatatcccaacctacttaatcctacgtttttgttagtttactaattctttctaaagtttaaaactattaagagattcgagaaatacttaaagttttcaagccaaaactataggaattttaaaattgaacgacctagctaagtacttttgccttaatgccgtcctatggtctaattacaaattctgactttagttttaacttttattattcaatgatcgtataattaatctaaaattattaattactttaaaaattagttctatttttctcaaaaggaattttctcctgtaaaatattgaatctctaaaaattccgtgcatgcatgcatgttgttaactaattaatcctaaactgcaagtatgtcagataattaaatctatgaatatatatggattattgagatatatattgaaaactactatacataatttgtaaagtaaaatgtaatataatggatctaaatgctttttaattaataatttccactaatagagtacattaggagaagagattaggataatgaaaagtgactacataaaagaggagacattgtaaccaaaaagagatttggcgacactacttttttgtttctttggaatggcgtgcatgctagtgcctgctggggaataagaacttgttcttgaccatgcccatgaatcacatatggctaaaaaaatacatatccaaatctttacatattgagttatttatacatatattatacaaatttttatataaattgtatgtatatatgtgtcgtatttgtggatgaaagtgatggacatcaaagaaaaaaga

SEQ ID NO: 295681 - DNA, 18470 bp, Cannabis indica
aatactaaatacttcaaaaacatgtattggtttgatttggagtatttggttgtagctttatgataaaacctcccatctgtatcaattgtgcaagtaggggtcaaaaggtgattgagtttggtgacttgtgagcagggggtaacttagtctttttatatctgaactttgaatagtgagttggtgtaccaaggcaggggagtcaatcttgtgggggtgagggaattgctgatgtgttagtgactagagctttgctcttgggagagactaggcctctcgaattgcctacatcattgtaatttatatcaccttatgctcaagtttgaataagtgatctcagcacacttttcttctctattctgaatatttctctaagttatacaaattttgccaacatcttgtcgtcttatgtattctttctttttaaattaataatcttcttgtttgttttagaaaataaatcattctttctgaattttgatgatgatgtgtatttgggtttatgttcttgtaggggcgtattttggatgcttttgtggggaaattcagtacttttaagcgaacaattcctcaggtaattaatagatttcacaaactcttcttatacattaattcttttagctgatagactaagaatcaaaagtttagatttattctaggcttttgtgtcatgttgaattgagctatagaaattgttagcttctgttttattttatatgtagttcttgtaatggatggtttgctttgttaccacggttttccacctcacttatgggcccctaataaaattgggaggaggttagtctaagacatatgaccttttgtctctttttcattttttttctttcagctgatctagaatcacatgcaataactgccaagtagattaatgcatcatatcttgcccataagtgagttatgcttgcaaataaagattatctacaatcttcacgtttgatattttgtgttaaatgttcaatttatttattgagaggttgcgatcgtgtactacaattattttggaaaaaatcatttcatcttgttttatttgttttccctttctttctttattgattgatagctgttggaagagggtgaggatggaaaggatcgtgttaccttaaaggcaaagctcgagcttccagtgcaggtttgttgaacaattttattttaaatattcatcatgttattaatttatccaatgttacaatttgcttgagttttaacccgataagcgtatgttcattatttatatttacatgagaataataccaaccatttggtgcctttcctccctcagtattatatcatatcagattctattctctattctttatcatcaaatctgaaataaaatgtatttgcaggcagttttgaatgtgcaggtccctgtggaacactctaaggaagtgaacgattgtaagcatctcataaagacattagtcatgggtaatggatccttaacatcatattttattataatattccgaattttgggtcattttatttatttgcttatttggttatgtttgacaaacaaatatttgcttgtcaggaatgaagactatcatatggagcatcacacatgcacacttgcccagggcacaggtactgtcatttttcctttggtacctctcataagtggactcaaatattttttttatcttacgtaatgttgctgatggtttaaggtttctcctttcgtgcatggaacacaacaacaggggcttgtttctccagctaatttgcaggcgcctcaagccttcaaagggatgagagaagatgaggtattacactcaaatattgtaaattttttaaattggtttcaaccttttaagagatgattaatttggtacatttaacattgataaggtcttgaaggcctcgggggttttaaaaagtggtgtacattgcttggctctcttcaaagagaaggatgaggagaaggatatgcttaatctcttttcccaaattttggttattatggagccccgagatttgatggacatgctttctttgtgtatgcctgagctgtttgactgtatgatttgcaacactcaattggttcacatattttctacccttttgcaagctcctaaagtttacaggccattcgcagatgttttggttaattttcttgtaagcagcaaacttgatgttttgaaaaatccagattctccggcagcaaaactagttttgcatctttttcgctttatatttggtgcagtttccaaagcacctccagatcttgaacgaattttgcagcctcatgtacctgtaattatggaagtttgtatgaaaaatgctactgaagttgaaaagcctctaggttatatccagcttcttcgattgatgttccgagcgcttgctggttgcaaatttgaacttctactacgggacttgatacccatgttacaaccttgtcttaatatgctcttgactatgcttgagggtccaacaggagaggacatgagggatctattgctggagttgtgtttaaccttgcctgcacgtttaagttcattgttacctcaccttccccgtcttatgaagcctcttgttttgtgtcttaagggaagtgatgaacttgtgagcttaggtttaagaacactcgagttttgggttgacagtctaaaccctgatttccttgaaccaagtatggccagtgttatgtctgaggtgattttagccctgtggtcacacttgagacctgccccctacccttggggtgcaaaagctttgcaacttcttggaaaattgggtggtcgtaatagacgatttcttcgagagccccttgctcttgagtgcaaggacaatccagagcatggactacgtgtgatccttacatttgagccctcaactccatttttggttccactcgatcgatgtatcaaccttgcagtagcagttgttatgaacaaacataatggaactgatgctttctatcgaaaacaggctctaaagttcctacgtgtgtgtttatcgtctcagcttaatttgcctgaaaaagtaaaggatgagggatacacaccgagccagttgtcaacgatgttagtttccactgttgattcctcttggagaaggtctgacaccttagatataaaggttagctcggcattaatgctatcccaattttttctttttgttttttgccacgtgtttcttaaatgcatttatctatataactatgtacaaataaatatgttataggaaacaaagtgcaaaagataacaaactgttatgttgaattatacatacaaattgcagtcaattcattgcttaacctttttgaattaaggtttaatctcttacttattttattttttaaaaatgatatgaaacaagatttacattaataatagacggctgggtataatctgtattacaatttaatatcacaaaaactttcatattacagccacagataccaatcataagtattgagaaagaatatgccttaatgtccttgttattatgttcatatagccaccttatgcttaattatatcccagaaaaaacccaaatcatcttctacattgttgaagattctattgtttcctctccagtcttactgcccttaatcttatgattgaataatttcaggctgatttaggtgtaaagacgaagacccaacttattgctgaaaaatctgtgtttaagattctcttaatgaccattattgctgccagtgctgaaccagatttgcttgaacccaaggatgattttgtagccaatgtatgtcgccatttcgcaatgatttttcatgttgattcttcaagtactacttcagctgttaattctgcacttggaggtcctatgcttgcatccaatgttaatgctgctagctcacggacaaagaatagtaattcttcaaacctcaaagagttagatcctctaatatttttagatgctttagttgatgtgctagctgatgaaaatagggtccacgcaaaggctgctcttaatgctttaaatgtgtttgctgaaacacttcttttacttgctcgcacaaagcatgctgatgtgttgatgtcaagaggccctggtactcccatgattgtttccagtccttcaatgaatcctgtatattcacctcctccaagtgttcgtataccaatttttgagcaacttttgccccgtcttttgcattgttgctatggaactacatggcaagcacaaatgggaggtgttatgggtcttggtgctttagttggcaaagtcactgttgagactttatgcctttttcaagtaagaattgtccgtggcctggtttatgtgcttaaaaggcttcctgtttatgctagcaaagaacaggaagagacaggtcaggtgctcactcaggttcttcgtgtagttaacaatgttgatgaagcaaacagtgagcctcgcagacaaagttttgaaggagcagttgactttcttgcttctgaactgtttaatccaaatgcatctataattgtgagaaagaatgtgcagtcatgtttggcacttctagctagtaggactggcagtgaggtgtctgagctgttggagcctttgtatcaaccactcttgcagcctctgttgattcgaccactccggtcaaagactgttgatcaacaggtattatatttggtattttcatttttgtaccttgtggttttgatgtaatgcaacaaattgcttactgtttcttggaaataggttggcacggtgactgcattgaatttttgcttggccttgaggcccccccttctcaagttgacccaggaattagtaaattttcttcaagaagcattgcagatagccgaggctgatgaaactgtatgggttgtgaagtttatgaacccaaacggtggctacatcattaaccaagcttaaaactgcttgcattgagctcctctgtacaacaatggcctggacagattttaaagctcccaatcatgctgagttgcgtgcaaagatcatttccatgttctttaagtctttgacttgtcgaacactggaaattgttgctgttggaaaagagggtctgcgacaggtttttgagatctccttcttatgtttttactttttccttctcagatattgacaaatgctatgtgactatattttcttaggtcctttcagcttaagtatgctattttagacttgtttagcaattggtaatttggtttgtagctcttgccaatgccttatctggtctctctcatacatttgcggatgtaatttgtggatataagtctgtcctataatgtggtgaagaaagtgttaagagttctaaagccacacaagtttgtttctcatatcttttgatgtttgattgcattccaggttattaatcagcagaggatgcctaaagatcttctgcagagcagcctaaggcctatattggtaaacttggctcacacaaagaaccttagcatgcctctcttgcaaggtctagctcgtttgcttgaattactgtccaattggtttaatgttgccttaggcagtaagttgttggaacacctgaagaaatggttagagccagagaaacttgcacagagccagaaagcatggaaagctggtgaagaaccgaaaattgctgcaggtagtatatttaaatctcttgcctacttatggtactagttgcttatttcctaattgcatttttgtttatagatggcatcatttgattttaacattcatgcagctattattgagcttttccatttacttcccatggctgcatcaaagttccttgatgaacttgttacgttaaccattgaattggaaggagctctctctcctggacaagtgttcagtgaaataaacagtccatatcgtcctccccttaccaaatttttaaatcgctatgcaacacttgcagttgattattttcttgctcgactaaatagtccgaaatacttcagaaggtgaaaattttgtcatttttttaagactttcaacacttgtttttgtttctgattttgtcccataatacatgtttcccttttcttttgttgatgggacattttctgcttcaatttcatttgatttcctgttaaaaattcaggtttatgtatgttatccggtcagatgctggccagccgttaagagatgaacttgcaaagtcacctcagaagatacttgctagtgcctttccagaatttgctccaaagtctgatgcagtgatgactccctcgtcgtcaactccacctgcttcagtaggtgaagaaggtcttactacacccgcaccagaaagttctatgtcctcaccctctgcagcaacttctgatgcttattttcggggacttgcacttgttaaaactttagttaaactgatacctgggtggcttcaaaacaatcgtattgtgtttgataccttagtacttgtttggaagtcctctggtagaatatctcgtttgcagaaggaacaagagctggacttagttcaggtgagttgattatgagttaagttactaactatatttgtaaatagcataacaaccaaaaacgttagtatttgtacaacaatccacaccaaaacaattcttagagagacaagagccagcaatgtaaacaaacttcaaagtcacaataagcaacagaaaagcttcccattggatgtgtatgtatatattttttattgtttcaaacttatctgctgttcaaaattttatcacattccatatataatctatagatgatttttattttgtcggaggtttctgatgatgctccaccacagttacaaattatcatcttttctttccttatttattttagaactcctaaaaaaaattgagtcatgactcataatgacttctttgaatagtccactccattcaaaattttgttagaaacattgctgtaggttcgccacaaactcacaatgaattgagaattatatactattcttcttcttttttaaaattcttgtcgggatatttcagtagtaattttttcagcacttatacaggtaaaagaaagcaaatggctggtcaaatgcttcctgaattatctacgacatgagaaaaatgaagtgaatgttctttttgatatactctccatcttcttgtttcaaagtcgcattgattatacctttttgaaggagttttatataattgaggtattgtaactgaaattaatttgcttcaactactcattttttggtcatatcatatattatattatggttgatgaatgcacaactgttattctgtctttcaggttgctgaaggttaccctcctaacctgaaaagatcacttcttttgcatttcttagaacttttccaatcgaaacaacttggtcatgatcatttggttatcgtgatgcaaatgctcattcttccaatgcttgctcatgcgttccaaaatggccaaagttgggatgttgttgacccagtcattattaaaacaattgtcgacaaacttcttgatcctccagaagaggtgattttctagctcttctgtatgatttgtgtttcttagtttcttttttacgatatcctcaacataccacaacatgctctctttttcacctatattcctgcatcttcgttgtaggtttctgctgagtatgatgagccgttaagaatagagcttcttcagcttgcaactttgcttctcaagtatcttcagaatgaccttgttcatcatagaaaagaacttatcaaatttggctggaatcatctcaaacgtgaagatagtgccagtaaacagtgggcatttgtgaatgtttgccactttttagaagcctatcaggccccagaaaagattatacttcaggtatggaaaatgatagttgcactaactctgcactgttaatcctatgtacttgatttttactaagctgaaacatacgtacacacaggcaggatatgggcactcccccacaatcaaattgcttttgtccttgagaaagttcctaaagatcattttttggttgcaggtttttgtagcgcttcttagaacttgtcagccagagaacaaaatgctagtcaaacaagcccttgatatactaatgccagcacttccacgaaggttgcctctagttggggattcgcgtatgccaatttggatccgatatacaaaaaagattctcgttgaggaaggtcactcagtccctaatttgattcacattttccagctcattgtacgccattcagatctcttctacagttgcagagcccagtttgtgcctcaaatggtgaattctcttagtagacttggattgccatataacacgacagcagaaaacagacgcctagccattgagcttgctggtttggtggttggctgggaaaggcaaaggcaaaatgagatgaaaatagtgacagaaaatgatgtacccaaccagaatgctgatggatttaatccaggtcctgttaataccgattctaagcgttctgtagatggggctaacttctctgaagatacatccaagcgtgtcaaagttgagcctggtctccagtcactttgtgtcatgtcacctggaggtgcatcatcaattcctaatatagaaacccctggactggctagtcaacctgatgaagaattcaagcccaatgctgctatggaagaaatgattatcaatttccttataagggtgagacattcaccaatttgttattttacttgtgaataaatagttagatccattatactatgtttggtagaaaggatggataggtggatggagaggggtggaaggagagttgaaaggagaggaagaatcccttgtttggtaagagggaaaaaggaagggagactttctccctccaaaatttaaaaattcaatccctccattttaggaaggattggagaaaaaaacaaaatgtacacaccaaataccaaaattatcccttaaaaaaaattacaaatatctatactaaaaaggatactatagtaattttaatcataacttgctctccatcctctcacctttactcctaataccaaacaacacaaaggagagtcactatcctctccatcctctatagagtcatcatcattcttactctccatccatcctactctccttcgttcctgccaaacatagccttaaggatgactttatgtggaaaatccgttacttcatattgcacaggtgtattttataaagttctgcttccttcatttttattcttaatagaaattactgtacttaaaaatctattttatgtagtttacgtaagcagatacattattttcaattttaatttgttgtttatagatttatgctgagatagttgtttaatgttattttttttattgtgaatgaacacatgtattttgagactcttgagtgtgaccatatattatgatttagagacatgtcctttgatgtcccagtcaatcagttgtcaatgcctctcatgtttactgttttgtgattttcatgccttcttgagacaggttgccctggttatagagcccaaggacagagaagcaactgctatgtataaacaagctttagaattactttcacaagctttggaggtttggccaaatgccaatgttaagttcaattatcttgagaagttgttgagcagcattcaacaatctcagtccaaggatccttctactgcccttgcccagggtttggatgtcatgaacaaggttctagagaagcagccacatttattcattagaaataacattagccagatttcccaggtatgcagtgtaatgtttgtatctatttgttttttcaacaagtaaatcttgatatttgcttcttttcttactgtttgttttttatttttggggatgtggggaaattggttaacagatacttgaaccctgtttcaagtataaattactagatgctggaaagtcgttgtgctccctgttgaagatggtttttgtagcttttcctttagaagcacctaccacacctccagatgtgaagctcttatatcagaaagttgaagaattgatacaaaagcatattaatgctgtcacggctcaccaaacatcgaatgaagaaagcacttctagtccaataagcttcattcttcttgtgataaagaccttgacggaggtacacaagaacttcactgatcctttatcttggttcgtatcttcaacgccttgccagagatatgggttcatcatcaggctctcattttgagacaggtatgatgcatcttttttcatagtattttgtccttggggtcagttggtccctctatccgctctatattagtaggtcataccttgccattacatacaagttgtagtcttttttttctcgcattactattgttttgtggaacttttcaaggaggttctaggctgtctcgcatgatagatgcatgcttttgatttggcatcttttgctttaggacatcatgtttatcaaatgttccctgttactttcaacttgtttatctttcattttcacaagaggtaatgaattttacacttagaaacagaaggtgaaacatatggattgagaaattctttaaatttcatggattgctttcatcatattctagccattaacaaaatgatctatcattgtcagggtcaaacaaaagatccggactctgcagttagttcttcgcgccagggtgccgatgctggagcagtgatttccaatctaaaatctgttttgaaactcattagtgaaagggttatgattattccagaatgcaaacgatccataactcagattttgaatgcattgctctcagagaaaggtaccgaggctagtgtgcttctttgcatacttgatgttataaaagggtggattgtagatgacttcaataagccaggaccagtcatgtcaaatgcttttcttaccccaaaggaaaccgtatctttctttcagaagctttcactagttgataagcaaaacttctcccagactgttctggaagagtgggagaggaaatatcttgagctaatttacggcgtttgttcagatgtagataggcaagtaaaatattacttttgtacttggaatgttatattgctttttagggtatcaatttaactttttaaatgttattgatttctagatattccctacaactgcgtcaagaagttttccaaagggtggagagacagtccatgcttggattgcgggcaagagatcctgaaatgaggatgaagttcttcttactctatcatgaatcccttgggaaatctttgttttcaagactgcagtacattattcaagttcaggactgggaagctgtgagtgatattttttggctcaaacagggtcttgatcttcttttagcgatcttagttgaggataaacctatcacagttgctccaaacactgcaaggctaccgccacttgtggtttcagggcatgttccagattcttctgggatgccacaccaggctactgatgtgtctgagggttccgacgattctcctttaacatttgatactctcgtgctaaagcatgcacagtttctgaacgaaatgagtaaactaaaggttagtgtagtaattatcaaactggtcatgtttgtataagtacaattcttatttgttctaatttttccttttaaaataaatgattgtgctcacgaactatgcaatagctcagtgttttctgaagttgttggttcaatcttaaattaacttgaaatatgacagtacagtaaagacctagtatgtgtttgattgcaaatggaaattctgacctttttcaccctcttctaggtggccgaccttctcaatccattgagggagctggctcatactgatgcaaatgttgcataccatctgtgggtgcttgtgtttccgattgtctgggtgactttgcaaaaggaagagcaggttacactagctaaaccaatgattgctctcctctcaaaagattatcacaagaaacagcaagctagtcggcctaatgttgtgcaagcacttttagaagggcttcaactgagccatcctcaacctcggatgccaagtgaactcattaaatatattgggaagacatataatgcgtggcatattgcattggccctgctagaaagccatgtcatgctatttcagaaagaaacaaagtgctctgaatctctggctgagctttatcgtttgctaaatgaggaagatatgaggtgtggattatggaagaagaagtcagttactgcagaaaccagggctggactatcattagttcaacatggttattggcagcgtgctcaaagtttattttatcaagccatggttaaggcaactcaagggacatataacaatacagtaccgaaggctgagatgtgtctttgggaagaacaatggctttactgtgctacacaactaagtcagtgggatgcattggtagattttggcaagagtattgagaattatgaaatacttctggatagtttatggaagttgcctgattggacttatatgaaggaccatgtaattccaaaggctcaagtagaagaaactccaaaacttcgacttattcaagcatattttgcactgcatgatagaaatacgaatggtgtcggggatgctgaaaatacagtaggaaaaggtgttgaacttgctttggagcagtggtggcagttaccagagatgtctgtttattccaggatccctctcttgcagcaattccagcaacttgttgaggttcaagagtctgctagaattcttgtggacatttcgaatggaaacaaactctctggaggttctgtcgttggtgcacatggtaatctttattcagatctaaaagacattctcgagacttggaggttgagaactccaaataaatgggataatatgtcagtttggtacgatttgcttcaatggaggaatgaaatgtatacatcagtcatagatgcgttcaaggattttaataccacaaacccacaacttcatcaccttggctttcgtgacaaagcctggaatgttaacaagcttgctcatattgctcgtaagcaaggcctttgcgatgtatgcgtgacaatacttgacaagatgtatggtcatgcaactatggaagtgcaggtactactagtgttatgttggttggaaatggaagggttttgctttcctatggctgtccatctttatctcctttcattgtttgtgtttttgcattactaaaaaatattgcataaagacaagaactgtgattttacttttgggttcttgtaatattcagacaataagagtgaatagttttattagataagtcaatttgtggactgtaaaggtccaaacggcactagcgtgtttttcagaagcttacatctttgtcactgtagttcgatgcttctttctaattaaacagtttctaatctctccttttgatctatgcaggaagcgtttactaagataagagagcaggcacaagcttatctagaaatgaagggagagcttaccagtggttttaatctgatcaacaacactaatcttgagtatttttctgtgaaacacaaagcagaaatatatcgcttaagaggggatttcctgttaaagctaaatgactccgaaggtgccaatcttgcgtactccaatgcgataaccctatttaaaaatttgccaaaaggatggataagctggggaaattattgtgacatggtacttattttcatgctccgcatttatttggtcatttctttacctgataaattactgatatttctttttctgttttattttctctccgtatacaggcttacaaagaaactcatgaagagatttggctggagtatgctgtcagctgctttcttcaaggcattaaatttggcatttctaactcaagaagccatcttgctcgtgttctgtatcttcttagctttgatacgcccaatgaacctgtgggaagggctttcgacaagcatttagagcaaattccccattgggtttggctctcatggattcctcaactcctactttctttgcagagatcagaagctcctcattgcaaacttgtactactaaaagttgcaactgtttatcctcaggttaatgttcaatgtatttgataccttaaatgaattagtttactacttcagttcaaaagaaatttattctcttgcattcaaactgcaggccctgtattattggctgcgcacatatttgctggaacggcgtgatgttgcaagtaaatctgaggcaaatagaatggctttggcacaacaaagaatgcagcaaagtgtttctggtaacattggtatagttggtgatggaaatgctagagtacaaggtcatgctgggggttctttatcctcagagaaccaaggacaccaagcaactcaatccagtggtggcattggctctcatgatggtggaaatgctcatgggcaggaatctgagaggtccactggggctgatggtggcatgcattcaggaaatgaccagcatatgcagcaaagttcttcaagcatcaatgatggtggtcagaatgcattacggcgtaatggtcctttgggttttgtgccttctgctgctagtgcttttgatgctgcaaaagatataatggaggctcttagaagcaagcacgcaaatttggccagtgaacttgaggtgactattgcatctctgatttcttttaattatgtatatatatgtttgtttaaattcatcacttcatatttgtagtcaaagttgcaaatatgtgtactgtatacaacattatttttctgaatcccgaaaagttgtatatgcgagttttgtgtaattttcaactttctttagtccccccactcctttttctattttctttgtttttctactaactcagtgttacatcaaatcacttttcaggctctgctaactgaaattggatcgaggtttgtcactctgccagaggagagactccttgctgtggtaaatgcactgcttcaccgctgctacaagtatccaactgccaccacggctgaggttccccagtctcttaagaaggagttatctggtgtgtgcagagcttgcttctctgctgatgctgttaataaacatgttgaattcgtgagggagtacaagcaagaattcgaacgtgatcttgatccagaaagcacctccacctttcctgccaccctctctgaactgactgagagactgaaacattggaaaaatgttcttcagagcaatgttgaggacaggttcccagctgtgttgaagctggaagaagaaagtaaggtgttgcgagacttccatgtagttgatgtggaagttccaggacagtactttagtgatcaggtaatcaagtcggtttgtacatttttgttgctgaaaatcataatatgttatttaacggtttatgttatttgtaccatttgtatacacaatcaatgcaggaaattgcaccagaccacactgtgaagttagatagggttggagcagacattccaattgtgcgtagacatggaagtagtttccgtcgtttgactctaattggctccgatggctctcagcgtcattttattgtccagacatctttgacccccaatgctagaagtgatgaacgcatattgcagctcttccgagtattgaaccaaatgtttgataagcacaaagaatcaagacgccgccacatctctattcacaccccaatcattattcctgtttggtcacaggtttgattttgcatcatatatgcctttgatttgtttcaaatttttatttgttttgctcgaatatgtattcttgatctattgaattctttccctataatatatatgatgaactttctaggatctttgatgtagttctgggtttttacatacacgcactttttgcttttcctcgagggttgttataacccgatctccacatgaattctaataagcaatacatacacgcactttttgcttttcctcgagggttgttataacccgatctccacatgaattctaataagcaatatttctccacatgatgacaggtgcgcatggtggaagatgatttaatgtacagtaccttcctcgaggtgtacgagaacaattgtgcaagaaatgacaaagaggcagatcatcctattacctatttcaaggagcaactgaatcaggctatatctgttcaaatttcctcagaggctattgtagatcttcgggttcaagcttatagcgacataacgagaaatcttgtaagcgatgggatcttctctcaatatatgtacaagactctcttaaatggcaaccacatgtgggcttttaaaaagcaatttgccatccagttggcactctcaagtttcatgtcttacatgttgcaaatcgggggaagatcaccgaacaagattttatttgcaaagaacaccgggaagatattccaaacagattttcatcctgcatatgatgcaaacggaatgatagagtttaacgaaccagtgcctttccgtctcacaaggaatctgcaacattttttctcccactttggagtcgagggcctcattgtgtcggcaatgtgtgcggcatcccaggctgttgtttcacctaaagtgagttttgctttggtacaacaacttaacgttatagatttgataatcattatcaaaattctcactttcttttctctttcttatatttgcagcaaagtcagcacctctggcatcagttagccatgttcttccgagatgaattgctgtcttggtcatggagaagacccctcggaatgcctattgctcctctggtcggagggagcagtagtatgaaccccatggacttcaagcaaaaagtgactacaaatgttgacaacgtcataaaccggatcagcggtatagctccacagtatttctccgaagaggtaaaactcattgctcaaatttcttttccatcatgattgttccttgaatctcttttccatgaaaacttaaaaacacacttcttactgattggttttgtctaactggattcaggaggagaatactgtagacccaccgcagtcggtccagagaggagtaaccgagttggttgaagctgccttgaccccaagaaacctttgcatgatggatccgacatggcatccttggttttgagtagttcaatcataactttgtagagttattaattaaccttaatggtttcagttattagcttctgttaatatacctcttcttgtaaatattaatcaagctgtgtacatatgaccattaacatttcaggtttaactttctaagtagagttcgaatggttcatattattaatcttacttttatcatgaaggttgtaagaaatcgtatatattaattggattattatagttattatgattttcttttgtatcttttacttggattattacaacatacttcacagaattaagctaatatttaaaaaattaaattaccatccttcctaaaatagttatttattatgtttacaacatatgaggtaaatattttactcttaccaaacaaaggattcgacatatccctccatgttttttcttctacccctttccatatccattcttctttccttcttaccaaacatggtgtaatggagtgtttggggtaagagagtgagttttagtgtgagtggttgagattaacaatatgtttggtgaaagggaaggagattaggaaagagggagagtttaagaatgatggagagtgtgatggaaggagaggataactaacaagtctccatgttgtttgatattgaaagtagaaggatgaaagataattatttattaaaattactatattattctcttcaaatatatattatttatttattatgaagagtattttaggatgaaagataattatttatttaatatactttattttgtctatttttcctttccttccacttttgaaaggattggattttgtacatttgaagggaaaatgtatccttctatcttttctctccctcctttcctccctaccgacttatattctctccttccaactctttccttctatccctctctttccactcaaaaatctttcttaccaaacataatcataatgtaagagaatgtcttttttggatagatctcaattgcacatacgtagtatttatttaattaccaaaaggaatatctcatactcgagtatttaaagggtttgagatcactctataaataagcttacattgtaggattcacacaaacataaaccttccactaaaatcataccaaatgcaaatagatttcgttttacaccataatcctaaacaaacaccccaccccataagtactttttggcttatttcatagcacatggggaacttcaaacttttgaagtccaagtttttgaaaggaacttttgaagtctaagtttttgaaaggaacttttgaagtcaatttacacacagcatggatcctttcatttccataacttttctagttcttattattttggccggatcttcttttaatacatattttttcttattgatcacttcttttaatacatattattcagattgttatgcagtagttcttaattagccttacatggttttttatagacatggaaacttgaatttggcagataaaccccaaaggacccaaggcaaaggaggtttttttctatttgatattgctttctttattattttccttttccttgattgattctc

SEQ ID NO: 295682 - DNA, 1952 bp, Cannabis indica
aaaaaaataatataaggtacgtgattatcacattatagtaactagttacccttttaattgccataaagatacatggttacttttatttagtttttctatattttttaatatttaattgtctcataaaataaccttatttaaaaaaccatattttacataaaaagtataaaaatccataaaagttataatttcttctataaaatttgctattattttaaattttatatgtaatatggtaatcttgaaaacaaatgttgaaagcttgtacttaaaagaaatgacatttttaaaacttgggagccttaggatcttgtacacatttgcttctcagcaacatattatttgataaattgtagacatggtagaccttttcaacaagaaggacattggatcaagattaattgcgatgttaaagtgggaaataggtcgatgagtattgtagctttggctcaagaccatgcgagaaccgttttgtgggttgcttcgaagagttttgcctattctgtttccttgattggagaagttgaggcttgtctgctggcacttcatacggcaacagcgtggaaacactattttactattatcaagagcaattcggagattgttatcaaaattttgataagaactaccttaaattggcatattgataactatgttttaatttgtaatagactctctcttaattttttgggttgtaattttgtttttattttgagattttataattttactgctcacaatattactagattggttattaccaaaaactttacaggtattagttgatgtaccaactattccagcaaatattacctgtaatagttaggaggtctaattttgattttaatgaacatttcctttcaaaaagaaaagttgcaacttcattactagtggtcatcagaagagaaataagcttttgaaactagagttgttaagtgtgtctttctttcctattttatacttttgaaaatggcaaacaaaaaattattgtatgcaaaaaatgctaaaatgagatgttatattgttattggttcaatacattattaaattcactaattactattaagaaatattactaactttttgtaagaggccttctcgtgatgatgctataaatagacatgcataaatcaactttggaatagattgaaaaataccattccaacattttgtttgcaattaaagatggtaaaactagttagtaccgcaaaatcttgaaccaaaaaatactatgctttaattaattagtatcgaatccatgacaatatatttataggacaaagctcaaaattattgaatcctagttcaatagaagccactgactaatacagagttgttgtggtaccaaaacccagtccattagaatatataataatgattacaattaatatagaaatataccattgatattacaatcatatttgtacttattaactgtgttaaggacaatggttaaagactgttattctgtttgttaggagttagttattactgttgctttcggttgtaattgacttccttctcttttaagagtcttgtattctatataaaccattgtactctcttttcaattcaatgtaattcctttctttcattctgttatctctctttaataaacaaccactcgtggagctcgggcatcaattttaaatgcgaactctccaaacaactaaatggtattaatgatgtatcagaattatttgaatagaactctgtacctattctcaacaggctcggaaaatccgaaataagtcattgattgtgttgtgttaccaatatataaaaagaaaatcttaaacttctatgtaaagtgttctactacactagaaatcttgatcgaggttgcatgcagggccagccctaggtataggcgggctaggctcgtgcctagggcccacactttccgggggtccaaaataaaaaaataaaaaatttattaggcttttatttaa

SEQ ID NO: 295683 - DNA, 3536 bp, Cannabis indica
caagcgtaaaactgctccaaaagacatcaatagacgagataatgctaactttaaagacccaaaacataggctaattataacctaacatcttcccccttgtgtgtgatgccagttatggattctagggctcgtgtttgggattaggttaaattcctttgacgtttgaagtctaaaggagtggatgtccaagagttgttcctttatgcttcgattgtggtgtacacgatctggaaaacccgcaatgacaaggtttagaataattctatatgtaaaattaagcattgtgtttactctatctctatgtgttacatagattatggctcttgtttggttcctttgctagtgacagttgagtctcttgtgtagtctcctcccaaaagattgggtcaaaatcaactatgatgtgaaagttggttacggttcaatgtgcatggtggctttggctagggacaacacggagtcgattttgtgggtggctaccagcatgctcaacttctctgacccacttattggaaaagctacgacctgtttgttaaccttggaatcagtagtctctttgaagcatacttttgtgttgattgagtgtgactctgagacagttatcaacactctgaagggaacttgttctagttggggtattggtaactttgtgcttcaatgtaaacatctctctagctttttttgttgtaattttttgtttatttcaaaactttctaattttgcggcccataatatggctaagtgggatttttccagaagtaattggtatggtcgatccttcctctataccaggtaacatattatgtaatgaccatgaggtgtaactctatttggttttaatatatttacgccttttattaaaaaaaacctaactagcataattaataataactaacaccccctcaaattgagctgggccaaggaagacaaactcatttttcctgtgagaaacaaaaatctagtgttagaaagggttttagttagaatatctgcaacttgatcatggactgttgtgtgtttaactagaagttgcttgttgagtattagttctttgacaaaataaagggtccagctcaatgtgtttacttctgcaatgcaacactgggttagctgacatgagaacaaaactctggttatcataccaaatagtagggtaggcagcagtggaaatctaatttcagcaagcaaggactataaccaaacgcgttcagttgtagcattagtaagacacctatactcaacttcagtgttggacctagaaacaatcttttatttcttagaggtccacgatacaagattggatcccaaatatatgcaaaaactaatagttgaacgactatcatctagatcagatgcacaatcaacatcacaaaaactagtaagaaccaagttagaacaaggctgaagatgtagggcataatcaagagtccctttgagataacataagattttcttaagcactttctactgagactcaagaggttgatgcttgtattatgagactttgttaatgatacatgagatctttttgcatgccataaagcactaaccaaactcttgaaaaaatgaggatctatgatgggatcaccatcattggtaattaacttctcactgcctgccataagaataagcaataaattggcattatccattttagcacgacagagtaattcaataatatacttcttttgactaaggtgtaaacctgtagtgcagtgatgaatctcaataccaaggaaataatcaagttcacctaagtctgtgaaagaaacagaggtattgagtagagcaattaagctagtaatgattacttgtgagcggtcagtaacaagtatatcatcaacatataccaacacaaaatttttttgagaagtggtgattctagtaaacgaggactaatctgctttagaacaatcaaatcgaaggtgtttgagagttgatttgagcttgccaaaccaaggaacgaggtgcttgtctcatcccataaagggcctcattaagtttacagaccaagttaagggaattcttgtttataaatccaagaggtcgttccataaagacctcttcagtaagctcccaattcaaaaatgcattattggcatctaattttctaatgcaccaacctttagttaaagcaattgtcaaaataaccctgatagttgtaggctttaccataggactaaaagccaatttaaaattttggaatggtctacaagcttttttagcgatggcgtcagaacataaggattctaatagaagaatcaaatgctcttgtgtgagatgtataaataataagtttgaaaaattagagaatgtgacagcacacgtgtttgatcgaggttttatgaaaggatatgagaagtggacttatcacggggagccagagcatgttgttgatgatgaagaggttagggatgatggagaggatgaaataatccctatctgcaagacttctttcctcggacaacagaggatgtacaagagggaccaaccacaaactagcattttgatgacttatttgaggaaattgaagctgaattgtatcctggttgtgactggacttcatctctcaacattttagcgacgctatagaacctaaaagttagaggaaaaattcctaacaacatatttgatgaattgttgaagttgttaaagtttgtattttcaaagaaaaataaaattccatcaacgtactacgaggtgaagaaaaaattgaagaaattaggattgggttacgagtctatcaatgtatgtcaatacaactgttgcttattttataatgagaatgcatctaaggaggcttgtctagtttacagaagtagtcgctgggttacttctgagaacagtaaagggaaaaaagttccttgcaaagtgatgcaatactttttgttgacacctcgactcaaaagattacatagtttgaggattacaacaaagagcatgatatgacatcatactgataaatcaaaagatgatggagtgatgcgacacccaattaatggtcttgcttggtaaggcttctatgccaagcatcctgagtttgcaagtgatcaaagaaatgtttgattggggttagctactaatggatttaatccatttggcaacatgagtcttacatagagtatgtggccggtggtgttgcctaactataacctaccaccttggttatgtatgataaagacaattattttatgttaaccgtccttattcctagtgcaaaatctcaggtaaagacatgaatatatttctaagactataggtagacgagtaaaaggagttatggaataatggagtacttactagagatagtttgactaacacgatatttacaatacgtgcatcgcttttgtggacagtgaatgattttcatgcttgtagtagcttgtttggatggagtgttcaaggttataaagcttttcctacttgtaatggagacacaacttccattcgagtaattgggaagacctttaatgttggccatagaaggttcttgccaagtaatcatgcaatgagaggtgataactctatggtataga

SEQ ID NO: 295684 - DNA, 5833 bp, Cannabis indica
agacgacaccttaaaaatgtaaacgaaacagtactttggagggttttcccaccaaaatatgaggttggatggttttttgcaagtaaattgatagttgagggggttttgccgcaaattactcttttttttatgataagaagtttatctgagttttttggtgacacgttgacggtagtggttcgtccacgtgagcaagccaaaggccaaaaacgcgtaaagcgtgacaatccggaatctcttcattcgactctttggtgaatccgtttctataagattataacacgtgttgattttatactcgaagaggtttagatattaaggagacttgcgggacccgctcactcttgagttttcaaaaagaattcgtttcatttgagttgcatttcgcttcattttcatttgcatttgcatttgagtttcaataaaaaaaattgttttaaaattttattctaaaactactattttaaaaataaaaaaataataataaaaaaaaagttgggctgacggaggagccagagtcgttgcttcataggctcgtctttttgactccgaaaaccataaaagagagggaaagaaaagtctgccttttacattagcttggtcttcgtctttcgggtttttctttcgtttcttccaaaccatcttcagttcttagcaacctcacatctctgtgcttctaaggtatgcttgtctttttttttttcttccttgaaatgggttttgtttgttttccgagaatctgtgaggaaaaagatgggagttttatgaagtttttgttggaatcaagttttatctgtagttttctttttctgggtttgtttttatttcttgaaagattaaacttttgaatgaactgtaaactactatttgtatatgtaggagaacgttttgtttgttatggttaggaaatggaggagagtagatggtgttatggggttttgtttttgtttctttttttgggatatgaactaatttttgtttaattattgttgaatttgggcaattgttttaagaacaaatacatacatggtttggattgttaacgactgtttttttgcccccttaaaatgattgcataaagttaaccagaaaagctttcttagactaatgattttactattaacactttttgtgatactcatattttacgatcttttctctttccttattccgagtcatgttttgagattactgtgttgaaatctcactgtattgttgcttttttagggtcttctcctcggaaagctttccatgtgcagtgggtctaagaggaaacctgctaacgctggtttggtcatggaaggtgaatcagagaaacaagaagggctcaggtataacttttctgttttgcttgaattatcagcctcggatgatcttgatggtttcaaaagtgcggttgaagatgaagcccgtgatattgatgaagcaagtttatggtatgggaggagaatcgggtcaaaaaagatggcgtttgaagagaggacacctcttatgatcgctgccatgtttggaagcaaaagagttctgaagtttatacttgagacaggttgtgttgatgtcaacagggcttgtggttcagataaggccacagctctccattgtgcggctgctggtgccgctgcttgttcagctgaggttgccaagctcttgcttgctgcttctgctgatgctaattcgcttgatgctaatggaaatcgtcccggtgacttgcttgtgccggttcgtagtagcttggcctttgatttgaggaagaaagctttggaagtgatcctcaagggtgtggaggaaacttcaggttttcctgatcaagttgttgatgaattggaggatcaagagcgccaagagtttttcagccttaggagctcaaaagatggtctagagaagaaagagtatcctgtcgacctctctcttcctgacatcaagaacgggatttatagtacagatgattttaggatgtatactttcaagatcaagccttgttcaagagcttactcacatgactggacagagtgcccttttgtccaccctggtgagaacgcccgtcggcgtgatccaaggaaataccattatagttgtgtcccttgtcccgagttcaggaaagggtcgtgcaggcagggtgatgcttgtgagtatgctcatggtatttttgagtgctggcttcacccggctcagtaccgtactcgtctctgcaaggacgagactggttgccaaagaagggtctgtttctttgctcataagcatgaagaactccgacctttgtatgcttcaactggttctgctgtgccttctccaagatcgtttgctggttcttctcttgacatgggatctattagcccccttgctcttggttccccatcagttttgatacctccttcaactcctcccatgactccctcaggagcgtcatctcctatgagtgggaacatgtggcaaaaccaatctaacattgcacctccgaccttgcatctcccaggtagccggttgaaatctgctatgagtgctagagatatggatttagatgttgatataatcggcatggaaagtcatcgccgcaggcagcagcagatgatggatgagatatcttgtctctcatctccctcaaactggaacaatggtttatcaccagcttcaccttttgccactcaaggcgatcgaactgacgagttgagtagggttggaggagtgaagccaactaaccttgatgacatatttggatcttttgactcttcaattttgcctcagttacagggtctctcagtggacaccacatcatcccatctgcagtccccaacagggatgcatatgcgtcaaaacatgaaccagcagatgccttcaaactactcagttagcctctcatcatctcccgggaggacttctccaatgtatggggttggcgcatctagtggagcagcagcagtgatgaattcacgggctgctgctttcgcaaagcggagccagagcttcattgaacgcagtgctgttaatcgtcactctgggctttcttctccagctagttcgagcatgatgccatccaatctttcagattggggttcccctgatggaaaattagactggggaatgcagggtgaagagctaaacaagttgagaaaatctgcttcttttggattccgaagcagcggtggcaattatggtgcaggcatggctgcatcctcaatggcagcagcaactgtggatgagccagatgtgtcttgggttcaatccttggtggttgatgccccaacctcaaagtctatgcaaatgagcagctttgaggaccaacaacaatgccattttgacagtggagcttcagagatgctcccagcttgggtggagcagatgtacatggagcaggagcagttggtggcttgacccgagatcgaattccattaccttaactgttgattttttgtcattttttaatttcttattgatattgataatatttaggttgaagaaaagaagaaaaaagttcctagataatagaaaattagggcaggataaaaggtttctgctcatattattaaggttcttaagaataactggtcttagtattgctagtaattttggttgtcaacatccatttgataatctttcattattaaaaccagagatgctgattgttaagagacaaactccgcatttaaattgagtggggttttatacttattgtaatttttttaactgttcatcaagttatcatcaatctataaattatagtaattataataatagtaataataaaaaacaatctataaatcatgttttattatttctgaatttccatgctcaattcctaattatctaacattaatccccacttccatcttttgccaaatgcggtgaatgtgatggatttactttctagatttctgtgtattgctttcggcattctaaaagggaaattggattggagcactaacaaaagaaaattcttgccaaattcaagtttgaatttttgaatcaacttttcttgttgggttatccttagtggtatgagcactaaaacgaaaataaaggtagcaaggcttggctgcaacttcaaacacttctttatggtataatattcctcattttatcaccactatttagagcattgatgctttcagtttcgtataaggaacttcttattaatgctgtttattgctagtgaggagtgactacttcaactatacaccttaattgagaatgaatatactattaaaagtgaaatttttataccccaaattaattaaagccatcaggctaaaatcataatcatgttatataacaatagctttttctagttcgatttttgagctaacccccaaaaaaatcagatagaaaggtaagcatctggattggattcttagttagatctcgtatccaaatttcgttaagaatggacatggatgatggaggttggttggtggccatgagtttcaagtggagtgttgcttaaagtgttgttgtaggtctatcttatatgttaatatattatccaaaactatccacatgtaatatgtattggagaactttattttatatagattaaatgtaaaagtaatgagccgttagctttgagatgaaaccccatatttcttgacaatatgaatatatttttttagaaaattttgttgacatgcaattactttaacaaaataaataatttttttttactaaaaatttattgtattattaaatttacaaatctgttaacaaaataatatgaagattaatcgggacaaacccccactgaaccgacaacttgaaaaagaacaagcaatacgagccaagtaattgactaccttgttcacaaatcgtttaacaaagatagtagtaaccttgtttaaaaaaaaagtaaacgcttacaatcataaattgataacccaaaccttgaattcatttggagtgtatggcggattgcatgagcaactgttggacaatcagtttcaataacaacttcaaaattttttttgattttgatccagctaagaatctctttgactcccacaacttctgctatagtcggttgtacacaatcaggcaacaactttgaatcagctttagtaacagttcctccatggtcacttgctaactaaccaatcccaaagctatcattcccactaacaatagaaggatccacattgatcttaatcatgttttcaataggtaatatttaatggtcgctactaacgatagaagtagactctcctacattaatttcaattttttgagcatctttccgttcattaagataagcaatagcagatgacataactcaattaacaacaaagctttttctttgctaaatcaacctattacgagcattccacaacacccaacaaatcaatgtcacttgtctagctttggccttcgagaaaatagttagaacatacaaaatcagctgaaaaaattaggatatgttgtccctaaaattaaagcatgaaagtgttgccaacaaagtgaagcataccatttaaccatgacatgaataatagacttcgaacttccacgacacacttgacacatcaatggaatgtccacatgtttctctcgaagctacgtggatgtgaacaaaatactagagcaagctcgccataacacataatgaactttggtaggattataagattccaaagggaccgccaaaaattagaattattttgctcatcccacctcccattcaaagattgaagatacttgtaagcactctttatgctatatgtactcgaaagctccttatactaatgccactgatcctctcctaacccagcattaagaataatatttttgaataagtaatttgatttgctctttaaaaagattagacaacaagtctgttggaaattatttt

SEQ ID NO: 295685 - DNA, 13992 bp, Cannabis indica
agaatcttgccaatgttttccttcaacaaggatcattacattatgagaatgcactacactgttatcttcaagctgtagagattgataccaaagattctgttgtctggaatcagttaggaacattatcgtgctcaatgggcttgctcagtatttcccgttgggcattcgagcaagggctcttatgtagccctaataattgtgaggatatatgtttttttctaattatttgaaaagtatttggtgatcatatttctttattcagtttctaactttcattcttttgtttttttgtggaaaataaatatcccaccttttttcttaatctgttctttcagggaactgcatggagaaattactggaagtccttattgccattggtgatgaggttgcatgtctttctgtcacagagctaattttgaggcactggccatcacattcacgtgctttgcatgtcaagcaaaccattgaagattcagaaccagttccttttgctcctagaggtatagacaagttggaacccaaacatgtccggcttaaattccttgataagagaaaagcagctgatgagaatcttgatgagggaattgcatgtaaaaaactgaatcacaatttagaattacacctggcagaagattcctgggtaggtcttgctgatgcactcttggatgtcttacttcctctgaattgtagtcatcttgggaagggtggtgagaaatcttacagatctggggatgtcaaactaataattcacctacgttctgcttcagaaaatgcttctgggtgggaggaaagaaaaacacttaacccaataactgcagctacattaccttgtgatactgcctctgaaacagtaggtctggttaaagaaaaggacacaaatgttctagaggaacaaccgcaggaaaggcggagcactcgtcttgaaagacttaggaaccggaagccagggaaggaggatcttgatttcactaatgataaggaccaagctaaggttgtaattcaatatctagaaccttatatttctggtgaactaggtaaaacagatactgataattctgctaatagctctttttcttttagtgacccagttaaaccatgtgatactgaatatagtgatgttaccgaatttcttaaaaagacctcaaacaattgtggtgcttatcatatggctcacttacttttagaagatatagcaagtaaaagactcgtgtatcaagatacatttatcaaatttttggatttggagaagatgataagacattggggaaaagagaggacccctgaatgtaatctttttctggctgaactttattatgacattggatcttcttcttctgatacgtctaaagtgtccgagtttctgttagagacatcttaccatctttgcaagattattgaatctgtagcattggatcatcctaattacatgaattgtgacttgggtgacggaaatagctcaatatatataggatcccaatgtgatgatggaacatcagttgttggtaatttacaattagacaatttgccctcaaaatataaaaaattcttatgggttcgatatttttggttaagtgggcgattgtctattttagaaggtcacaaagaaaaggcccttgaacaattcagtatttcgttatcacttttgacaaacagtaaaaagcctgaaggttctcaatctttggtccaccttccgcattgcaaggtagtgaaagagatcactattgacagggttctccatcaaattaactttttaaaggttgatttcttgatggagaagaccttgggggagatgattgaaaaagaattgtatatggactgcatgaccttgcttgctccacttctattctctacaaaagatgttcatcttgatatgctatcgttccttgctcccgataaagaaggggaagagattacttctattgaactatcagctcttgacattttactaaaagcttgtgaaaaggcgatgccactagactttgaagtttatttgaattgccataggcgaaagctacaaatacttatggcaatagcgggaatggatgacggtcttgcttgtaaatccttccatatgaagttggggttgaaagggctttatgcttctgatgtagagttaaaagaaagttcatgcaagcgctggaactccttggtatccaaggaagtgaaggcaatatctcaatgtgtctctcaaattaagaacttgattgatccacatgcagatacagtaagttattctatttttgtctttctgtctctttgttgtcatcgcgtcctagagtaatatcttatcatgtcacataagtttgaaacatagaaaatgtatggcagcgaagatgatagttacttttcagaagaacatcatatctttttctttttgtctatagttctaaaggccgtataatcttgtaaccatgtccatgctgtctttgtgaagaccatgtgagagaacaatataatccatatgttctccactagccgaaggataagtgaaattttataaatgctgcatggtgcataattttggtacatttacaatgtattttgatttggagcatttttctgcattagaattgtaaagttggatcttaatatttacttggcatgttgtaattttggtataactgtgatggacaaggaatattatgaaatacctagaaatttcttattaattgttgtttttgattgcaaggagtacagttgattttcagctgctacatactttctcttagctacttgcttcactttcttttaatatacttgtgcggtcctcaatatgcttgcaggatagcaatattgttccagcaagcactgttaaggatattcagtccttgctgttgtcagtaatgtgcaatattgctggcatatttcttagtaagaaagcttctgggctagaaattgctgatcagatagaaagacattgctttgttgaggctgcaattgcattctgcaaacttcagcatctcaaccttacagtacctgttaaaactcaagtgagtcatgtacatgtttttatcttaaattaaaccttttcttcaaagaatctttacttgtatgagttgtatgacttgtattatagtttgctattcaataaactttcctgaatattactattatttctctttctttctttcttttctaatatgtcatttcatgacttcacattacaggttgacttaattgttgcaatgcatgacttgcttgctgagtatgggctctgttgtgcgggagaagatggctcaggggaggaaggaatatttcttaagttttcaattaagcaccttttggccttggatatgaagcttaaatctaataacttcttaaacaaggaaaaaactgagtgcctagacacatgtttgaagatttccctaaatgaagcaaaatcagagacactagatgtggaaatgggtcagagtacaaagaatgaaacgagtgtcttggaaaaggacactaatgaaggcgtgttttcccaaagtgtttcacctaataaacccttagataaagatattgtagtagtaggtagtgcagagcaaaacagtaataactccactgacaaatttaagacaggggagaaagtaagtgatcaatttcttgaaggtggtaatgaactaacagaagatgaaaaagaggaacttgagttaaaaattgataatgctttggaccagtgctttttttgcttatatggccttaatattagatcagattcatcatatgaagatgatctagctactcacagaaatactagtcgtggagattatcagaccaaggaacaatgtgctgatgtctttctttatatactcccatatgctaaggcttcttctgtgagctttctttctctctcttgcttgcatgctgaattataatatgcgagccttttcttttggatgtttgaaactttgcatgcttgtatttgatactacataggttacaagttttgggatatgtagcatgttatcttagaatctgacctttatttgaatgtattaatgtgtatttggccagagaactggattggtaaaacttcgcagagtactaagagccatacgtaaacattttccacagcctccaatagacattttggctgaaaatgcaatagataagttcttagatgatcctgatttatgtgaagatcaactctcagaagaggctggttcagatgggtttcttgaatccataacaaaggcaatacttcccaatttgggaagttttaaacaacacaaaatgtcattggttgagaggtatagttcagtagaatgcttcatctgtatgaatcttttatttttccttatgctattttctatggttgcaagaaagcatgaacctcataatccttagtagttggctatctgatttgatactgcagctctgagccatacttggaggtttacagcaacctgtattattttcttgccctgtctgaggagatgagtgcaactgataaatggcccggcttcgtactcaccaaggaaggggaagaatttgtacaacataatgcaaacctcttcaaatatgatttgttgtacaaccctctacgatttgaaagttgggaacgacttgcaaatatatatgatgaggtaataattattgtctcatcattttaaagtttacaatgctgaagaatttttagaataatcgtaggtttattcctctaaaatatttgcctatcaataggctagttacaaagaattgttaagacaaaattttacaactaactacaactcacatcctaaaaatcagggatatataataaataagaaaataaacataatcactaaatttgtttccctaataattgatactgaattaaatacataaaatatttacataattttacactcccccctcaagttgggttatgtatatcaaacattcccagcttgcacattaattcatcaaaagtaatcttgggaagcgctttggtgagaatatcaattgtttgaagttttgatggagtatagatggtttgaattgtggcattttcaatcttctcaatgatgaagtgttgatctatctcaatatgttttgtcctgtcatggtgaacatgatatttagtgatactaatagcaacctgattgtcacaaaacatctttatagatccttctataaagagtctcaactcaactaataataatttgagccaaatccattcactgataccaagagccattgctctaagttctgccttagcaaaaattttagaaaccacagattgtttcttacttctccatgttgctaggttaccccaaacataagagcagtatctcgaagtactcctttaatcagttacatctcttgcctagtctgcatcaagttagactttgatctctatgctattacttttcttgaaaagaagacctttctcgggattcatcttgagataccttaggattctaataacaacttccatgtgttcttcaatgggattgttatttactggctaacactatccaagaaaccaatgtcaggtctttatgagataaatagatcaagcgtccaactagtctttgagatctccccttgtccactagtatacaatctatttctgaaccaattttcttgttggaatccatcagagttgaggttggtttgcatcctaacattcttgtttctcttagtaagttcaaaacatacttacgttgcgagagaaaaatgccatgttttgattgagcgatttcccaagatttttaatctcgaattctctatctaagaagtttctcaatctttccatttcctcataacccgtcaatatgatgtcatctacatagacaattaggatagatatccttttatcttgttgagaatataacaaataaagtatgatcggtttgacattgagcgtaaccattttgaatgtttgacttagtgaatctatcgaagcaagcttgtggagactgtttaatgcaaaccttatctttgtttttaagagttctcgaatcccggtggaatgtccatataaacttcttcaagatcaccatttaggaatgcatttttcacttcaagttggtgaagaggcatgtctttatttgcagcaagagataacaatatgcgtagtatttagtttagcaacaggagcaaatgtttcttgataatcaaatgtttactatgtgattaaatgaatgtgattgtcagccttccaccatttatacattgaattatctgattttgggatcttgatctcccctgtgagatattcctccttcctttatctgccgatgtgcatcataacagactgtgacattgaatttgtgattagtgaccagtgaaacaacttcactgctgtgagatgaagaaccaattgagacatgaagattagagagagtagaagatgcatctgaggttaggctttcttttttagcagccatggcgagagatgtgtgaaaggtgaacagaaaaaaaaattgctggaagatacgattagggcagaaaaaaaacagcgtttagggttgtattaccttctctgataccataaagaatttttagaataatcttatgtctattcctctgaaatattttcctattaataggctagttacaaagaactgtaattacaactcatatcctaaaaatcagggatataaaataaataaggaaataaacataatcactgagaaactgtctcccttacataaaatatttacataattctacactccaaaagttaaaaaacaagcctattattattgttaaaaataaaaatgcctcaaatatcctggttgatgttgatttctcataaaaaggcctctttgttatattggaataggaggtagatttgctgttaaatgatggcagtaaacacatcaatgtatcaggatggaggaagaatgctatgttttcaaagagagtcgatacaagtcgaaagaggagtaggcggtgcctgttaatgagtctggctttggcaaagacatcatcccagcaggttattcttagtttctgtatctattaatgtattgttagggttggaggactattttacttttcttggttcatcgatgttactttatttcatggtctatttaattgtgtggagcgatagagctggatgtaggtcctatagtctcgctgtcaaggtttatctccattgaaaattatgtatcttaattatgattttagaatctgttgaattttgaaatggtttcttatgtttctttgtttgctagataagcttatatatcacgtatattcttatgctaaaacctcgtggggctgtcttcaattggtttttgtgcagtaatactcagtgacatcagtgcatactgctttagattattcctaccaaacaataaatatcagtattttttgcatctgtaatttttatgatttttgtcaagtaacgtatttgatttttttgtggctcagtgtgagatacatgagttattggctttggtatactacgatagtctgcagaatgtggtgccattttatgatcagcgatctgttatacctgtaaaggatgcagcgtggatgacgtattgtgagaactcaatgagacattttaagaaagcatttgctcacaagtaaatgcccctctccttatccacttttcatttcttactcatttgtataatcttgtctaagttgtcatctcttttgtttcaggcaagattggtctgatgcatactatattgggaaactctgtgaaaagcttgggttctctagtgacatatcgttatcatattatgacaagtctattaacttgaatccatcagctgtggattctgtgtacaggatgcatgcttcacgcttaaagttgctttttacatgtggaaaacagaacctagaggctttaaaggttttcggttttcttgcttctccaccgtatttagaactggcaagatttcttttctttctacctttttacattttttttttctaaattatcttcgtcattccaggttctttcagtatattcctttagtcaatcaaacaaagatgctgtcctgaatgtcttaaatagaatggatgctgagaatgcccgaactgataggagcaaacaagaagatgctggagaaataaggcacgaggatttacttacactggaggtgtggcgtattctttacagtgattgtctttctgcccttgaagcatgtgttgaaggggatctgaagcattttcataaagctagatatatgcttgctcaaagtctatataaaagaggtgatactggcgatttagagaaggcaaaggatgaactctctttttgcttcaaatcatctcgatcatctttcacaattaacatgtgggagattgatagcacagtcaagaagggaaggtagaacttatcattatttccaactacatatttggaacaaaatagtaatgtagtagagtaccaaggttaaaatctaaaaaataagtaaacaaatctaatagaaaatagtaacaattttgtaagcaatttttcaaggtattaaagggggaaaaaagaggctgaatagagaaccagaatatgagggtctttcatccttctgtcatatagatttgatagcaagattgcaatgttatgattcatcacatcgttctgttggactgtgctggattttagctttctaattgaactgtctagtatttcatgtaaatttgtaacttctttataagaaacagtacatatgctatgtaaaatagtcttatagaaagaggaagatgaaaaagaaatcacatcaatgaaaatcaatcccttgataaatctgaaaacgtaaacaacttaaattctttatcatgtaaaatagttttagttactgttttctccaaatgcatcattaccaactagatagtattccctatgtagaagacttttcataattttcattgtaaatcctagcaactcgacaaaagaattataatattgtttctaattgtctcactgcctttccccctgttaagtagttttttttaagttgatacttaacaagatcttttgcacagacgcaaaaaccctggaatctctgggagcaaaaagatccttgaagttaacttacctgaaagttctcggaaatttattacttgtatccgcaagtatctgttattctatttgaaactgttagaggagactggagacatctgtacacttgaacgtgcttatgtatctcttcgagcagataaaagggtaaccattcaaactagactcattgcttgatttatttgcaaattattttgatttaaagtttaaaagtggcagtatgtagttcaaaattcaattttctcttggttaatttcttttcataaacaagttaatcaacaattttattggtctttgtattttttggtgttttgcagttctccttgtgcattgaggatcttgtaccagtagcacttgggagatatgttaaggcccttgtttcatccatgggtcaagctgagaaggttggcggtgccgcaagcagttctgagcaaatactggagaaactgttttctttattcattgaacaggggaacttgtggccagagatatgtagcttgtctgagactaagggtccagagacatcagagagcagcttatatgggtattcctcatttatcagtttgactttgcttcagagatgtattgccctgttggatttttctgcatctttcttcttgtggcgcccattagataaaattctcaaaatttaggattcctaactattttagagaaattcaattctttaatagttgcgtacgtttgttaaatatgctattcttttcttgtttgcatgaaagcagtgcactctttttaatgttgcaggtatctccacgaacatatcacgttattagagagaaatggcaagctggaaatacttgaaggaataaatgagaagattcgaaagcgttttaagaatccaaaattgtcgaatagtaattgtgctaaagtttgcaggcatgcttcggttgcttggtgtcgttcacttataattagccttggacagatcactccgtcactgcctacaccatccactgagactcacgtactttgtcaatcagatggttctttggacagccaattgctttgtgttgatttgcaaatagatgagctatggaattcagcatttgagaacccaacccaattgaaagctcttgaaataaaatggaggccaatattgtcaaaaatgaaacatgtaatgattaagaaggtgtcagatgaaaatttggaggcggccaatgctttgcttaagtcttcttataactttcaccgtgagagctcatgtgtaatgccgccatctggtgtcaacctttttttggttccatcttggttagcaagggacaaccagtttcaaccaagtatgaatggcattgaaattcttgatctcagcgttccaaggaagcttatcttgtgggcatatacgctattgcatggtcgttatgcaaatatctcagttgttgtgaagtattgtgaagaaaatgcaaaggtatgaaaactcaccaattcagcatatactctgcaggggcttttcattaaagcatctcttttgatatcattttatttttgttttcctcctagtttacacgaccttgttgaggaacgtacaactgttaacatcaagggggattttatgccattaaaagcccctagtgtctaataatatgcaatacctggtgatggaggcaatgaaactttactgatttatcatgggatttgactgttttgcagtcaaaaatgaaaaaaggagctggcaccacatctgctgtctcaaatgcaagcataccaaatgttgtcactacccaaacaggttatgatcttatcatctactgcacccctgtcaggtgcttatcaagacagtacattagattataaaataaatcagccattcacaagtattgaagcatttgtatagacattattgggttttttgtggacatacctggtgaagtgcttatcaagactgttcattagaatttaaattctgtgtttcactagtattgaaacttttggatagacattattgggttttgtgtggacatactgtactttgcgaaaaactgatagttgtggaatatggttgtaggtggtcaaagagatggagcttgctatggggaggaaatgatgcggaggctactctaaccccagcagcctctacttcagtggctgagggcaatgccactccctcttcaaacccatcttcttgttcgatggacagtcagaaggttttatttgctgctcagcaacacagtaactacactggagagaggagtaatgccatggcacaggaagcagatccaaacaaaggctgactttatatacatgtatataaaaattaattgaggcctagtaaatttaactgtacgtagaatttcaaggatcatatcactgtatcaagtagttaaaatgttctatcaagtgacaacaatgtaaaaaaaataaaattgattgcagcttgttgtgttcacactttgaaagtctcaattctttgctctggaaccttctagcggtgttgatcccgtttgtcttctggtacctcttccagttgatgattcatccattgtggtgttttttccctactatcctttaatttaatttggtcttagctttactgtttcttcattattgctctttcccttttacctcctttgcatttattgttctgaatcttctgatcttctcagaagatctggattctatctcaacacttctcttggttcttattcttcttaaaaccttggaaatccaaatttgtatctatttgggcggccgtatgctcttagatggtgatgattaagcctaagctctacggattttatcataattgcatgaagggatggatggattcgcctactactaccttctcttaaaagggctttcttacgaggtatgtgtttctccttggctatttaagattttgggttttctataaatccttactcctatatttctcccaaactttaacttcccttaaacctctgagtattgttgtcttcgtctggtccttttccatggattccattacccaaaccttgtttcaaaacttattccttactgagaaagagtctattattcatgagcttgttgatgacaatcccataatcgatcatggtaataaagcctactgtttggtttttcgtgttcttacccctagaactattaaacttgagttgtttgaaactgctatgagaaatgtctgaattattagagcacccattaccttctctgattatgattttggaatgtttgtggctcagtttagttgtgagggtgacatgagaagagttttagaaggccaaccctgacatttcaatcactgccttattacttgtgctaatcctgatgggttagacactctgtccccttatcaactttgttttctccctttttgatttagactaattctattccttttgagaaaaaatcctacaagcttgctaaactcataggtgataaggttggtgacttccttgaggttgatgaaaatactatagtttttggtctctttcttcgtggtagaattcttagtgatgtgtctaagcctatgagaagggggattattgttgattttaagagtctctcgtgaaaatagctcaacttcaaatatgagaacttacctaatatatgttatcagtgtggcatgtttgatcacattcttactaagtgtctcttacctgaaaaaatgtgatgagtacccttatcctcctcctctcccctatataattcctctaaaagctcttgctaaatcgttattcatacgtaatccttttggtctgtctaattctatttcatttgaggatatggctatcccttcttataatcaagaccaatatttagtggctgctgttagccaattccttaccacacttaggctggcccatctgttcgacttcgactggtttagaatctaggacttcggtgaataatattgggaattttctgtagatgcttagtactcctgagatcatgtctcacaatttgggtatgcctttggtttatctaattctgctccttctgcctctgtgcctcacatatcttctgagatacctttgagtgctatttgtaatcttcctagtgtctcttcttcgaatctgattggtactaatctttcaattagtactgctacccctgctcttaaggttcaagctaccaaacttcctctgaagtccaaggacaaaacaattctggggctaagtggtttgcttttacccgtctttctattctggtgggtgatgttgttaggaagatggtgaagagagctcgagttggttctacatctactgataaaaatcctcttgtacaagcgggtcttgttgaacaaccctgcctagaaaagtgagctttttgagttagaatgctcgtggattggggaatttcagagtattccgaaacttttcccttgctgtaaataggaataatcctatgtttctttttgttatggaatcgaaattcttgtctggtagttgtgataaacttagagttaaactgtcttttgatcatgtttttgaggttcctaagaaaggttttaggggagggcttttgttgttctggaaacaagaagttaatgttagtatttttgaatttctccttgaatcatattgacagtattataatgtttaatgataatattaagtgtcatgtttcttgcttcatgactttccctatttatacgataaagttcatatttggaatttgcttaataggctttttgatattgcatctcttatacattggctcattaaaggcgattttaataattatctctctattcatgatagacattgtagtgctgatcctccttatgtttttaccaattttcaaaattttgctaataaatttgatttgcaacctatacatgttggaaaccgttttacatggttcttcttgtggctcacagggaaggagaagcaaatgtggggagagagaaataattaaaaaaagttttgttttttctttataatattaaggatttaattttaattatttaaatttaattagctttttattaaataattagaccaattagaaattaacatgtggcatttaaaaagaaattataacatctgttaaaaaaggtacctacatatttaacggaaattaag

SEQ ID NO: 295686 - DNA, 9109 bp, Cannabis indica
caatttaatattaaatctcactttattttactttaataattattatcaataactgataatcattaataaaaccttactaattattatagtgcctctagcaattttaaaagtgaaatactttacaccaatataccaatatcgaattaggcaccactaatttcagattgtacttgcactaatataataaataaatatttttcttttaataattaatgaacttgacaggtaaatgactcatgaccatatcatttttctttctttatatgaaaaatattgttattttgatgcaagtatatgccttccaattaaaacttatgctttatatctaaacaagagaattagataacaattttctaatataaaactccaaacacaatatggcgcgtggggtacaaaatccgagtcatgaagaacacggtctctgactcactcccactaacgcggatgctggctcttacttacttgcttttgttttaacgtttcagtttaattccctcgttttcttcattttagctatattcgattatggattaagatttattttatcgactgattccttcctcttttgtcattttcttgcatacccatttgccattataaagttagagaatcgtaatgacaacatttatctgtatggctatggtgtttttggcttgtaatcaaatgggctttcaaaatttcaaaaaaaaaaaaggtctctgttcatgaaatgagttcaagttgtgttatcacagttaaattgaaatgcaacttttcttttttctaattagctgtaattaagtttgaagatattttttttttcctcatatgggtttctttcttaattgtcattatcaagatttggatttcagttcagagtctcagaccacagattaatcaaaatacccaccagctaaatcttgttattaggataagatattttcttaaatatgtctttagtgctttgtttctatgtgggtttatgctaaatacagtcattaagtgttggcttgttactattcccatctctctgttcatcaaaaccatataaagagttcactctgagcgacgatgaatcccatagttttaatctgtcgttttgtgctttgagctgtaagtgttaatgaaatctatgtgttttttaaaaagttgattcgttatataagagagtgtctgtatatttaagattttgatttactcaatagctgtagtggtcgtggtcagtgtgaggttgttagttgggatacggatagtgatttacaaaatggagatgaaattgtttaatcagaaagctatgtcagtttctgaaattggagtacacatggagagactctattcgagctcattttcttgttacaggaaccaacctggtcttaaattttctcaaaggctctgttcttgcccaggtaaaaaaaaaagtaccctttgatctaaattaacatttgagctagaaatgagcttgtggaagttatacttgagtcttgacatgatctttcttgtttgtttgtttgtttttcatgttcaggggtttctccgaataacagatatctatcgaaagaagttattagctcagttaatcgggagaaattatcaacagaaacgtatttatctcgttttaatggagcaaatggggtgacccaaatgagagtacttgaagctgttgatgatgagtatggtggggtggttgttgatcctgaaaaattgccatcaaaccccaatgcttttgcttatgtgcttcgttcatctctttcccattggacaatgaaggtaatttcaaccatgtttagcttaggcaactttcattcctgtcattttgctcatatttctcaataatttatgactaggaccaagatttatgtagatagaaggtgtctagcaatacctgctgaactatttgtggttacagactcaccatttgttaattctttgaaggaagttgaggtttcaggattttgacaatgggaacttgtttgagtgtagggaaagaaaggagtttggcttaagcttccagttgaacaatctgagtttgttccaattgctgtgaaggtgagtttcaatttgaccaatctaaaagactgtcaattttgatacaagaggaatctgaattgaacccataatgtctaataagttcaacttttggattgggttatctttttcacttatgtgttaataaagatgtaaaatttctgagacaaatcatttggttgcaggaggggttcgaataccaccatgctgaaagaggatatgttatgttgacatactggattcctgaaggcccttctatgcttcctaataatgcttcacaccaagttgggtcggggatttgtcatcaatgaccaaaatgaggtatgattacttgtcctaataatgtaaaagactgaaactgaggagaaaatcaaagcaacccatctttactgatattaacttattcactttagattctgttttattccaaaatacttgtttccttaagcatttcctttgtggttcttatatgcttcatctaaatcatcatctatgtttatgtcttttttctgttttaatctttgcatttcaccttagtgttctataaagtgattaggtgtagactgttaaagtcttttgtatgaaaggtgatgttaaagtgccttactacaggttcttgtagtacaagagaaacattgtgatcctgcattcattggtctatggaaaataccaactggattcattcttgaggtatatagaacaattttcaatttcttaccattaaagccatctagattgtccattttgtatattcttcattattattgcttttgtatcagtcagaggagatcttcacaggagctgtgagagaagttaaggaggaaactggggtaattttacatatttctttgttctattctatattgtaaaataagaattttttctttatcaaggtagtagtttatgaattacaacatcttaccaggctattccattgatagaagttgtaattctttttattgcagatcgacaccgagttcattgaagtcatagcattcaggtatcgacgacttgctataatttaagcttgcattggttgttgtgaatattttctattcaatctttgtctgtaaaattccactctttagttcctaaatatccttttcactaattttatactgaagtagttgtgtacatcttttgataccaggcatgttcacaatgtggcttttgaaaaatcagatttattcttcatttgcatgatgagacccctatcaactcagataataattgatgatcttgaaattcaagcagccaaggtacatgtttggtctccaccagagtacattgacttgtagtttttaatcttattgctactgctatcaacaaaattggtactgttatcatcacttttagaataactaagatgagcaagcatagaacaaagacttgaattggaagttctaaacactctttagtactctctgacttgtttgctttcttatccatggttgttgtgtcatctgctgtcattccttattgctgacttgaaattgtttttcttttttcggtacataaaaatgcagtggatgcctttagttgagtttgtggagcaaccccttatacaagaagactccatgttcaagaaaataatggatatatgcttagctcggctaggaaagcgttactgtgggttagcttctcatcaattgatctcaaaatttgatgggaaaccatcaacattgtactacaatgttatggagactcacaataccaactgtataggcaattaaggttattcaaattcacccagaaaaacatgcaaaaagattcatatcctgttgttatagcagcagattcttatccttggatctccttgagttctgattttgagtgaccaaagtgctgatacattgctatccacgtaaggagtactcaaaccatcttgaacatatatttaacatgtaattacaataacaatgacttctctatatctaatgtatatataggcttctatcattcattagtagtatcagtccttggtcattacccataagaaaaaaggcattgaattttgttgctctgtttgtatatctctgtatttatctttccaagtgtggagttgggctattttatttttagtggccagcatatgtgttattgaaaaaattatcttgtgatactcaacgcccaatgataaaacctttatgtatttttgtggactgaacttacatttttcagactatttcttgtcattatgagttgctgtaatttcataaactggtttaagagcaactactatgtgaccacgttataagatatctttttccttctataaatattgcatatataataatataaagacaatattgtgtgtcacaataaaaaatgatgcaaaaaaaaaagctaccaactaataagacaagacttacaaacaagatttcaactcgaatatagtttttctttttcttattagtttatttggtcgtgtttctttataaatattttacagtatatagcagcatttcattgcaacttttcatgtttgtttgtttttgtctattgcaactacttttggttgcgaaggtgattgtcatcgtgttctcgaaaaacagtcttggcattttgataaatccctcataatatttgccaatcttgagggttttgacaccctcactcctgagcaatattatgttcctttttggctccaagtccataacatcccctttggccaaaagtccccctagttggcccaaattatttctaacgaggttggtgacctcattgaaactcaccctctatctccacttgatttggtccttatctaagaataagatcctattggacataagcaaacccctaaggagggaaatgaatgttcgtttcaggaaaattactattatcaagtggttatgtttaagtttgaaggatacaataaatgtggtaagtacctgcagtgttgtgataagtacgttgttcccccacttcttgggtacaaagattcccttcgtgctccatctcaagctatcttaaaaaaggatccttttgaagtgtccaattttgtgcccttagaggattttttttgggtagggatatggatttgattaaggcttgcaacaagtcattaaccaattccttaacattggctctgactctagtggttttgctgctaacctagttccccaaccaggcactcagcgtgctcaatctaaacaacctagatcacaatttggctatgctgatacctatagtgctctctccacaatgccttttccccctgttgtgaccacttttgttataacccatgttattaaggggaaggatcgtgcccaatgtgataaggggaatggtttggctcttagcgagccttcaaggccaaatccatccattgtcataggcccaccaagaggcttgtctatccctagtcctactaagtttgtccctgttacggtggctggtgtcaaatggtccttttccaaacaaaacgtccatgtgggtggctctgtcagaagcatgctcaagagagtcagggctggtcaagctaattttgcagtggttcctgtgtttacttttcaatgcaaagaggcgagtgttgctatgcaaccccgcctagaaaaatgagtttcttaagttggaatgctcgaggtttagggagtcctcgagcattccaaaacctctcccagctggtgaaacaacatctgcctattttctatttcattatggagtctaaacttcaacttagtcagggtaaaaactttaagaatagactgctttttaataattcttttgaggtccctagaagagatttagggggaggtcttttacttttgtgaaaaaatcatgttgttgttaatattttattttactctaccaatcatatcgactattttgtaaagtttaatgatgaagtaaattggcatattacttatttctacaaatctgatacttggactttacttaatagactttttgatgttgatctcttgatgccttggatgattattagagattttaataattatttgtctttgcatgataagaatacttcttccaaactccccacacatgctatcaccaactttcaatctttcttgaataagtatgatatgcttcccatggtacatactagtagtaatttcacttggaaacatgagcacatccttgagcgccttgactggtgtgttgttaataatgaatggaagaatcttctccctaatgcctccttgttgcatctccctttctatggttctgaccacaaggcctttaaggttatcctcgagtatgatcttgggcaccaaaatgggaataaacgtttattctttgagaaccattggcttgaggatacccatttttatgacattgttcaatcttcctggtttgctaatgagactgactctgaggccaacaacctcaaactttttctccaaaagcaaactacttgcattaatagcatacagtcttggagcaacaatcatggcagtcttaggaataagattagggccacccaataaaacttggacaacatctctaactccactaccttaagctacaatgacatggacaaggccaaaactctccagcctctcttgacacttttctttacagagatgaaattttttggaaacaaagattgagagttgaatggcttagagcaagggacaaaaatacaaattttttttgaccataaagcctctagcaagaggaaaacttcattagatttaccacccgtgaggatagcctggtagttagggaaaccaacactatagtttctcactttgttaacttttacaatgtggtcgtttctgagatcctcgctggtatcaataatattctctcccattctcaggttatctcctttgatagcaccttcactgagaatgaggttaggaaagctctttttcatctctttggggataaggctcctggtctggatggttttaatgcctatttttactagaaaaattggaccactcttaggactgattttcgcaaagccattttgtctgtcctcaataataactctgacatatctctcatcaaaaacaccatccagacccatcagtctatgttctaccctttagaaagtggtagctaaagtcctagccaatagaatcaaaagggtgcttgattctatcatttccaacaaccaaagtatctttctgtctgataggttgatctttgataacattttaattactaatgagattgtacatgcaatcaattgtaggaagactagaaaattggggtggaccgctcttaagctgcatatggagaaagcctttgacaaagtggaataacactttgtggtggctcttctcaagcatgttggcctccccccagatttgtctcccttgtgcttaagtgtgtctcttctgtctcttccaaaattctggtcaatggttgtttttcagaggtgtttcatcctacgaaagggataaggtaaggggaccctttatccctttatctgtttctcctagtggctaaagggctctcggctgccattcgtgttgaagagtcaaacaaggaattttaaggtctctatatgtagaaatgcccctgttatttcccatttgctttttgtcgatgacatcattgttttttctcgtatcaatgttcaatctagcataaccatcagggacatcctacacacctataattgagctacaagttaattggttaactttaccaaatcttccattctgttctcccctaataccaattctgaagccaaagaaagtttttacaaccctttggggcttaccaatgagggttttgttagtaagtgtttgggagttccccaatgtgttggtaaggttaacaactcggtcttccattatttggttcaaaatgtctcttctaaaatgaatgtgtggaatgctaagttcttttccaaagctagtaaagaaacacttatcaaagttgtggtccaagttttcccctcttatgctatgtcttgttttaggctgcccagtagcacatgtaaaaatctccaaaaacttatattaaaattctagtggggtacctcaaataacaaaaaataagatccattggaagaattggcctagtccttgtgtctcaaagttctatggggggttggggtttatatctcttactagtcacaaccaagcccttcttgctaagcaggcctggagagtctgcacaaactccttttcacttttgctttgtctcctcaaagctcgatactttaaaagcaatgcttttcttgaggcttctaagggtcactgctcttctattcctggagaagtcttctttggggtagagatctcctcatgaaagggctggtttagaaagtgtgaaaagggaattccatcttattggttgatcctcgctgggttccaggtttgaacactctaactcctttacatgaaacttttccccacaacctcactgtctcttttttcattgatgatcttgggtgttggagcagaagcaagcttcagcagtatcccccttcttatcagatagacactatgctccatgtacctctcgaccctttaggtgacgattgcctcatttgggggcatcatccttctagcaacttcacggtaaactctccctatcattttgctaattccatagctgttttaggttctcctcctcctcctcctccttcttcacgtgattgttttaaaacttggtggaagacagtttggactatcaaaatccctcctaaaatcacacactttgtttggaaagcttttaaccatgttttactttgtgcttttaatctatttaggagaggtattattgatagtcctcactgctccttcggtggtaatagagaggagactgttactcatgcccttttaggatgttcccgagctaaatctgcgtggaagaactcttcacttcatcacttttatgttaaaaataaatattatggcattaaagaatattttcttaggagttttgacactcttaatatggatgatttcaacattttccttcttattatttggctgacctggtttagaagaaatgactgcctctttgaaaagaggttcacacttttatatatagaagatataactaacaatcttctgcaggaatataagaatatccaatcagcatccgcaagaaaaagtttgattgcaagcaagaagtacttcagctaggggtgttcataaaaaccgaaaaaaccgaa

SEQ ID NO: 295687 - DNA, 8879 bp, Cannabis indica
tttttttttttttttttttagcgtcttgtcttatcttatctatgttaaaattttgactagtcttgtttcatttacatctctatctaaattatggtttgaaaaaatgtgtatgaaacagatggttaaaaccctaatgcatattttactatgcatatgtaaatgaattacctgaagctcgaatcgtctgcgcctttatgggttctgacgatgtgttctaggcgatacttagcacgatgaaagtcacgtcgacgattagaaagtagaagagcagaacaacccatgcgaaagaaacaattagggatgagcatagagcgatcattgccagggtaccaattgtaccctaccatctcagtactcacaaccacggcgtagttattagggtttgcttggagcatatcccgagctagatcaacggctatgatccccgcactacaccccatcccaccaagattgaagctcaaaatattacctctcatcttgtagtggtttatgatcatagccgaaagagaaggtgtagggttaaataagctacaattcactacgagtatacctacatccttaggcctcactcgagttttctcgaatagctcgtctagggctccaaacattaccattgatgcctcagctcgaccttctttcatggtcgatgcattctcgctcgacatgatcactgattttgggatgtatgtttcatccccaagccctgatgagttcacaattttcttttggaataataagctttcttcttcaaattttcccgattttcttgcaatttctatgaactcttcttttgtcacctgtgggcatatattaattactttatgaatattaatttattgtatatcaaattagattttttttttgttctttcaatttttctaacatataaatatttttcttagctctctatcatgttataatgttaaagatttattcattttgtaaaaaaaaaaaaaagatatgtagagcaagctatatgtatatatatcaaagaaaattaagacaaaaagatattaatatttataatttttttgatagtgtagagcattaattaaccaacaaatattggaataataacatgtatttaattctaatactaaaggtaagatgatttttcttttttttgaaaatgtaaagataagatgatcttatcaatgtttagccattaataacaccgacacaattttttgttcagaaaaagtcatattaattttattttagtttatttttacaaattaaaaaaaaaacttatatatataattagttaacctgaaaaaatttttgtggtacaaaacagattataacatattaaaaaaattatacatatataatttattagaataatacctagaaacgtttaaccattcacatgcattcatttatattttatttagaaaattaggggaaaaaatagataaaaaaatgttaagaataaattttaattttaaattgatttgatttttttttttcttcaataatatgatggagcgtaaataaatattcttcttcaactatttttttttttaattaattaaaatccaaatacatatctatttatattatatacataaacaattcccttaatctgaattttagtggggaaaagagaggaaaagagaaatataaaaaatacaaaaaaaaaaaattaatttcttaagtttagtatgaaaaaaaaaattagtatccaaatatatttaagctaatgatttgaaaccgaaagggtgagaaagaaatctgtaaccacccaatcacacataacatacatatacaaatttgtatatgtatgtattaaattaattaataatataattaccttaagattatcattagggcgaaaacaagcgaaatcgagaagataaatcgatcttggccgagacatgaaataaagcgagcaagtgaagacaaagagagcgaagaagccgagcagagtggccaaatcataccgagcatcttcccaaacttttttccaaagctcttctctgctcgtcaaagtgttacccacttcagcactcaatacgagcaccaccaaaggaatggtcaccaaatatattccatgattgatcaaatggtggtaacctaatttcacgtattttaagttaactgaggtaacaaagtccggcaatttacgccggactctgactgagaatgtcggggaccctgcgttgggccccgagcactctattcctttgtttactatctctgttgataacagagctctttctttttccatgatatttttatgatgattaatattattgtgttctaataacataacatatatataataaatatatatgtatagatatatgtattggaggtgggtggtggaatagttaatgatgacaactaacttgatgagattgtagttggggtgattttaattgctttaaattcgatcatttaatgatactttagctactatatatataatataagagtaatattgttatttactagtggtgtttagtattttttagaagtatatcgttttatgattggatagtgatattttttaaaaattattatacattaaattatatggaattcaatacttacttagattaataagaatattgatatatatatatatatatatattacatgctattttaaaatatctctatatatatataaatatatattaatttagtatatgtatttttatttgttaatatatatatgtcacggttaataaatttcaaattcctagctacctacctatacatgtgtatatttattatggttctatattggcctatccatccactcggttatagagggttataattaaataataataaaaccctagcttgtgtgtgagggaatctttactttgctttctcactagctcgatagggttagtttgtgtgtgagggaaccttgttttgtttttaattcagctcaactgggttagtttgtgtgtgaggaaactttgttttgttttttacaaaaattatttgcgattaaaatatagtatttactattcaatagaagttattactaatttaattttagccacaacaagtattgcttaaaacacatttaatgacaataaattgtaatttttatgactaatattttaaccacgaaccttttagtaataacataaacatagtgttttataattagtgataatttttccacttttagtcaaaataatttgtaactattgttgtgactaattaaaagaaaaattttgtgttatttacccttattttacttttcggtactcaactcattcaagttaatttgtgtgtgagggaaccctaattttgcttttaggtagtcagcttgatcgagtaagtcgtatttttgcttctctgccctcaaatattgataaaacctttcatttattctatttgttgtattttttttcttttttttttctcaaaagttatattttggccctcttaactttttttctttcttttggccccccttaaatctcatatttcagcctccttctctatgcagggacggagggacttaagccattgtgtaggcttaagccctcactcaattttataatatataaaaaaaaattatgttacatatatgtatttaaatttttgtttattataaatgtgtattaagccctcactcaatttgttcctgcccaattttaaaggtaataccactaaaatttaacaccaaattcaaaaaaaaaaaaaattattttttttctaagcacatatgtaacactctatttaacatacttttttattttattcaatttttattcaaagcccttgaaaaagaaattattcaagccctcactgaaccgaatttctgggtccgtcactgtctctatgtgaggggaacccttgttttggttttaattaagtacttaacacaattgagttatatacgtcggtggtgctttgatcaagtgatcattaaataaatatacatttaatgtctctttctaccaacatagtggggatatgaaaatgttttgacctataaaattgtcattaatgactagtttttatagtagtgtcttttgtttttatagttcaatatctttgacagtagtggaagcattgtttgtgtcaacacttagtttagcttgacacgatttggtgtaatgtgtgatttttgatcagatgtctaaagggcgcaacattggctaagtaatctcaggatcacggtggtcttatgggacacgtaaaggttggtctcggcctcaggcaagggtatcgtgatgattccaattttgtgctaggtttagtttttattagtcttgtttcttttcttttggttattttcgtaataatattggtatttgatcattttgtcattcgaaaacgttagctagcgcttattactttattttttttaataatctctacccttgtttaaattatatctgttatctaataaatagtgtcgttaatgttgattcaattttgagtatggtaatttacctatagaatttttaataacgtaaatcttatttggaaaggggactcgagtgagatttgcctattgatttttggtgtatggcaagatgttttaatttttttattttatttgttgtataagcatatttgacttttatttggacaatctctaatttataagatctttacaattatttggttattgtttgacccgtaagcctgtggtccattttagtggcaaatgaaaatccattatatataatatgtattaacattaatagttcgattggttctaagtacaactaaccaaccacactgctctaaggaataatttaggaatacataaataaaaactacaaattttgatctggcttatttctttaaataatttgttgatgtattactaacatggtgttagtctagcctagtttatgttgctcaaacaaaatatatatacatttttaaagttaatgtttgtatgctcaatgtcaataaattaattttcgggtaatctaatactgttaaataaactctcgcactgcttctatacatgtaactaatgaccacatgaacaaatggttttaaaaatgagcagaatataaggaagatatcagcaacggtttgtatagttcagaaaaaattaataggcaaaactttacaaaaaccataattcaatcaagggaaaaatcatatttatttttaattattaattctgaatttataagttgactattggtaagatgagatatagaaataatatatttaattaatatgaaatttccaatatgttctatagtcaatcattcatttaattgagtgaagaaaaaacagctaagaaagatggtctatactaattgagtagttattacttagttggttttttgtacatagggtcacacaagttgctttttctagtattaaagagttaaaactaaaagacatgatgaattagttgtcatttccatctccaaagtcccaacccatccacgtgttttaggcttaattgcttctacctaagtacctatatattgcataaacacacttgaatgcttcatagtgtcataattttataattttgttccatttatatattttggttttaggttaatctctaaaatatgtcatggaagatttttcacattctcactttattggtcgtgatatcataagtcataaaagatacatgtttcatgtctagcaacattggtcacacgtgttgggattaaactcacttaacatgtcaagtcaataggcccatttatatgctcatcaaatgaatctaaggaaagctgttgttatttataacaattggctttaataccaacttaaaggggaccccaccaacaactataaataggagtgtctctactctttcaaatgagttatgagtctttaatctccaagctcatactttagattcagtttagaaatagggagtctaagatcatagtgagtgtgcgtggaggaatgtaaaagggagtatcactcttgaactgatttctctcaatgtgagacatttttgtaatacttaactgtgttgagttgtaatcttgaactcattctattgtgtactactgattattcctattgaataaagatccatcatacattcaatatcaagctaagttttctttatctatttttcaattaagttcaagttttgattttatgattagtgttagttttgaattgtatttcttagatattattagtgttgtaacaacttgttttgaaggtgaagattaaccacaacacgcttagttttaattttattacttacattatggctaacattgttcgatgaaaaacatacataattgatatatatttatgtatgtacatagatttgaaaacaaaaatagaaaaaaagtagaataaacaatatgaaagaaatgaaaaaaaacaaaatgaaaaatacaagtgaaaaatacgtaaaggaaaaatgaagaaaagcttgaacaagaaaaagtaatgaagtcttttgtttgtaaagagactacttttcactatttacagaaaaaaaaatatttggaattaaataagtctttaacatattattaggttagagctcaatagatgagaacaaaactagaaacaaaaattaatccaagctcaacattatttacaaagatattcttgtcaactatagactcagaaacaaaattagacactttctgtcttaacgtttatttcgccaaattataagcaggagttttttttgtttattaatttgtgagatattctcaagtgaaaatttattatgttaaatttatacaacattttttcatttagtcaatctttaaattaatgtacctcaataattatctttcttagataacaaacacattaatcatgtcaatatatcatctttttatgacgaatattccatgtatttcaatatatttgttacttatatgcaaagtatagatttgactttggtaaaagtgagtttgggtaatagtattttcttaaatttcccaaaataatcatagtgtataaagtttgagtgggccttaggaatgggcctaatctatcttagcccatggttaaacctgtaattaaacgaacaaatcttatatttattcaaggtgatatgaaatttattttttttcaaatgaaattaagatacacattaatatgagaaaatatcgaaataaaagttttattgagtaatagttttaattgttcaatgaaaattttataaaggaaattataacatgtatttactttatagctcgtggatttatgttgtgacacgctcttagagaagaacgaaagctcttgaaactgaatgacattgggagtactagtaacacacctactttctttcgacttcaaacaaaattactcaaatgcccattaattttttaataatttataaattaacttgcatcatataattaatgatatatgattaaagcaaatcaacttggattataccttatgttagaattttaaaataaaaattataagccatgtgtaattatacactaaatttattaggttgtaaatcttaactccaatactgcaatcattacttcaataatgaaatgatcaaacaccctaaatcaaaatgcattttttttgcaactaaactctgtaatttttattgtgtttggatttaattaagatgatgattttcttataaatagaaatttgaatttgatgaacattttgaaaaaaaaaaaaataaattgaaatctcatttcagaaatattttgtaatttttacaaatacttgtgatatatagagtattattaatttatcaaaaccaataatttttttcattattatcttcttttttaatgaatactaattaatgggcaaaattctacaaaaaatcataatttaatgaaaaaaaatcttatttattcttgattattattattattaattatgaatttataagttgactattggttaagatgagatatagaaataatttttttaattaatataaaatttccattatgttttatagtcaatcattcatttaattaagtgaagaaaaaacagctaagcaagatggtcaattagaatttttttttttttttactggcttttcaagaaagcacaaaacgaaagacaacgaaaacaaaacagactggagaaaaaccagccaagaacacagcaaagtcccagtggaacataccagaacatagaaaaacaaaggtctaaaactaatcaagctaagaaatagactaaacaaagaagctaaaactaaactaaagcaaacaaacagccatctgctcaaggagaaagcagggaactgttaaaattggacagatcgatactcccaaaattggacagatggtcaatagtaattgagtagttattacttagttggttttttttacatagggtcacacaagttgcttttctagtattaaagagttaaaactaaaagacatgatgaactagttgtcatttctctatctccaaagtccaaacccatccacatgttttaggcttaattgcttctacctaagtacctatatatggcataaacatacttgaatgcttcatagtgtcattattttgttctatttatatttttttagttttaggttaacctctaaaatatgtcatggaaggtttttcacattttttgttggtcgtgatatcatgtcataaaagatacatatttcatatccaacaatattggtcataacatgtgttgggattaaactcacttaaattgtcaaattagtaggttcatatatatgctcatcagatgaatctgaagaaattattgttatttataacagttagctttaataccaatttaaagagaaccccaccaacaattataaataggagtgtctctactctttcaaatgaattttgagttctaagttctgatctctaatttccaagcttatactttatattcagtttagagagagaagtccaagatcacagtgagtgtgtgtggaggaatgtaaaagagagtatcactcttgaagtgattttcct

SEQ ID NO: 295688 - DNA, 3473 bp, Cannabis indica
ttttttttattttcttcttttctttgaatttaggaatttgggttcaatatgggttttgtagtttcctctttggattgttttgaatatgctttttgtatgaattatttcttacatgtttggttgctgagaaaatggaagacttgattagattggggtttaaagtttgtttttcaaggtttgaactccaaatgaaagacttgctttttcctgttagctatgcagaaaactttatggtgattgctatcgtacttactagttctgttttgttttgtttgaatttgctattcccaaaatgaaagttttgttttttaagttatttacttttatgcctaactttgttttgacatttctgcatacatgattttgctccagtgaataaaggtttttctctgcgcgtgacccgttctcttctccaattctccacacacatttgctagccccacaacggctaacatcctattttccattatacctccaagtatatagatatatacatatacacacaccctttaaatctagtaaacatatttgagtacccaaatggaggtcaagctctggaacgacaagcgcgagagagaaatgtatgagaacttcgccgagttatatgccattataaaagctactgagaagcttgagaaggcctacgttcgagacataatctcctctacagagtacgaggccgaatgccttaaactcattgcccatttcaaaaccttaagttcctcactcaaagacaccatccccagcatagagcgctttgctgacacttacaaaatggattgctcggctgccataaatcgcctggtgacatctggggtgcctgccacggtggagcaccggaccgcttcttcctcgtcgtcaaatacatcagctgctgccgtggcagagtgtacacagaatttcatcactgccatggattcattaaagctcaatatgtttgcagttgatcaggtgcaccctttgctctctgaccttgctacatcgcttaataagttgagctttttgcctccggattttgtggggagggtgaagttgaaagagtggattttgaggctatcaaagatgggtgcagcagatgagttgacggagcagcaggctcgtcagcttcacttcgatcttgagtcatcttataactcatttatggcagctttgcctaacgctggcacttgattcgtttctgtaagtatgtaaataagaggatatgatctctgattgactctacatattttgttatggtgttaattataggatatatgcttggttgaacctcagtgattcctttcctagggatgacttactatttttgtggatatctgatcttagatgaaagatctgattttggtacaatcatatgttagtagtactagtacttgattcctaatggccttttattggtactatattcatcgtgctacttttcattgtactatgctttaatttcattcttcttatctttaaattggtattactgcttacttgaaacttgttagtgaatatcttctgcaacatttattattgtacattattctttctggagtcaattgaactcaacagtttgggttgaagacattttaaaagtcaatataacgattatatgactactttggcttgagagagcaggtattctgtgcccttaaatctttatgctccatccattgattgtttgcttgggtggaagtaggccaaaccgttataaggctagtaattttggcaatgttgatacatgcttaccttttgcttcatatactccttatttgaacagccttgcatcttatttgtatgctccttatttgaacagccttttgcttcatatgtttccttatttgaatagccttttgcttcacatactcctcgtttgaatagccttgcaactgattcagatactccttatttttttttttttttgacgtacagatactccttatttgaacagccttgtatctgattcaccaagccttgatgccttactataaatgtattagctctgattcattgagccttgatgccttactattaatatattagctcatatctaaactttaggaattaaccattaggatttcaaagtgggtggattattggacttcggcttaagtaaacaagtagttgtgtttgtctgcctgggtgtcaaacaaggactatttaataagaagaaagccagtgattttagctgttgagaaataatcggttttcctttcatttttgcatcattttacctttatttttctattctaacagacgtgcatctgttcagcactcgatttattcgaataaattgttgaatattacaagtattactagtaattttatgagtttaatagttggggttatgagcaaaatgactaaattttgactttttttttttctttcctatgcaaactgaattttgatgtttggttgtcatatacaaagtataattttgatcatctaattagactaattccttcccccttatataaatatgttttgatttcttccccctttatataaatgtttggttgattttcacaaagagcatggatattagagacattaatggtgtcaaaaaactatacgtgaaatatatgggagctgatatttgattcatcttatcggttagaattacactcaactagcctaaaataaatagaaatattctttcattactacaattctttttttatttttttttgaagaaatcattactgcaattaattagccttcattcaattgaatgtcgaaatattttaggatatatataaattaatcaaatatttttgtaaattaatgtggcaaatgtgccaaactgagcagggaaatgactattaaaaaaatgtgtgaaatatgacgcaagtgcagtctccataaatgacaattttgatcattttattttcttaataaaataaaataaaatcttctcaatgaaacaaacgcattcacaaaattcatttaataaacttctcacctaatattatctctggtctctcgatatgtagaagggtggtggatgcagtggtaaaaatacaattctttgtttgacaagaaaggttatttgggacagtgggatagaacaaaatcttaaaatttgagttcgaagtatatttttatctaatgaaagaattgtagacaatttttttatcagaaaaataaacattggttcgtagtttttattctaattctgtatagatatatagttttcaacttacattcccatcttttttcccaattagatatggtttggctttggcaaacgaattcttcgaaggcctcataaatggtgcttgcttgacacaagggactagtgtcaatagtttttcttatagtatttattactttaaaatatatagtaatagcattccaagctcctttcaaatacatcttcatttaaaaaatttagaaaatgactctcaaaacaatctccattctaaagaatttatcataacactaatcattctttaaacgtttgtttgaaatgttgtattaggtcgtattgt

SEQ ID NO: 295689 - DNA, 2838 bp, Cannabis indica
aaaaaaaaaaaaaattaggaaattacttgtaaatttagccatctttaaaatatgtaaacattatatatataactctaaatctatgtctttactttcactttgatacacaacctggtaaaaattacatccaattatataaaaagacaaaagacattattaaaaacaagttgtaagagagtatttttcttacatagaagaataatattacataataacaaatataataataagtacatacataatgatgatgatagtgtatccatttttttcctttggtatatatgtatccacttcatctatatataatatcacatacataacaacaaattagcccttaaaaaagaaaataaaaacattattattatatatatatatataataataaattagagtttgacgacgtcaggaatatgaacgggataacggtcaatgcaatcagtccaaggaccatccgacgtcgttttgatagttctattacatttccaaacggcactgttacacttaaatccacttccaaaagcaatttgccaaatcctatcaccttttttcattcttcctttggcttcaacataagccatttcataccaaagtgaagacgacgacgtattgccaaaacgatgcaaagtcattctagaagcctcacagtgctcagctgacagctgtagatttttctgaagctcatcgatcacagccctccctccagcgtggatacaaaaatgttcaaatgcttgtttgaaatcaggaatgtaaggtttccattttggattgaatatcttccgtccgattaaactcatcaaaaataataattgttctgatgcgggcagtaccagcggacctatcgtcgttatgtttgactttaatgcttctcctgctatagccattagatcctttgatagtgaaattccaactttaccctccttgtcttcctcttcgtaaacgcacctgatcattgttttgtaaaaatatactcattatccaaatactactttttaacaaaaatatgtaagaaaattctattattattatatatttttaaataatttataccaaaaataaaattccaacagtaattttactatacacataagaaaaaaaaattataaattttttggcaccaaatattgttttaaattttttttaaaatttacaaataatcttaaaaattatacgtataattattaaaaaaacacttttgaataccaaacttgataggtgtgtactataaattttttctaaattttattagtaaaataatcatattagtattaattatgtaaattgaaaataatgtttattcggtattagaaaatatttttagtcacttatttttttagaagattttaaataatttaaactaaaaataaaagaaaataatcagatgtgcaattaaatactaaaattatatttataatattaaatattatttaaatctttttaaaatttaccaataaccttaaataattactgaaaaaaaaatcactcttgaataccaaacttaatatgagtgtactataaatatttttaaaattttaaaataataatatttattcgtccccaaaaattattttagtctcaacataaaatttaatgtaattatttttctaatttactattttttttagtttggaaaatttttgactaacctgtaagccttgtcgtcagatcctttatgtgtccgtacaacatgtaccaacctatatttggctctccgccgttccgatctccggttggagaggagaatggcggcgccgcccattcggaagagacaattgggcaaaagcatggctctctcattcccctgataataatttggggtaataatttcagtacttatcacaacagcgttcgaattggggtgaacctgtagaagatcacgagctaagtcgatcgagattactccggcgctacatcccataccggaaagattaaagctcttgatattacttctaagcttgtatttattaataaccatggcggataaagaaggagtaggcgagaataaactgcaattaacgattaaaatatcgatatctttgggtttaagccctgttttttgtaacaaatcatccatggcggagaagataacaagctcagcttcacctctagcagcttccatagttggattaggaggaatgtaatgaatcgccggaggtaaacaagtttcttcacccaaaccagaacgttccaaaattctcatctgaaactcaacgcttttaggattgttcttcaagatgagtcttgaatgttccatgaaagtagagaaaggaactcggcacgtgactggtggtttatagcacgtgtaatcgactaaaaagacggttctgggttttgacataaagtaaacggttgcaacaaagacgataaggaaagcggaacagaggatctgaactaagtcgaaatgaagagatttccaaaggcttaaaatctcatcaggacctaaacgaagaacctctaaaccaattcctaacatgattggtattaaggtgagtgtgataatgtggtttaccaagtattggtaacccaatttcacgtacttaagttttactgaatttgaaaagtctggcaaggttggagccattggaaagaaagaaagatgggatttttgttgtttaatttgggattttgattgatataaagtattggtagaagaagttggggggatttaaaggaagaagagggcaatgaattgaagatggcagatgagaagattaaatgaaggggtcttcacgtcactcaacgctcacttaactttgttattaatattttcataactttattattatcaatatcagcctccctcttgaaatatttagtgggtcacgaatttttttactttta

SEQ ID NO: 295690 - DNA, 6019 bp, Cannabis indica
ctctctctctctctctctcgactatgtgttactatttgaaaatcttggctagttaaggtagaaaacctatgtaagagttttatcaagtagtttaagaaggaagttgagtttggtttaaaacgacgtttttggctttgttttggtttctctttttcccttcccattcacgaactcgcccccaaaccaactcgtccgactcactaactcactctctctcggtcgccatggccgaccttcctctacagaagatagcaatatcaggcccaaccctagcttctctcatccaacgcatctcattctccccaggcgcagtcgacggtcttctattcggccacgtcacacacataactccctccaatctctccgatgacttcccttccaccactactccgacctctgattcttctcctctggtcgccactgtcaccggattcatctgctccgggactatcaacagtttctacgactccaccggaagaatcgactctcaggctctcaatcgccttctcgccggttcagaccaacatcgcacgctcattggttggttctccgctcgaagaaaaacccagcttcgaccttcaattcgtgaattctgtgtctcggcttctctttccttaacgactgatctttctatccctatcgtagacaatccgatcgccgctaatcttgcctcgtgtgtcttcatactctttggtactccgtttcttgaccaacccattcatacccacgagtacaggggttaccagtttcggacattagctcgatcttttgagcccaaatcgatcgacattgtcaacattgggcctgcgtttcgaggaaattacggttctttcagtcccaactcgccgtttcctctcttgccctgtgagctgaggacttcgcctatgagcgaggacaggaacgatgagagtttgggtcagaggaaacaggtgtcgaagattcagagggaattggatgtgtgtgcccagggtttggaggttggggaacttagtaaacttatggggtctcaagccatgaattatacaagtggtgttgaggacatgtatgagaaaatgcttgcaaagattgagaatttggctagtcttgtggagaagagctcagctaatgttcttgaacaggtaacaacttgttcttcaaatttgggattctttgttcgtatgggtttatttgttgctgtttatcataactgtttatgatagagatatctgaaatttgtattacttgaaggaaaatgtagagatatatttttcaatctttgtagattaagatgaattcttttctgttctttttctctgaaattggcaggaaaatcataataggaagttaaagtccaaaattgctaggtttcctgcgatggaataggtgattggctcttacttctgcctttcgttttggtcttatcaaaggtaatttgttttctatattgtactttaaattatcagccataatatttggtgatttatttgtctttttgagatgataatcacaatttaatggacatgtagtctaatgtttcttttaactgaaaatgaatgagtttggattaaaagagaaatgcaggaaggagtcatatgcatgtttggggtgttgatttagtttttggttctttatttccagcatacgatagcgtgtgagtttgaacaaatttctcccattatctacaagtgttatggttcgattgaacatattaatcagtattgtgaggctttggaagagacgtggtttgtccgtagttcagagtttgtaagagtcgtagttcaggctcaccgagggtctaaatcaactctcacagaagctggtacagtagagagcatacttctaagtataatcatccacttctgactaatgttgtgggttatgtgtttgtgtatatgaactcttgttgcttggacaagggtggacaagagacggattgagagaaaccaaagagtgaagggaatggattttaaaagttacagtatttgtatgatgtgggaattgccccttgagtaaggccaatagttgcatctataaattagtcatcttcattgtctacggtttatcttcagaacacagagtgtatcatgtctcttcgtgtcttgttatccaaaggaaagactgtccctcccatgaatttctctttacatatatcttccttcttgctatgcattactgttttagcttatcatcttaagcaatgtcctgtggttgaatttcactggttgaaaatttcaacattgaggctactagctacttctacatattgaaatatattttcaattacatttttctctgtcaacccaacactaccctcttgtatctgttgcttttgtctcaaagcctttttcttcaccaaataccctttctttgtttgtgccctttcacctatttccgttccctcactttgacatatattctttatgtatgcttcttccaagttttgtagtcttgtacgatttcatttcctagatttgagattgtccaatttccaggcccattggtggctacattatgaggatggtgctttccgatttgccatcgtagcatctgtagaattggaaaaccctgttcaataatggggaaaacctacttattgatatagttatttaagtacataaatgaataacttgcctatatctactgcagtttggtcaaaattgttagtaaattttcactctccttcatcgcatgataagctagacttcttttttgccttccgaaacctggaaactcatacaatccacatgaaagctttctgtatatcttacattattcttcttgttgaaccaatcaatgcagacaagtgtgatcagatattgttgttgatgagctaagtagttcgggaatcgggactttgcaccgggtacaatcggacgtttttggcaccttttaggacaaaaatatcaagaaactgcaggaacttacttacattacttctcaaagttcagctatttcagataaacaattttacccttgaatttgaaggtaaggataaccctcgtactgccttcttcttcttcttcatcttcgtccaagtacatctgcagtttccttcaccatcatcagtcctattgtatcattcatgcttctgctattttcttcaaacttagaaattaatctgtattatataagaagaggagaaagaaagctagctataatgtacactgttttggtctcattatattctttttcttattatcaatctttgtcatacatatttagtattgacctaattgtgctaatcttgacaaattcacttaaaaagagcaagaaaatttgattaaaagttgaccagttagggatgatgtaatgtaacctttgatcacttttatcatatctatatatgaaaatgaaattggataagaacaaaattcaaataaacaacacggtttttagtaaatccaaacaaatggtttttgtctcttgtttatctattttattatttattattacttttcatcattttgggtaaagatgaagtgaaatggtcaaaaaaaattgaacaaaaaaaatagacttgcgtgcccatattttgttctcagcctgaaaaaactcgttcatcatatctttgaggggtcccaaaaatcaaaagtccacagaattaaaagccaaaccaaagtacttatttggggcaaaattttgcaatttaattataacaatgaaattcgtttttttttttgaaatttaatatatatatttcttaataatgaagtatttattttctactaatttttttttcttgatataatcaaaatgggatattttaaatgatttgataaaggaaaccgagggtaagtttggaatataatttatttgaactgtggcaagtttggaatttaaaatgatataaattccaagtgggaaaggcttggtgggcaagtaaagaatgaaactggtagaatttgcggctgcagtgaaaacaataaataaaaaaatattaagagaaaaaaacaagaaaaagagaagagcattaaatattgtgagtagctcatcaaatacatcatcatcatcataagtttctcttttcctttcttcttccttaagactgttcatatttcgtttatcaaaacaaaagacagttcatatttcagctttgttatttgctttgtttatttgtggtaaataacactaatcaaaaaaactattctttacccttcatataaaaaaaaatatattttttaattccttttatcattcatatataaatctgtattaaacccttttgagaaaaaaggcaaaagaagaaaaacaaacaagggtttatttcctaaaaccccagaatataaacactattgaatatggcgagtgaggtttctgacaagtaagttgatggtaatatcttatagctttttccttacaatggttttgtttttctttctatttttgtttctttctctagttcatgttgaggttgaaaatgttagtgtttgatttcaggaacaaaaagcttaggaagagaagaaatggaagtgaatcaatagctgatacactagcaaaatggaagaactacaataatcaactttcttctatagaaaatggaaaagggtaccttaaaacacctgccaaaggctccaaaaagggttgtatgcgtggaaaaggaggacctgaaaactctgatttttacttcaggggagttagacaaagaacttggggaaaatgggttgctgaaatcagagaaccccataatggagtttctagtaataagaaaggaagccggctttggctcggtacatttgccactgccattgaagctgctacagcttatgatgaggctgccaaagccatgtatggtccagtggcactactcaacttccccgaaaacatggctgcagattctaccgagcaggccaccaatgcattctcttccaccaagatagaagaaacagaagaagatgaggagctagacttagatattaagcataattatgattatgcagaagctgattttgtgaagggatcagtagaaaaacaagactgttttcggggtttttctcaagctgcacaaaattcatgtactagtactaagactgtgaatgaagatatggagatagatgttaaagatattattacaagcaatgaacatagtaatactggtctttactcagctagagattgtgaactagctaatgatgttagaatggttgagagacttgaaaatttttcgggctctgctgccggttcatcaagaagagataattacttacaaactaggggaactactgaaacattggctagagatcctgaactctataggagcttagatcagatggaggaaacacaactgataccgagctatgatttcgatttcttgactccagattatgatttcggtttagcagaagaacaagagaaacttcatttatggttcccttagctattcataggctgagctgagaggccaacagcctgaatttaatcaatgatccatatgttggtgaagaattttggtgaagatgcttttattgtttcttgtttcccaagctacatgtcattgtacattcatgatgataagtattaagtcttcatttctttttggttgttgtttatggtataagaatttaggaatagctagaagttgcagagattttggcacaaaataagggtaaatatagttttagggtagtatagtaaaagaaattctttacaaaagcattacatttggtagtgatttgaaacttgtttgattattttattattgatagatgtttttattttactattattgctattattctttacatttggttcccactgtccctgtctaaaaaatacaaaatagaagttctttacaaaatctgactagagaaagttgatttgtttttgaaaattgtaaattggaagcatgtattgactccccaaaagaaagtgtaaatacttggatgtaaagcaaaggagtattagcactatgaaattgaattatgaaaatgtgaataagtaggtcttaaagatataaagaaatactataatttatataaattaattttattcccagaatttttttcactgcctagcagttttcacttttttttctttttttttt

SEQ ID NO: 295691 - DNA, 7298 bp, Cannabis indica
aaaattattaaatttttctcattatgcattggaatgatctttacttttatttcaaaatggaatagttatttcaccaaaatggtggaaaggccattccaatactttaatatgcaacaaaataaaagaatagaataaaaattatttcctttacattctattcaatttcattacctctaaccaaacaccattctccaaatatttatcttggcaatcaagtttttgagttttaatattaggattttgagatgtgaattaattaggctctctcagattaattttttttacaatttttttagtttttgaatgatttgtaaaaagtatttgggagtgcacaatatttagaaaattttaaaattatccataaaaaaaaaatcagaacacttgattgttattctttgcaaaactcaagtacttgattgtcaaaaaagaaaagagactgaattgctaaatagcaaaagctcaggggcatgtcagctaaaataggtgttttaaaaagttccaattacagaatagaattaagactttctaatacttattttcatgcatattttcagtctagtgtttcaccatttccatgtaatgcacaacaagctttaactgatagtgttgaacaatcatcccaagctttaccaagaacagttgaggatgccaccaatgtagctgaaaaccaacttgtccaaacaagttgtggagttagaaaggaattaccagaggtaaaagtgggatatttctaaagttaatttatgattcatcttttgaataattttgtttgtaatttattttgaatactttgcaggatctttttaccgcaagctactcggtaatgcctacaccagtttcgggctggcaaactcgtccgcctcatgttatggatttcaattatttccataacacaacggtatgtcttgtcttactcttatctttctcttatattctttaaatggatgagacactaacttaatttcaaatcttacatattttgattgtcacgtttactttgtaactgaaatcagaataatcaatgataaaaatagatgagttaaaaatataaaataatcaaaaataatataattattatgttgtttactaaactattcgtgaataaagaaatcacaatcatttagggtagaatatatgggactctttacacaatgaggcctttttaaagagcattgttttggggtttttgtttttttttaatagacataatgtaaaaatgttaaaattaggcatttttttagaaattttaggcttttttttgggaaatttaattttttacaaaaatactgccagacggtattttttacttttttaccatgttttttataagtttcatattgcagtataatgtattaagttttcactggtattctactggtgttttgtagttgttctactattgttttaagttgttctgctttgtattttactggtgttttataaaaacacaatatttttaaaaaaacttctgtgtgacagtatttgtgtaaaaagtaacccagtaaaaattaacccaaattacagtatttttgtaaatttcttttttttttcaaagaatcatttagtaaaattttagggccttgagcccatgccctagttgccctacccaaaaaccgacattgtactcaactgtagcaatcaaaatgtgataatattaaacactactgatacctttaataatatttcttaattacgttttgtacataacttcaccgttatgttttcattcacagcctatacaatcagcaaaatcaaccaatccattcgatatcattgatgaaggaaatgaggtgcaaccaatattgctttgtgtgtttaatttctactttcattttttttttcttgttatttttaataatctctcatgtaacttggtagaaaaatgaacccttttggatgtagaagtgaatttcaaattattttcatttgattaataatgcagttgaagacacatgatcaattaacaatcaccaatgattttatgattcctcctccacagtcacactacattgattctgccttatctccttgtaattattttcacttttatcatttctcattagttttgattttttattatttttttttttatatctaattaatcatcttatattatatatttacagggcaacgagtgcataataatatacaatctgccgggtaaagaattcttcttgtgtcttctgtaaatatttaatatatttttgaaaatttttataatggacctcttaaaatgggtctattgatacgtctcttatctgttttgatatttgagagaattttttaattcaatttttttcatgattgacaaatttagaaaaaattaatatgtcgaaaataaggttcaaacagtttatttcacacacgacatagactgtttgaaccctgttttcgacttgaatctctcaaaattttacagtatgtcttaaataattatagaccatgaaaaaattagactaaaagattctcttaaatgccaaaatagatagcgaatacatcgagagacctattttaagaatacattgtaaaactatcttatattgttttttcttgaaataaaatagaaaacttcattgaaaatgaataaaagaaaatctaatttttattgttttgtagatgctcttttggtggggcgaaaataatgtgtgttaggagttatatttttttatattaaaattttattgtgttatttttttaattttttaaggtatctcatagcattttagttagacaataaactttattagatagaataaacccaaccaccaaattttagcaagatccaacaataaaaagaagccctttataagagaatgagctaactcatttacaattttaggataatgaacaaaagaaaaatatgcaaaggttaatctcaatcaatattgaaaattattatatatgaccttattaagttacctcatttttttgtgttataatgtttatttatttatttctttatcataaatgacagaccacaaggaattggtagctttggagttgagggaacgacccttgttggctctataaacacaactcaacaaccaaatgttgaaaatgctccacaatcttcttttataggaagaaacccatttggctagatattttgtaattgtgtaattttactatttgtattgataaacacttcaaatggaaatttctcctatcatgactacttaccaattaatattaaattttactttgattttattaatacaatattgacaaaagaagcaaccattctcctatgaaaatttagaagttttggtagggcgtctcaagtttttagaggctttgggcaaaattttaaaatgaaatcttttatttatgaaaaattaaataattttttttaaaagaaaaaaatattgaaccataaatttttaaacattatataactattgtacagttatgcttccaacgattggaccctttttatcaaacaaataagcacatactatgagcattgttatgagacacttatggtgtctagcatcacatcgggtcgggtccgggttcgaatcggggtcccaagtgggggtcggggtttcggtttgggtcggggtccaagttcgggtttggcttcgagccccgggtcccatgtcttgagtctgggtacgggtcccgatccgggtttgggtccgggtttagatcccgatccgggtctgggtatgggttcaggtttcgagtcttgggtcccaagtctgggtcatgggtctcgagtctaagttcgggtccgggtctgggtccgagttcgggatctaggtctagggtccgggtctggggtctgggttcgagtctgggtcgtctaggtctggggtccgagtctaggtccgagttcgggtccgagtcccgagttcgggttcaagttggagattggtgttgaccccaaatcctttgtaaatattataatacaagctaatacagaccatttcttatgtattaaataatataacatacattgtattaaaatttttggttgtaataattaatacaatacactgctttatcaaaatatagtgttatttattatttaatacaatacgatccttatacggcgtaccaaacgagtcataagtgattacatacgtattaatgaaagcatttgtttttattttttaagaaaacttaaattatctaaataaatatatttttttaactgtaaatttcatttcaacaagaccaatttgacctcaacaatattaacaacatcaaaaaggaaattatactctaaaaaattatgatcaacatataaacaagatgctctagttaggggtgttcatataattcgcaatccctaattctaaatcccaactaatccggaccaaactattttagaccagatcaaatgaatctggtgtaaatagtttggtcaatccaaactgtttataattctatagttcagtcacgtttaaaattctcagtaaaagttcaaaccaaaccaatctgtgcaattattttatgtatacttaatatatatttttttttggatgaaatgttgatatttaaaaccaaatttaggtagaatattgacattgacttaatattgtaatgagatttttctataacgttatttgtgtattataaacttattaaaagtaaaagaattaccaaaaaaattcacaattaacggtaaaaaaaaaaaaaaaaccaactacgaaatacaagttatgatttgaaccaaaccaattcgtttttgagtggtttgatttgattggggttggtttgatcatttaattagtctgatttggttttgaatttttttttaaaaaccataatattggtttagtttgaaaaaattgaaaaagttaatccgtgaatacccttaattttaaccataagataaacaacctgattaacaaggtatttgacaaaagataaaaaaatatccaaaaattatttacaatccttaattacactaaattatctaaatattccatctgcaataactataataaacactttcaactcttttcttaattgatttagttgtggtcctcattaaatcaattcaaattaagtggaaaaaagggattgattgatatgtattgggatgacaatatcaaggaggagtgggattatcatgtttctctttatatactttagattataaaaaagagtagttaagaatggcagacaataaaaatcaacaagagatttataacctaaaaaatgggctttcaagactattaacatggtcctttccccgcaatcaaaggtggtttcaaaacaaaattggaccccgcaatcaaaggtggtttcaaaataaaagtaccccaaatataaggacaataattaagattagacaaaagttttaccattctttctttgcaatttgctatttaactaagtttttcttttctttgacaaaaaaaaaaaaaaaaatagaatcaatttgttttgatgcaaattaagagctaaagtttaactgatttttactcctgatcaattgtgtatgaagaaagtttttctaaaataataataaaaaaaaaaaggttatgaagaaagttagttaagtgggttgtcacaccttagctagttatataacaaccaaattcattgagaatattaaggtaagatgaaaataatctcttgtagaaatatttaggtaagataaaacaatcttgtagaataagttgccatgataattttatgcatgtaatcatattttttcttaaagtccacttttcttgtttgactttttcaaactcacaaactaaaaataaattggatagagaaatagataatagtaatgatgataggccctgagttgaaataggtttagtggactcttattataagaataaatgacattttaaaaaatacgatagtttaaaaaaaatattaaaaaaaatacggtcggtacagaattttaatatttttatggttttttaaattttatttacataaaatacggtttttttgtgtatttttatgttgtactcttattattttgttgttgatgttttattttgtatattattttttatgttgttttcttgttacttttacgttattttttgtatttttataaaatatcgtaaagatatatatataaaaaatgaacgtaaaaatataaaatatttataaaaattagtgttttatgtaattattcattcaaaaattacgtatattttttaaacgatatttttttatttgggtccgaaaaagagactctaaacgcagacctaagtttagggttggccctaccaataataccttagatcttgagttggaatgagtcataggcaaatttttttttgctcttactataaagatatttttttatttttgttcccaaaatgagtgaaaattggggataagttgataaatatctcttgtttgtatctattaatcaaaaatactctcatattgtttttttattaaaatatatctactttttgagtagattacctaatatattctcactatctacttaagtctagcatataatttacataagctaaggggtctaatgaggacattatctataaaagtgggtatatttttgaaaaaatatgaaaatgaaagtaaaaattaaaacaaataatgtaaagtaagtataaaatgtaatttcctccaaaatttcattccaaaatttcatccctaaattaattaacatggaatttagttttaagagattataatgacttccactgataatgacttccactttttggggtgggtgaagaattgccactgaatctggggcagaatttaagacctttatctcagcaaccgtctctgtgtcgcaaactacaattccgtgaccaaccaatttatttctccttagtcttacaaccccaaatgtaaataaataaatacatgatggtccaattaaatacatgatggtccaattagaaaaaaaaaaaaaaaactagaaattaataacacaaaaagaaaaaaaaaatagagcatttatagagcgcgtgacttcaaaccaattgatgttgaaagaaaataaataagaccaagacttagtagtacttttacttgtattgataaataaagtgaaatggtaaagggtattaataatgttagtattttttttttatacagtacaaactctatttaagaatacatttaggaccaagtaaattatattttaactgggagattataactaaatagagttacactagaaaaaaaattaaaaaactaaaaaatatcaatataacaataataacaataaataatcattaatactatattataatagaaacatattagagtaaatataattccatacatgtattataatttaaaataaaattattaattttacataaataaatttacaa

SEQ ID NO: 295692 - DNA, 4160 bp, Cannabis indica
ttgggatccttcctttctttaaatagaagccgattttataaatatctttctggatatcttatttattcacggaacataaaaagcaaataattattatatagtattgtgttaaatttagtaaatacacactattttttatttacatgtatatagtttaattatttatttttccggaccttattgctttgttaagtgttaaggtaataggattaacacatgggccctagttatgctaacattcaactctagatcgaatcaatcaatgttcgacacctagctagcacttgatgatgccttcgaggaactcgtcagtgttggcatgaacttcgtaatgggattgatagttgaagctatcggagtccgtgaggttctgagttggatcagggagcgccattagaaccgatcgagtggtgttaagacggattgtttgagagtgtggttcaagcaattcctagctctccttttacactacgaattctatctaattatgatcataaaattcagttcatacttttggctcatgtctgaattgtagtaacaaaatctggttcatatcaatccaaaagtacgtaactttgcaacttgcactgttgcacaggcaaaaaccactttttagataagataatgagatcatcacttcttaaaaataataatataagaaaacacagtacatattttattcattaatgatcaattgaccataacacccaacattaataacaccccaacattaataacaccccaatccaaaaattattaaaattcaattactagagaatcaaagaaaaaagggtggcgggtagtacttaattagtgtccaaccgctgccaaattattctgtctgtgtctctgcctttaacaaaagcaggcagagtagaccagaatccccattttcttaaatcttttatttctcttatttcttttaaataatacaacaaaaataggtttaggacccttttaaaataagccctagttttctaacctataacatgactcttatcacaaaagaccataagaagtctatatctataaacccaatccaacttaatctttttatttttgttaaaagaaattataatttatggaggggtttgcctttataattaatttgtttctttaatggaattgtaagccagtaaaagtctgaccaaaagaccagctagcaggggcaacattgtacgagaccaaagttcgaccatcactagttgtgaccttaaaggagagggcttgtccattgaggtaagagttactttgccaattttgaccccagtttcttgacatggattgccaagatgattttgaccctttgattgatacggcggtgacgtcaccagccccaccaacgttggtgatcagcactagattgaagtatgaatggccgttgattgtgaatctgatgcctcctctcttttgacaagggaccctaaatataatacaacatacaatttttacacatacatgtcattaatttacccaaagtaataaaagaaacataggaattatgcatcaacaaaaaatgacaaattagcattgtcatgatgcgccaagttcagagtactgtcatacagtttcaaatattttttggtttggttttgtcttcaagtagatgtttatatttatcatttttacatataagtacaaaacaaaaaatcacttaaaaatgaccgtatagctagtaattattatgtcaagatatgtcatgctgattttgttgtttgtatcctcaattaatataatcttaattttcttttctattttctttgttctctttctctttttgtacaattgatcatcattaatctcaccatgcatgtatcaaaattcaaaacacagtaacaaactatattaacaaatcattcataagcaaatatattggacaactccagaagctcattaatatcgaacattggtattaggcgttaggttgttggtatttggtaacacaataattctcatagataaattaattaattcccatgatcatatacataccttcggtaagctacaggaacaatcccagctttgtattgggcaatatgttgaaaaacaggctgagagagatcaaagtgttgctggggagggttgcaccagccgccagcgttgttaggcagagcattattgggtgggcagaaattggtggctgtgaccacgatggtcgaccctaaacaccacttggggtcgttcacacactttatctcaaagcaagctccgcagctctgcccgttgttgaacagagctgtgctcagcgccgccgtgttcgttccatacccttggctgtacaggttcccgtacccacaagccccgcctatatttacataggtatttatgtacacatatatatggtcacattaattaatttgttactgcaaattaataacattactgggtagctagtttagcttacttacccattgtaccagaagcgtctccccctccgtagaaagtggcatgagcattaatccaaccttggtctctcccataaacataaccatgacaaaatgagctcatcaagaagacaattattagccaaattgccatactatattgctctgcatgcaaaaatgtattccaacattaactttttatagtacatatatatgcactgttgcattaattgaagtttgcaagaaatttggacaaatatttaaaggccataattgaattaccaggtggtggatagttgagaattatgaaatttgaacaaggtagagagactagacagagccagagagagtgaggaagcgagatgcggtggagtaaagatgaatgaagtagtggaataaatagaggagagggttggggtggcaatagttaaaacattgaaaaatttggtccttaactgcaaatacttgatgagaaactgacactaaattgaggtgtggggaccttaaaccgccaagtcgaatggatttctatgtactcgggaaacaggttactttcctcaaaccacgtggtttccgacttattcttactgttttttcctttgtttactctgccaatactataatgataatgaaggtcacgtaaaattgtatatgttaaaaacgacaactgagattttacaggttcgaaatcccaaacctgggttttcagtattgttgcttcctaaaggccgataaacttttcattttagtaatacactagcgaggtagcacgtgcttggcacggtgggtggctccttaaactatttaagtataactatattttatgaaataattaatattttgtctcttcaatttacaacactataactatataattgtattatttaaaatatatatcatgttgaaaaaaatttctaaactcttttgtttaaagatataatatttttgttaactatcattcttttttaacatttaaaatttaatgtggcattattaattagtatttttttttctcaaaacattatgtacttctaaagcatgcttctttaagaaagaaattaaaaattaaataatttttcatattttttatttaaaataaaaaaactcttacctaaagtgtatttttgatcaataaatatattattattaatttagatgagaaacttgcattttcatttttttttatacttaatattaagagttagtcccacatagctaatgtgtggaaataaattgtgatatacaattcaaaataataataaaacaatttactttttctatttatctctctaatatggtattagagtcacttgtgatccgttgtgaacccaataaaatttactcactatgtcatttccaggcattagtaaaatatgctagtatcagatgtatggagtatacattggactggattgatattgaacatgataaagatatcataaacttaccgttatatctttctaagtcaatatcatcaagttgatctcagatcaaaagattttaatcttgatatggttaggtttgatctcaagagtgttatttatgttcttagagttgttcgttaaagcttgccaattagttcgagcaaaaacatacatcttggagacatgatagtacaattgagtagaagcgcaaaatatagatacagaatctatagcttctatctagatatagaagtgaaatgatgatttctttcgagcttggcttaatagagataaatgaaagagctcttatttcagtaattatattaatttactgaaatatcatttataggaa

SEQ ID NO: 295693 - DNA, 6911 bp, Cannabis indica
aatggtaaaaatatgagaaactaaaaactatataaataggcttaccttaagaaaacctataaaattttcaaagaattaaaccaaaaaacctctcaatcaactctcccaaaaatctctccgattttctctctcagaatcgcgatcctctccaacgatttcacactacaattcgatcttaaacaccaacatttcacactgcaattcgatctcaatcaccagcaaattcatccactcctcaacagatagcaacgattgacgacagagcagaagcaacaatcatcattgtcgattgtcttcttcaactttggtgagttcatcaattccttttgatcgtcttcctcgacaacgtgaacttgaaaatcaatgcatatataatcgcataccataaaacaaaaaatcaaatccaattatacacaacaacaaaacttcgacaacgattttcagaataatcaaaacagatacactcaaaaattaaaattatatatgatgataattatttatgaacataatatatatgaatatatatatcatctgaaaaataaataaaaaacagaaatttaaaatacaatataaaacgaacatttccatataaaataacaaaaataaataagttaaatcaagagaaaaaaagtaagaacaaccttatataaacactaaaacaaatatgactccatataaaacagtattagaaaacaatttataaataatattaatgaaatgagatataaaaataataaatataataaataactagaaatgcaggaattcaatgtcgtcttcttagtttggacaatgttcacattaagtctgattgtcttaatgtggtgattatgattaacaatcatgtttcgttagacattttattagggttagtgcttcgtgatactgattgtgatctttctccttctgctgttgctaatctatcgtattgttctaaaactgtttatgttgttgcttaaactttttataagtttgctttgtctgttgctactacactttactaagaaagtgtagtagcctgattattatagaatattattgtagataaagcctgttgattaataaaaggttcttgcccctttttcttcatttttagtggaaataatgacatcaatccaatattataacatggagataaaggtaaataataactaacttatgttgcatttaatatgatacttaacatagctatataaatataatgaggaaataagaacaccctctccaatagaatgtcatagagtttaaggtaaataacaaatctatcacatgaactttgaaatgagaagaaaaaacaatttgacacgcctaataaattaataatttaatactaatacattattttttttttgtgtcaatgctaatgtcgacttttttgacactagcagctactccgacgatttttccggcactgacaacaaacttcgaaaaaattatcggaattggcaaagtccttggaaaaattaccaagaaactagtttcttgatgaagaaaccagttacttgatgaataaactaatttcttgatgaagaaaccagtttcttggtgatttttttgacgacaatgtcaattctgacgacttttttgacattggcagcaactccgacgactttttcgataccgacagctactccagtgagtgatttttttggtaccaacaaaaaactccaaaaaatttatcggaattgacattgtcgctgaaatttatcatttattgatacgagcaagatactcaatgtatatatacaagcataagttagttatgagctaaccaaaacaaaaagacaaaaagctaacaaataacatataaataatagaaaataaccgactcataatgagtcactaacaattaggtgttgcacttcaatggtcctaagcctaaccacactggaacactacccctcagctcatctaatttagtcaacactcaacactactcactcattagtcaacacttttcttagctcccagaaatggctgctaagcttaaacccaatccctccgatcatcttctcatacttattgtcgtcttcctcatcgcgatcgattcatttgtaccgtccacggcgaaattttcctcatccaaatggtctccacgtttccttggaaaattttcccacccgaacaagccgcatccccaactccagctccaacaacaatctcaattccaatacgacacccgatacttcgatcagcgactcgaccacttcagtttctctaagctcccgaggtttcgtcaaaggtacctcatcagtaccgagcactgggtgggtccagagcgattgggtcccatcttcgtctactgcggcaacgagggcgacatcgcctggttcgctgccaataccggcttcgtctgggagatcgctcctcagtttggcgccatggttctcttccccgaggtaggtttttagagcttgattccttacaaaaatggagagaattttcatattgatatggtgacgattaatttatgagcagcatagatactatggagaatcgatgccgttcgggagtggagaggaggcgtataagaacgcaagtacattgtcgtatctgacagcggagcaagcattggctgatttcgccgtcttgatcactgagttaaagcggaacttttcggcggagggctgtcctgttgtgttatttggtggatcatacggaggaagtaagtgttcttcaattagtgattatatatacgaatctaaaaattcttttccttttttgtatgacaaaggtgttgtgaattgaaaaaacagtgttggcatcatggatgaggctcaagtatcctcacatagctattggagcacttgcttcttcggctccaattcttcagtttgaggatattgttccggtggaaacattctatgacttaacctccaatggtttcaaggttctcaagctctctttactattttatattgttggttcattctgtaatataatttatactaatatgtttatatgtttgtgtccatagcgtgaaagcatcagctgctttaacaccatcaaacaatcttgggatgtaataatatccgagggtcagaaaaatgatggtcttcttcaactgaccaaaactttcggcttttgtaggtaaatattttaattttaaggaaatttgtgtggttagttaatgtggatgatttagctatgacatgaatttgaagatttttctctttttacttttctgaaatgggacttaattattgggtttggattaatcaaagttgtttcacaggacattaaataatacagatgatctgatcaactggttagattctgcttatagttatttggcaatggtgaactacccatatccttcggaattcttaatgcctttgcctggacacccaattagagaggtttgcagaaagattgattccatggctggggataatattctagaaaaaatatttgaaggcataagtgtatactacaactatactgggaaagttgactgctttgaattggatgatgatcctcatggcatggatggatggaactggcaggtataaaaaatgttatacagaattgatcgtctttgtctttaaagtgaaaatgaaaattcatatttatttcactagttatagctttcagattgttttctaattgtaggcttgtactgagatggttatgccgatgtctagtagccaggattcaagcatgtttccaacatttgattttgatttgtcttcttataaagaggagtgcttgagggagttcaatgtggaaccaaggcctagatggataacaacagagttcggtggacatgtaaggaaacgactatttatttatgtcttcatatttgttttcatcttccttgtttagttttcataagtttatgaaatagtgttatcacttttagcttcctttttgttcctttgggtaccaaaagtaaaaggaaagacaacctttttattattttctaatgaaatagctctagcggagtgttgggaaattagatgaatgaaaaacaaaaaagacttgatgcggacataaagcagttattctcttctctctatttcattttaatttcttttttaagttaaagacccaaatggttttggtaatataaacccaaaatttaaagatagttctaaattctagaacttaatgggaacacttgtcttctgtcttcagagtgtgctttcttgtttgcaccttaatctcttagtccagataatgtatctagattttgagtgtgttgattccatatttgtacctcatcaaatagtatggttattcatcgatcttttttcttgtcatattgtaggatatcaaagctactttacaaaaatttggaagtaacattattttctccaatggtcttttggatccgtggagcggtggcaggtgacaattttatttactttttatcacgatgactagaaagatattcaagaattgtagtataagtattgactaatgacttattatattccagtgttctgcaaaacatatctgaaagtattgttgctcttgttactaaagaaggtatgctcctttctatgtgaccatccaatttatcttagcagtttaattaagctctttgaatatctacctacctctcgtatatcttctttgactgaatataaggtttgttctctgtatctaacttctctgatttgaaggtgtagaggtcatctcccaaaataaataagcataactgattgctctagttgatgtgatgtgtatcttatttggagtcattaggcagtaaatcatagattcatgttatgtgccaaccaagctgttttcttttttcatcatcaggagctcatcacatcgatttacgcgcttcaaccgatgaagatccagaatggttagtagagcagagaacaactgaaatcaagctgataaaaagctggataaatgactactatcgacaaaaaagagctgtttttgagatttaagttaatacttatagtacaaacttttgctcaataccactatgtatattttgcccttttcctcggttttattgtatttgctcaacatcacaaagttggggcctgtataccctgtgatattactggatagttattaaatgccgacacttttatcaataatttagactattagtaagtgttttattttgccactgtttgtagtgtctagaatcaatatcttttttttcttttcttgtctctatctagagtttcaattctgtttttttttttcattgttagacatctaactttcacaagtaactttgaaattcaatttaccttcaacgatcgaattcgggatgcaatactcggtgtatctccatttgttcgtcctcttcagcaaggatttgtgacttactgttgcaggtaaatttttagaaagtgtagctgtcatcatatttcttaattacttgcatcagtatcacaaccaatttaaaagagaaagatcagattcttaagttgccagcttctttaagtggtggtgttttgataattttcatactagagtttgcagcaatctatctaatcatgtttactttgagctatgtatcataattattactggtagatgaccaaagttttggataaccaagttttattttacaaattggtgttgtttgaaatgttattaatataactatggtagatacttacattgaacttctctcgcagcctaatgatcatgaccatgggacagctgcttgagaaatgcttgcagcttcaaaggatcacattcaggtgcatatatatataatatatattttccttgaattttattttagctgtgatccactagtttctccaagaaatacatgctaaatacagatacgcgttttactctttcatctatttatctctagatataccctactttgaccgagtaataacttattattaaattctcaacactagtttgagttggatatgaggatagggctatacaatacacttttacccactggcccaatcctatctcctgattaatgtatatactatcaacacatattggtatcagtattgcatgtgggcatgtttttgctgttgtaccaaacttcattcttttttttcctatatttgattttgagctagatatattaaatatttgatatgatcatagacttggaaaagataataaagtttaactatcatccttgaggttcgagattccattttcatggggaccaacctagaaatatgctggagttttttcatcttcattaggtctgagttttcaaaactttaggagtcgatgggaggacaagtaacaagttttataatttattttatttaatgttagactaataccttcaaccttgattttaattttgaggaatatttttgctaatcaaagttactgttcaagttgggatgactgcaaatttgagggactttttgctaacaaattgtgtagggaaaaaggtaaagtagtacttttcaagaatgaagtctgatgaagttgaaatcatatatatgcgtaccggttgttatatgttgtaatatatttgctttcagaaaaataaacaatttccatagctttattgacccacctgttcttaagaccaattgcttattgttattattatttggatatctaaagtttcatacataaacaattctattgtataacaatttaagttaactttcaaattatattgattgatggaattgtaaaaaagagttgtgtccatttatttttggactgcattttgtactgtcattattatgtgaaatcttctgatatctttttcaactgtattggtcatttaaacttatactatgccctgttttgtaattattattgttacactatttaccctgtcttgtaattattattgttacacgattttaacccccaattttcacatgtacacttccatagatgggacaattgacttccatagatgggacaattgagtaccatattcactctattgacttgttattacctattgaacttaagactag

SEQ ID NO: 295694 - DNA, 1164 bp, Cannabis indica
tggtgtatcgtgggccacaaaaaataataatgatgatggttgaatttggtcaccagagacaggtttgacaaggatttcgtcaacgctgtaaatttgttcatcgaaatgatgattggtttatgttgaggtaatatggtgaatgtgtttaagctattgtggcattttttgggttgtggcacaaatcttgaagatatactccaaattggaaggacgattgtgatttgtttatttagttattttaggagttctttctctcatttctttattcagtttaattgaaagttttagtttcttatctttatattttcctgaagaaagatgatttgtttcccggataaacacttccttgacaaatgtctttagatattcagaacttatcagtcatgtgccagaaggagaatattcaaagatggctccatttcgcatactgagttttgacattgaatgtgctggtcgtaaaggtcattttcccgagcctggccatgatcctgttatccaggttgcgcatgttcatatctattatagttaatataaaatttactggctttcatcttttgtttttattttttatattgaccattctttatatatgcgaatggataactgatattgctcttttatttgtagattgcaaatctgttaacattacagggaaatactgagccattagtccgtaatgtcatgacccttaagtcatgttctccaattgttggtgtcgacgtgatgtcctttgatacagaaagagaagtcttgctagcttggagggtattagtttttaatcgcttttctttttatgaaaatgaaaagtgtttgttaatactgtttaagtgcatttgttataaatctgttctcaatatttatatcttattttacatattttaagagattttcatttaggttctttttcgttttgctcttacggtaggagctctagcttcagaaaactatttctcttgccatagtgaagcatgtgtgtctatatgcttgtacaaaggaaaagaaatgcttatgcattctaaattgtgaatttataactatgagagcaatatgcactatcattcatgctgtttaatcatattggttaacactttaagcaagtaaataatgtaaacatcagggtagcgtttggttggaggtaatgaaatggaatggaatggaaaggaa

SEQ ID NO: 295695 - DNA, 3144 bp, Cannabis indica
aaatacatatatacctcttttggcttcgtcttctctcccaccacaccacacaccgaccctctctgccattttcgacgcgtttatcttgctttttccacacctgtgttctcaccactggcagcaatatttccaacccacgccctctaaatacacacaaaccttcttatcctaatctttacttataccattccaaaattgcaccacgcctgtgtttgtctccctctttctcacacacacacacacacacacacatacattatatatattacagttatcgtacgttttgataattacaaacaatggacaacttccctactacggtccctcatttccttacatcaagtactagtactagtacaacctcatcctcacccttaatccactccaaacaaccaaaaattatggctgctactacaacaactacaactcatgatgattctcacaattcccatttcatctcctccatccatacctcccctcagttctgttatgcggctccaacctactggggtcatcaagatcatcaaggccgccgctatcaatttcctgcgggaagtggcagtgttcatcaacctgctgctgctcaccggtctggtatggcctatcacccattcatgatggcaaccggccgacagactagtggtggtggagtactagtgggggtatcggaagagcaagagagaaggcttttggatgcctggacaaccaaagttgcaaggagtaagaggagaatggctcgtcaaaggagtctcaatttggtcaccacgcagtcttctcctcctccttcttcttcaactaatcatcatgcagttactagtgtctccactgccactactctcggcgagtacagaagggaacagcccatttctggctccggcgaccgagatctctacaccttttgtactccagataagaaggttggtttgcttctatcactcgtatcttaaatattgggtttctcattttattttatttaatatttatatttgtttgtcttttatctgttgctcacttctgtggtaatttgtcctctatatatcatcatctatatttggttcttcttttttataaccaagttaataagctatataagttacataatcagtactttgggtgcagagactgaggatactgctgaagaaggagttgaagaacagtgatgttgggtctttgggaaggattgtccttccaaaggtgagtgttaattatttatccatatatatgaagaaagggcattaaagaaaaactattttgattcttatattatcgttccttatcacttttatttttcttccaaataaaagggttaacaaagaaataaaacgaccaaccaaactcttctatttgatttcctcttatatattgattactgcaacatgattgtgatccagactgcccaataaccataatctctttgctgacataatctcgatttttgtacccaaagatggtaaagaaataaagtcgttgatatataaaccaggaatatacttctaaaaaaatatgtatttacatatatctatatacttatcttttgataatgtaaactaatatatacaaacatatccctattgtgaagctaatgactattatatctgaagaagtttgtatgagagatttcttcttacttatcatgcaattaatttgacataaagtcgaaaatgatataattaataatcatatcttagagggaggcagaggaaaaacttccaaccctttctgataaagaaggcatccaagtagtgatgagagatgtatattcaaatcgggaatggagtttaagatacaagtaagtactacgtacacatatatgtgtactagtatactatttcaaataattttgttatatgtatttagagctaattaagctattaatcatgttggatttttcaaaaccatttacaggtactggtcaaataacaagagtagaatgtacgtcctggaaaacactggtaaatatattttttactaaaataatttattgacccacatgataattatctttacaatcccaagttatgcttacttcattatcgtttctagcattttggaccttctcttatcgctttcactatatgataacaaagtctattgctcattgcaatgtaacaggagaatttgtgaagcagaatggactggagattggagattccattgctctttacgaggatgaatgcaagaatctcgtgagtgttactttcttattagtacaaaattaacactgtgctagctgaactgctgatcaaatacactaattttttctttctaaaaaaaaagagcaaagagtacaaaataatttaaagggttaatcaacattcaaaactagcacaacttgcataagaaaatgacacaattgcccttacccttttctcattatgatgaccatatccttttgggagtaagagaaatggcaaaagacagaaatggaaggtgcaatatatgtttatggacaaaagaggtaataaaaaataaagtattaagtgacacgtagtagatgatgtgttggcaacaggaattgctttttgaaataaccagctaagactacacacgttgtgtatgtggacttatattttttgcaagtgaaacggctccaagttcttggctggacttgccatacaaaagtcttaataagcatcaaaaccgtagaactactactggctctttattttgcattgtccctatgtggatatattttatatacccaacatgttaggtgggccagtctccaacttaataattccaaattgagatgcttaccattaaagcacaaccaatacttccctcatgttgcttacgtaattaattaaatttaatgaccgtttttcattaattgcattcaaatactaggaattggctcatggttttagttttcactagtagtattgtaatttatttattatttaaaggtgatatttttattgcaaatattatgtgtacatatttttttttacctataatagtaggttatctaggtaaatttttttttttagaatcaattaattataattaattatttacttaaaataattaattgaatatttaacaatacctcttttagcaattaataattataaataattttttatacaaatctctactgtaattattttaacagttaagtcatttaattataaaatttacgat

SEQ ID NO: 295696 - DNA, 1534 bp, Cannabis indica
ttttttaaatatttatttacgaccaataaaattgtgctacgtgtacactgtgtccacgtatacattccaccatggcagttaacagcaaaaaatagatagaaagggctaagtgctaacagaacttgggtttaggaagttttaccactaaaattttagaattggaggttagttgtaagtacctagccacttaaggaggttattccgcaaattaccctataaaaaaaaatcacaactacaaaactttattcaatagtagatgtgtggctttaactgttgatgtattgtgactttacatttatcatgttatagttttaataattgcttaactttattataggaattagcagataattagagatttatttaatcttttatcattatatgtctcttaacaaaaaatagaatttattttcaaaaatagactttacaataataattttttaattatgcagatatattaaaattctaagtgtattatggatattatatatgaaattaattttatattttttatattttatgcctagtaacagcagaatgcgacgatttgtccattagtcacctggatacggtagtgtatcttagaattaacgggacaagatagttagagatttagaatgtcaggattattcgaggttatagttttggaccattttatctctaactggaaggattacttcgtggctaagtaaagggcatattagtcttttgctctattttgttttattagaaaattaaaaggaatattggatatctttatattgttttaattctaatttattaggttagattaatcacaaaatcaagtaaacaaaaacattctctttctttctcttcaaattcggcctaaagataaacctaaggaacctaagaattcttcatcttctttagacaaaaaaaacaagagtgttttagcagggattttaagtgttaccaagtaattattcaaggtaagttcctttccattctttctctttgatttcctagtaaaaagattagttttgatgcatgttttggtgagttagtttctgttcaaatttgagaaggctatggtttgcttttgagcttgttattggagtgtttgaagttgattttgcaggttggtatctgttgtagcctagtttaagcaagcttgagttttacaactcaaagcttgctcaacaatggtggttttcatttctagggtttgtagttgctttttattgttgattcataattatcagacacaaaatgggttctagagagttaaagaatgtttggggtaattttggtgtcaaaattaaatttttgggaaatctacaatagaaaacggcagactatttcttagaaacgtacggtctaccgttttccctagtagtgtcctagaaaaatggcctaccctttttagagaaatggcctaccaattttgtggaattttcctgaagtcttatttttggtgtttccttgatatttagagtatttctacgctatttattgataaaaaaaattttagttttgagtttaagtccccaaaagtgatttagcgggtcactta

SEQ ID NO: 295697 - DNA, 4614 bp, Cannabis indica
agcagttggctattacatagttgcaaaatttatccccatgaccccagatggtgaatctggtgaaccagcatacgtcatatcagagagagcagttgacagtaagtgaatctctatgttttcatttaacgtagtgaagtgatgattagtaaattcaaccaacttaaagtttagaaataggggaaagagatagaaaagataaagaactttgtcaaatgacgaatacttgaaatacctagatctctagcaaaaacaactcagcttggatctttagaccctagtaccaacttttaaaattgatatgtcatgctgacaaacttttgacattcttgcagctcttcctcctagcttaaatttcttatcaattactggggattacactgaaggtggaatcttgacagcatcctatggttacgtgggtggtcatgaaggaaaaagtatttataaatggtatcttcatgaggtattctgttctgtcttccttgcataatataagtgtgtcttcataacacctttggagttggcactcaatagcttaatcccaacggaacattgtaggtcatttcggcataatcatcagagatacaataaacatttcttcccttgcttacttagtcagcattcatctatataatatagctaaatttataattttgttggttctatagtctgctccaagatctgtaaaaaatgtaatagatgttttctttcttgcttgaatggtgttttatgtgcataatatgtttgttaagtactagctttttttaggtaatactctgctaacttgttttggtaatatgcaggttgaaaatgaacctggtaatctaataaatgaggtttcaggaattcttcagtatcgtattaccaaagatgccattggaaaatttatttcttttgaatgcaccccagtgcgtgatgatggaactgtgggtgagccaagaacatgcttggggcaggaacgcattcgacctggtatagtattttttgctaatgtcctgtgatgcatgagaaccattatttaaaatcttaacaactgcatctgcgttagtaacttgttgactaaaacctattcttcctgtttaagattcacaatgaattttgtttatttcactacttttgtatgttttgaattcatccttgtgtattttgaatttatccatgggtaagttaaatattctttttagaggatttaactatgtgggactaaaacctattcttcctgtttaagattcacaatgaattttgtttatttcactacttttgtatgttttgaattcatccttgtgtattttgaatttatccatgggtaagttaaatattctttttagaggatttaactatgtgggtttatattatactaacccctgtttatgaatgcaatatctttaaagcacgctacatgtctcctctcttaagatggcagctactgaataaaagtagctgttaaggagctatttggtgctgagcttatgcatgttatattcttgtacatagagaacttcatttgcataatatatacaacactatggcttatactgttactctacattcaaaattcagttttttttagcgtgcatcataaattttgtaaaggacatttatttgcatttgctattttcaaaagcaatataattgcccgccatggtgggtcatgatcaacagactactatatgactcttctagtgtgatcacttttaatttgatgcttgatattaactcgtacttcacttttgcaatttggtaattaggaagtccaagattgatttctctacaaatagttggaactcacattgaaggaactacactaagtgttgacaaaaaatattggggcggtgaagaaggagaatcagtttttcgatggttccgggtatttatttaaaatatatgcaattggtttgaagtaattcagtctctttcaggggtaccttgacagatgggagaaatgttgcttgtttgattagcattatcagacaaataatagttccccataagatctgttttttgacaaattcttgttcattctttgtttggaaaattaaccaggaatatcttgtttgcagactgcttcagatggctcacagaatgaaatttggggtgcctccacttcttcatacatgctctcacttggtgacattggcttcttcatctcagtatcatgcgaacctattagaacagactgggctcgtgggcccattgttctctctgaacaaattggacctatcattcctggtacatgctccattttatatctcatccattgcttggaataatgtacttaatgcctgtcttaattatataaagcgcagtctgtttttcttgattagctacagtaagtttgttctggagatgatgatgtgttttccgagaaggtggaaatttcaaataagatgacactaatttatattttgaaattgcatttcaggccctcctacttgtcagtccttggagtttgttggatcaatgatagaaggtcagcaactgagctttgttgcatcttacagtggagggtgagacttgtactcttttttctttttcactatacttgatgctataaatattttttcttacctaatccaattatggtttatggtttagggagagaggatcttgtttctatgaatggtttagagttaaaagtaatggtgccaaggagaaactgagtactctaggtgagttctatttaggatagaatgcatatgcacacctatacaggattacaatattaaaacagttcaaacttttctttttatcagagtatctggatttgactcttaatgatgtgggaacatgtgttgaacttgtgtacactcccatgcgtgacgatggaatgaaagggaatcctagaagcattttatctgatgtgattgcccctggtaagtcatcatatgttaattgtgggaattcaactgagcttcccttgtggttatgtatttaaaatagattattatgcttattattcggtgattgcacagtgttcttttgaacagctagtgaaattggttatgctagatggcacattaattcaacttggaccttatgttaatcatgtatgcatattaaacaaacaaaaattggtactgtgcgttgtattctgtgtgagaaggaaaagtagcttgcagaggatcacaaaaaggtgcagtgttgtatttgcagatatagttaaacttacctattctatttgcaaaaatagtttttacgaaaaaaaaatgaaaggtggcattcaactgtactaaaatcctcaaaatgaacttagggaaagagtactctacggaatataaaattcttaatatgtgacattaggcatttttaggacaataattttcaatcaccttttacatgataattaccttgagaaggtgaaggtcgttgccaaatttactctccgttcagagtttcacgcttctctttttctataaaagattgttagacagctttcttgtatatggtagtttttagtgccacacattgttcgaagcaatacaggtggaagtttgaatttgaatgataatatatgtggtttccatcatgcaattgctgaacatgcttcatgcatattctatacttaggatgaaccaaccatcatgtcaaggatagaaggatgaagtttgctttattcattatataagatttatgttgctaaagttattgaatgtccattcaagcaaaccctgatccattagttcatcctttcttggtacagcggatcctgtgggaagggagcttgtaatccccgattgttgcgagaatgaggaaatagttccccaaaagacatactttggtggacaggaaggtgttggagaatatatttggtatagaacaaagagtaagcttgatgaagctgctctaatggaaatatctgatgcatctgaagatgtggttatatgcgccaaaactctgtaagttctcatattttgtcacatattctggaaatttcagttctgctctttatacttgatataagtgtctgacggatgtgcatatgtgacagaatgtacacaccattacttgaagatgtggggcattatttgtctttttattggttacccactcgttctgacggcaaatgtggaaatcctttagtggcaatttctgactctcctgttgaaccaggtatgatgactgccacaatcttctgttataacgtaaggttacttctgttgaatcattgatactcagtgatgtgaggacctactgcagaactttaattccccattgtgatcagcattatttgattagttttttttttcttgctttgtttttacaatgtctagcattcattttttctatgccatgaatttcatgtaattaactgaagtggtatgtattgtgcatgtttctcattttatgcttctattggtttatttacattggccaaagtaattccaagtgatataccttattatttgatatgaaacttcctgttcgacacattgtagtcttttaaatctgctatttgaccgactgatttggcaaattgttgcagctttacctgtagtgtctaatgttcgcgctgtagagttgtctttgggtatttattatggagaaggggaatattttggtggatatgaggggtcaagtctttttagttggtacagagaaactaatgatggaactatc

SEQ ID NO: 295698 - DNA, 7419 bp, Cannabis indica
gcatttttttttacggtgcggtgtggtgcggacgatttatacgatttgatgaatacccctaccgtttacaagtagattgacacgacacgaatcatgtaacctgtttaaaaaacctttttaatttattaatgacatgtttaacacgcatatggtccatttataatttgttaaattactaaagtaggtcattaacgagttaattttgtattagtgtgtcaatcggtttgtattaaacggattagacgagtcaatcggaacacaacttgaactcatttaaggtaaattcaaacttacatttcgtgtaacttttgagttgtattatcgtgtttgacccgctttcatgttctatagtggttagtaaattatttctttttgtaggaaataaaaagaatttaaaaaatgttgattaattatgtaagaaaagagaaaggcctcaattaaaaaaaaaacccactaaaatctactcaaacttgtttctttctcccatttctttcccacctccgcttctgcaaaccaaaaccaaacacaaaccctcctcggctatctcccatggaaaccgcccaatcccaatcccaattctcatagattttattcacaaccaacggtttaacagtaaactttcaacaacaacaacaagaaccaccatggatgcgtaccaacaacaacaacaacataactggtacatgagaccgccaccgccgccgccacaacaaccgccgtcttcggatccgtaccagcaacaacagcagctgcaacagccgccgcccaggccaccggcacatcctcagggctcatggtaccccaaccagaaccaataccagtaccagcaccaggccccttcatcacactctccctcgcctcccccacagtggggcccaccgccacctcctcatccacactccgaccattaccctcctcctggttcttatcctccgcctcaacaccattatcctccgcaccctgtccatcagaaccagttcgcttcacctcctcctcggcctcagctggcttcttcacctcattttcctcctcctcattcttaccctcaacccaatcaggtatttattatctttattgcaacgtgtctctgttcggcgaaaaatctttagggttttagattatggttttatcaatctgttgttttcggatctccaagtctttctgattaacaagatggtggctttaggcctggcattcaattatgtatacataacctttcttttctcttttatttgttacattttgtaggaatgggggaatcctaattgggcgcatcagcaaggttgggaacatcaaggttagttcttgttacatttccgtttgaacttccgtttcccctgctgcctgggatttacattggcttaaaatcagcagtcaaacattataatataaatatgttgtgttttagatttgtgtaattcaatcaagattgtaaaattctagggtatcaagattaatgagccacccttctggaccattcaatgtagaactaggacacaaaaattacagtcatctgagcttcctttgagttaaaggcactgagtaaagatagattatacaagtattttcctttcgtttaatgaccggctgtgtggtgattgtattctgtgaacttgagaggcatttgttgttttgagacctgatgatttaataggatgttaagctgtttactaccgcagatcatgttgtgttgtcttggcgatacttttgcattcaactccaacaattgaggctatcataatatttatacagacattaaaattgggtatcatcagttgtgcatgctaattaattaaaggctgtcatattgagagtcgaactcacagtaatgatcagtgttttgataatattttgcagttcgcttcttttgttccctactaagttgttcttgattcaattgttttttcactgtttgaggtcaactttttatccttaattacagattcacttttgtgttatttactttatagcagttggccatagtaatgaagaagattgggctgccaaggcgagagcatgggcagatgctaaaacagcaatggataatcagcatcaacaatctcagcatacagcagttgagagaccggaagatcaaagccattaccaagaccaatattctcactctgttcagcctcattatgcagaaatgcaacatcagtctatgcctacatctaactatcaacaggttcaacagcctcaagctccaactgcaccgtttcctcggccaccattagctcagtcctcacagcctccttccgtcagctctgattctacttatgttccagagggacatcttcactctgttagagatggaacgccacctgcagattcaaatgctatgcttcaacgccatggaaatctacctataagtccatctgttcatcagcaggaggtaccttctagttattcttctgttacaggtaatgatttacataatatagaaattgcatgtgaaacctctggtccagagctgctatcttggcatttgctttgattactaatttgatgtcgtagtcctattgttcataacaatatgtaactgaccttctctatataacattgtgattattcttctgagtgcttaatcaattgatttgtacttatagttggtattaacgattcccttctcaaactctttagaactcataagtagctgttcctattgttttcattatttgatacccagaaatcttccaaactctatagcgggttcaagttcctcttagcaatcgttatcatttctaaatttttaatgtggtactatataaacatcacttgttttcagagttctaaatatgcctatttttaccttatatatttttatgtttgaaaggtgtttttttcttccctaattctaatctatccttttgtttctttcacaccatttctcttatcgtaacatcagtagtagtgcttggattcgatccatttgccgaaccgtaaaataatttaatgtttctccaacacattcattcacatgaatacttttgattgtaatgtattgtatgaactcattgctgtgcaggtcaagagtccccatctaggcttttattaggaagggtgaatttactatttagcgatgtaaaagtagtcttatgtaatgcaataatcatttttgtcaggctaaactaagatatacattcctgatatgatattgtaatttgatgtcacgtttaacaaattgtgtggagacagagtgacagtttcttattactagattgcatgttatacaggtttcttttcatcgaaggtaagccttcttttgtttagatgtttaatacagacagttggctgcgtttttgctagattgcaaattatacaggtgtctttgctttggggatgaggcatctttgtttagaatctttagatgctttatacacagccattagctattgaaggatatgaattatatatttttagtttttgtttcctacctattgctagaaaggctataaattgattctttcttttgtacagtgttagtgagtgtttcctttgtcacacttttttcctcattaatacaagttttgtctcttataaaaaacaaaaagaaaaaaaggaaagtgctaccttgctgacaattgaaaattgattttgcttttctctatcttggtggccagtttgaatcagtatcatccatgggtttcctttttccattaatttttaaattgtactatttttctgactggttggcaggaagcaatggggttattcctttttcatactcgtcatctcagcaaggacagcagcatatgcaaccacctcaggctatgcctcttgccgaccagcctttagaatttatgcccagattcaatcgtgacgatctacatatgcagtccaactatgcttatcatgattcagttggaccggtaagagggatggacactgttaccacagtgcattctatgaacagttggacagcccctgttgcatctggtgtgggttatcctcctattgctccagttctgccgtcagggcctcaggtactaatttgagttacatgaagttgtactttaactttcagggcttatcagttagtaattactgacaattttcatccagcaacacaatcctgtactagctgtgccttcttctgtttctgggcatgctgcacatccatttagtagttttcctgtatcaggccttcagccaactattccatctgctgctcccccgtttgcccacagtgcaggaacttcacttcacccttcaacagccttttctggtgatgcctacggaattccaagtatttctgaacgtcctaaaaaggtacgtttctcagtatttcagaattttgttcgttagaatattgataattctctatttatatattatgttttggaacaaatccacaactgtctcagttttatgtcataaaatttgatccaggcttcagttcctaattggctgaaagatgaaataaagaaagcagtaatcacaagttcgtctatggatcatgccaaggaggagacacaatctattgaggatgaaggttttgacaattctgttgggaagggggagcaagcggatagcaaaagcattgattcatctagatcaactgaagaagatgaggatgatgaggtttagctcttttttgtggttgtatcgtctttatttatttttttagtggttaagttgctgttataccattgtataattttgtgctcatgtcataaaaatgtttgatctatgtaggattatgtggaggcagctagaactgcagcaattaaccatgaaataaagcgtgtgctaactgaagttttgttgaaggttgcaactctgagcaagctatgttttcttaaccaacttcacactgttacagttttaatgggtacctttatttgtaggtaactgatgaggagtttcatgagattgcaacaaatgttctcaatgaagatccaacagttgaaggttagtttgtcatgaattctaggtttttctatggcttattgtatatttcaatgatagttggtacattatcataatacccttgaaattcattctgtttaaatgacaaattttatatctacagttgataaggagattgtcccctcaacctcaaaccatagggtatctccatctccgtctacacttccatctaacaaggcaaccacaaagatcataatcccgggcaaatccaaggaatacgagagtgaaggcgttgaaaagtccagttttagttcccctggagatgtactgggtcttggcagttatgctactgatgatgacgatgatgatggtggtggtggtgatgaaattcagagccctagcttgtcaaattccaggaaaaaggatcttcgacattcaaattttgaaaaatcttcagaagacaagcatgatgttggtgcaaatggcagttcgatagcccaagctgaagagcccaacaaaaagcagaaaattttggagagtgagacaagtaaagtgatctcatttgagcctaaatatagtaacactgatgctattacaagttctaattctgataagaacagaaaaaatgaaagtaatgctggtggaagtgtaccagatgatatcaatgtttctagatcaaaaaatacagttgatgtaggtggatatgaccttcctgaagatgatgagaatgtgatgaaaacatcaaaagataataaccaggttaggcaagtcaggataaaagctgaaaagaatgataaacatgacagtaagaggagttctacgaaagactttgaaaagaaggaagagagtgataagaggacagatgggaagggcaatggtaatcacaagaggcatgatgaaaggcactcgaggaaggagaagacagctgaacggaaaggatctaaagaaaaaaccaaagatcaaagcaataagcccttagccccggaatctgagtcgaagaaaaggtcttctcatgttaataccaaggaggatagaaaagaaacagagaggcaacataaagctggtgctaaagaagaaaataacagaaagcacgagcataccagggaaaaggagagcgagagatcaaggcataaacatgctagtgattcaagcaggcacaagagaagacgttcgacctctgttagtaggggtagaagcagcaaggacaactcagttcaccgtgataatgattctagtgatgaagcctctaatgattcaaagaggtttgatttgttatagtaaaatatttttgtttttctttactttttctattttgggctgggctggggaaaggtaaaaaagagggaatctctcccttcaccctacttttacctaaattgggctccccttgctgcaggaagttgccttcaaggagacgtaacttgtcacgctccccctcacctggaaagtctagaagaaggtactttttatgagagtttcattgttttactttttctcccaggtttttattgtgtcctgttgtgtgtgaactataaagctactaaaaaaagaaatgacagtgataaggaggtttcaacttatgctcctaataattacatatcttccacaaacgttatgataatcactcaatgaatcttagttgtaagtagtaataggcattcttttgtcagctttaaaatgatttagaatgataactctagcaatttagctttgtttatgtaatgactaccctagagggaagggattgggtaactcaaatggaacaggtatgctgtttgttcccacaggttactcaaaatattttagggttagactgtaaggctagaaagaataatatgtaagtgtaacggctaatacatattttgaaatgtctaatgatcagtcaaatgcttatagctattccttttctctgaaccaagcgaattcattttgcttagtccaccattacagccaggagaatcttttttctttttatttatattatattattgattgacagtagttttttgcaataaaaaaaaattagtcaggagcaagaaactaaccgcattgaaaaggaacggagataatattgtttaatgcttgtagacttaagatagttggatgcacttcctttcctccaatgtttcttgattcccttaccatgcttatggtgtaattattaagttgtggctaaatgagttaaggtcattatctatgttacacttgttaaattttccagttatgcattcggagattggaaataagttagctgatgcttcctggttttgattatggttaaatactaatgtgaaaatcatcttgcaatttgtacttatacttgctaattgtttgattcaacattgttgtttctgcgcctctaaaatacatttcataattcttagctagacacaatatttcaagtagatactcaccatgttttgcatttcaacaataaattgaataaactatttatgtagcagggtgttgacaaacactggttcaggtttgtacttgtagtaaaattagaaattcaggacatataatcagactttttttaaaaaaaaaaaa

SEQ ID NO: 295699 - DNA, 3101 bp, Cannabis indica
tacaaaggctttgaatggggtggaggttggttatctttgtagcaagctgggcatgattaatatctatgctccagcttgagggggagtgttagaatattagttgtagaaaattggggttacttgtatttagtagtttcccatttagtctcctagctttgtatataaatgtatactattttatggaatacaacatacaattcaattcaccattctctacaaggaaatattgaagtattattggtgagcaagtttgtattatggttaaggacttcttctcctctggggccctaaacaatcagcttaattatacttttatctatttaatccccaacatccttaatgatgctcattttaagtaattctgtcctataagcctgtgtaattttgggtacaagatcatctctcgtattttgacgaatcgtttaaaaggggtgatagatcgtctagtttctcctttccaatcagcctttattctgaggtgttggataggtgaatgttctcttttggctcaagaggtgcttcattctataaaaaataatagaggaaaagtcagggctatggcaatcaagatggacatgaataaggcgtatgaccgattagaatgggggtttcttttgtgagttctccaagcaaatggcttcagcttccaagtttgtaagctcatcatgcaatgtgtttctacggttagcttctgattttacttaatggtgctcccttggctccctttaatcctaaacaaggacatcaccaaagagatccgctctcgccgttcctcttcatcctttgcagcgaggtactttctaaactattttgagagttaaaagggaaggtgatattattggtgtgcatgtttcgaggaatgccaattcaattacccatcttttatatgttgatgactctatttcttttgccaagcctcgtcaaggaatgtagaaactcttatgaactgtctttagaagtacgaactttggtcgggtcaaagggttagtaagtagaatagtggagcggtgttctcccctaatattactcggaggtgtcgtgaagagatcaaggggctgcttggtatcaattgtattaatcctaaggaaaagtacattggtaacctcttcttctttactgctaagaaaagggaagattattattttttgaaggaaaaaattctaggcaggttggagggttggaaggccaaacatttgtctcaagcaggttgaactatcttggtaagttctatccttcaaagcattccaaacaattttatgtctattgttcaagttcctggcactttatgtgatgagttagatcgtttattagcaagtttttggtggattggaaatttggagaaaagaaattattgtgctttgaaaagttggaatgagatttgtcaacctaaaaggtgtggtggattaggcattagaaggttcaaagacatgaacttggctcttcttgccaagcttttttggatggtgatgaaggaagaagataaagtctcggtaagggtctttatggctaaatattgtcaaaccaattatgtatggatagtagaaaagcatgggaatgactcaagatgttggaagagtttgttggaatagaatgtgtttggagggagtgggtatcctgatagctgatggcaattgtgatctttgggatagatcttggatcccattagaggcctttaaatgatatcaaaactaggtttcattttaaacgaaatcacgccttttggaaggtcaaggatttgttcttgggtgaatctcgagtttggaacgaaaggttgattcgaaagtgttttgatgaggagatagtagatgatatgttgaagatcaaacctttacatgggggtctagatgttttattttggaaggccgctaaattgggtattttctcagttaagagcgcttattggataagccaacaacatcgttttaaagatccaagcgagatgtgggtaagattttggaagcaaagccttcactctcgtttgaaattactttgttggaaaatcttttctgatatccttcctaccaagactcgatttggttttaatcatagtgaataccaattgtgttgtttctgcaacatggaaaaagaatcaacatttcatcttttctgccaatgttttctcattcgtgggatatggtttagaagtcattgggggatctgtattgactgcttcaattgaactaatcttatcgactttggcaagtggtggatcaacttggaggatgacgagctaaaaatttttactgtctgtgtttgtgacactatttggaaatggcaaaatgagttgatcttcaaggataaacgctatgagatggaactgatttttagggattctctctcgagatataatgaattctcttgcaactgtttttggtatgaacaagtggaggtgacagacaagaacttgcaaaggcatctttaccaatccaaggaggatttctggtgctgcaaagtggatgcttctgtaattgccgaggaagtaggttttgctatttttcacatgaatgcccaagtgtttgagtcttgggttgctgtgggattctcttcaatatatggcgtgatggaaagagaactgagtggtattgctctggctttgcagatggcaagggataaagaagtctcaaaaataatgataaaaatcgactcgaagacagctgctacaacctttggggttggcttgttccgtttggttggagcacctatcctctgttctctttttgtttgaacctttgtaagtcttttaaagaagttattgtgtcctttattcctcagttggagaaccttattgctaactctttagccagttgggttagagtggcaaagatcaaaaactctggtttgttaagagaagcggctccctttgtggcttctaatctagtttagctttctttcaataaaagtctctaattatcaaaaaaaaaaaataataataataataatactcttcttggtatagtaggagcatcataacaaatgtggtttgttaatatgacacatgcctaataatttgatacatagtttgtgaacatttatgatttatcattgcttaatgttctaattttttttggttccctcgttttattttttggagtttttttttt

SEQ ID NO: 295700 - DNA, 4111 bp, Cannabis indica
agtaaaaatgaagattttttcgtgagagggtacttctataatttttcaaacttttgccctattatataaatttttcaaaaaaaaaaagccaacaaatcggctgcctgattcccgaaatcgtttggacaaaaaaaaattaaaataaaaatctgatgaaaaaagtttgcaaacatcacatttcaccttaagaacacctatattcggggttcttccaccgtttaggagatataacattagaaactattgcaacagcaggttcacacaatccctcccttagtttgagcactcaattattgtgcaaggtacgtaactgcactactaataacacattcagctgcaaaaaacttgttaatccgtactactaatatcgatttgatgacaagtcattgaagaatcaaaggactaaccaataaggatcataaaacaaaataaaattatgttatagagacaagactaattgtagtaacctaaattaaaaacactcaaaattatatcataaagaaaagactaattgtagtagtaaaaatttaattgcagtaacaaaacgacatactttaaccaagtcacgcggaagcccaagaatgaccgaccggcctagccaaaggaaaaaaaacaactacagtggctaagaatttaagaatgagaaactagcaattttttagagctaattaaatattaccattagttaagtgagaatgtaataattcatgttaaagttaaaaagtcaaagtcaacctagccacttacatatgattgaaagtcgatccttcttaattcttcttcgacaacttgtggaatagttctttattattcccttttgattatgacggtgcccaacgaaattaattatactttaattcatttgtttattttttagataaataaaaataatgaatcatgagttgtttattaccacaacattgtacaaaatatattttctccagtctcatctaatatttaaaatacaacaaattaaatcgtggggttgcagaatgaactaaatattaatatataattagataattatataataatgttaagagaatggatgagatggaagaaagttgttcagttcttctataaataaagctctcttccactctcatttcctacttctcccaattcttaataaattattctaagttttttttttatgtcaaaattctctattttaataaatcaccatttatataaattacaagaaaaggttctttaattggtacacatggcggccatgaacgatgcttctaagcttgaatacatcaagcaaattcttcttggtgatctctctcctattactaataataataatgcttcaaatctcaaccaaataaatcaatgccaaatttctgattcattttcctccagctccaacgatttcgaagaacccaaaccacactcgatccatttattcaatactcatagctcctttcagtttaaattccaacctacctatcaaacgatcagcaattcgtttgaattcgagtctaacccccaaatagtcagccatgggagccggaaaccatcgctttcgatttctctcccttcgaaaacaacgcagtggattcaattcggagatccgaacccgagagaatctgtagaggagaaagctagcgaggaagaccaggctcactacagaggggttcggagacggccgtggggaaagtacgcggcggagatccgagacccgaaccggaaaggctctcgggtttggctcggaacttacgacacagccattgatgctgctaaagcttacgaccgagccgcttttaagcttcgtggctccaaagccatactcaactttccgttagaaacgagaaactttaaacgacgtcgtgaggatgaagatgaggttgtggttgtgaagaaggagaagttaacggagtttgatgaggcaatcagttatataaaggacatgccgttaacgccgtcagattggacggctgtttgtgagtctgaggaagggaagggaatttttaatgttccgcctctttctccgttatctccacatccaatgttaggttattcacagttaatggttgcatgaaggaataattttataacttttttttttgcaccatatttattatctttcttgttcatattaatttgtacacttgtttggctgggatatattggtttaataataacactgaaataaatttggttgagagttgttgctgggtgggactatagctttttagatcatattaatctgtgttgtgtgtaagtttaatagttttaattttcattaattttttttattatctggttaaaatttttgtaattgttcttcactatacaaagacatgcatattcattcgaaagtttttgttgtgagattaggtatatatattagtatgtttattacttgatattaattatatgggtgcaacccgttatgaaaggtgaaatataatcaagcttaattgccactaattaattaataataatcccaaaggagttgtgaaactgaactgcaccagattttgctctccagtagcatcatcaaataacagcaacaacagagacctaagccataaataatatgtcaagattgaagaatttccaaattaaaacttagttgtcaacgcttaattgtgatatacattttcattttcaataaaatatatatgaaagaatataagggctttaattgatttaattatctatggtctcacatgtcaggtcaagcgtacccaaacagcacatattaaataacagcaaagctgcacaataacataaccagttattagatcagtttcaataaaaaaaaatttatacaattgtattattgagttttagaaaaccgcagtcaccatgcttaacaaccaaaataatagacactactacacatgataactttggccaatactaaatactgacattaattatgctaacttttgcttttttttttaagattattatatgaaaaatataaagcatgtttatgaaatatgaacatacatgcaatacgaagaaagcatcaaaatactttaagttcttgattgttttaagttttgttcccacacaaactttgatctacaaagaaaacaaaacttagttagtgtgagtgtacgggcattcaaactctcttttactctcttagatgaatttactgttttcacagaatgaatagtactgagcttcggaccagcacatattaataagagagataatgatatcggataatcaaatgtatggtgaatcaaaatctgaccataatttaaaaaagtttactaatcgattattatggctattgtagaaaaaatttccataaagttaatttcttgtctttgggcaataccctaattacccaatgtttgagtcacgaaagcctcgacatatccaccagctcttctcttcgtcttgtacatctaataagatcaaagttactagttgcatctacaagattccaaatttgagtttagagtgcatgtttgaactccatttcttgttttaaggcttttcatcaaaaaatcctttttcagaacaacttgtcatcacttcctgtgtcgccaaccaccaagtcgacttcaccatccaaatcattgtgtgtcgggtttcttaaaaattctcccaccatatggtaaggtactataatgacattctgaactggatttgtagtttctaaggataccctatatattaactatcattataacttatttctgttacaaatttgtactaagtatgaagcttagcaatctattcttagaaacatttatgataacaatcaaattgtaaatgttgtttgtaattccagttctctttatatttttttagaacgatagtggggcactattcaagtgttatgaagatgtaaattaggtcttctatcatttgatagttcttatatatggtattttggaaataattttagatggcgatacattagaaaaatgtcatcatcaacccaaaagtttatatttcgagatgatagaattttatagctaagatagtgctatttctattaacaatttgattatgacaacgctttagcaactacatattacaatagagtctctatccaagaatatacttgggaccaagttaattatattctaattgggaggttataactaaatagagttacattaggaaaaaaaaa

SEQ ID NO: 295701 - DNA, 7504 bp, Cannabis indica
aattataaaacaaaaaaatttaaaaataaaaaaattatacacaatttttattaaaaaaaaattatactatatatttttttatttttatatttagatggtattggatgactattggattcgatcagtcggttggattcattagatttacatgtcatctaagaacagaccgatccaatattagatttttaaccgatccaatccaatcttgattggatattcaattttttagcagtcggttgacattgaatcagtcggtttgtcattaaattggatcatttctacacaaccctaactcgaggagagagagtaaaaaagagagatcaatgagaaaaagagagaaagaggagaagataaaaaattaaataaaagatttatttatttatttattaataattttataaatttaaattattcttttgaattttaaaataaattcataaaaatattttttttatataatttttaaataattatattaagtggaccaatataaatgtgtaacgtgtacataatggtacacgtaaacagtgcatgtcaatagttaagtgagataaatagatattactttaaacttgttaggatttagcaatttagagagttttatccaaaatttaaagttaaagaaataagtacaaaagtaaaataataattgagagaatttaactaaaactaatctaaaaagaattgaaagtttattagtatcaattattttttttttctttttcttttctgggagtggtggacagtatcgggaatgacatgttgtttttcatggttaggataggaagcgagaaaaggatattttggtaattgtcgtttctcatgtgtaaaaccctcgaaaaatcccaataagccctaaacccctaatccaacttctcatccgcccctctacgcgcggacccatttccatttccatttggttcagcctggtttcgacaatggcttcggtcgctctccgaaaccctaactccaagcgccttctcccattttcatctcaaatatactcctgctataggggatcggctcagaccggtctctctgtgtccgagtcgatctctggaaatgataagtcttactctccgatgccctggtggagatccatggccaccttcaccagaacgtaagttcaacttctgactcttcagtcctctatacaaccgtgtggatatggtgattggattattaaaagtttttgatgttgtcgctatagtgaattgtttgatttttggtaactgtaactagaatcagctcgcgttaatggtaaaatgggattgcttttgtgcggactcgtaacagttgcttgtaatggaggattggatgtgtactgtgaatttttcttttgttttgactaactagaattacccaaatactattcacaaggtcaatgttacctttgttattgtatctgaatccagcttcgagaagaaatgtggattactgccaattctaattctgtttgatgttttttctaacaggaaacctcatgtgaatgttggaacaattgggcacgtcgatcacggaaagactactctaactgccgcaattacaaaggtttggctattaatgtttgtgatagtatcaccatgtgggtctgtcaaattgtatgtgatgtgttttgttacttgtttaaatcatcagcaggtgtattgcatttgtgagtcgtctttttagttttaaattttcaccctttcatggacaaaacctgagatgtttatgtgatttaccttaggtactgtcagaagaaggcaaagccaaggctattgcttttgatgaaattgacaaggctccagaggagaaaaagagaggaattacaattgcaacggttagcatgctgttttgctgctgctgattatatcatctatatgagtctgctatttttttaggctggactttagtgtatatttttatatttttatttttctgtaattgattttctcttgcaacatgtgtgttccttcattttgcaggcccatgtggagtatgagacttctaagcgacattatgcacatgttgactgccctggacacgctgattatgtcaaggtaagctcaataatagaaataactgaaatgtatatgattttacagtcagttttttttaatgcaactgttactcatgtcgaggatcaaaaattgagatatgatggctataaactcttcctggaaaaaatcatatatatattatgtgtgtttttattgttacaacttacaagttccattagttgtttaaacttgtaattcagtgtgaatgtcctaccgctggacattctcatgctcaccaatgggactatttaataaagcataattactgtacagaatatgattactggagcagcacaaattggatggtggtattcttgttgtatctgcccctgatgggccaatgccccagactaaggagcatattttgcttgcccgacaggtgggtatcttgttattatcactttattggagaggatagtttagctacatgttttttgatatgcaaatacaatattcaacaatgcatataaagattttctgaatgtattcaataggttggcgtgccatcacttgtgtgctttttgaataaagttgatgctgttgatgatcctgaattgttggagctagttgaaatggagctgcgtggtgggtatcttttaaaaatattagccagacccaatgccatacttcttccctttaatcatttacatcttattattattgcagagcttttgagtttctacaagttccctggggatgagattcctattattcagggttcggctttgtcagccttacaaggcacaaatgaggagattggaaagaaagctattctaaaattgatggacgccgttgatgaatatatacctgaccctgtccgccaactggataaacctttcttaatgccaattgaagatgttttctcaattcaggtaaaacctgcgtgtgctttatttaggcttgtatatactgacatttttttacaaagtagcagccccataattgtgttcataagtttgaatgttcgaagcgtaatcattagatggtttccattaagattgggtgtaatcttcatatctagttttctattttgtaatgctactgttgctgctgtttacttctgataaacagttaccgaagtttatcacgaatgtccactaaatttgtatcttaagtttgcaattgaggattgggtggggtatgcatggctctagcccactccttacattgcttaaaattatttatgatgtgtggtgcagttgagtatatcatgtctttttgactataaagtattggcttttgttgtataaaagggacgtggaactgtggcaactgggcgtgttgaacaaggagtaattaaagtcggtgaggaagttgagattctggggttgaggcaggtacatatttacatctagttctattatttttggtgctgccaagcattctcttgatatctccgtgagccctgtgctttctaagaatggctggtctgacatgattttcctactttagggtgctcctctgaaaactgtggttactggtgttgagatgttcaagaaaatcttggatcaaggacaggtaagtggctaaataagatacgcattatacttaggtgtttcttttgcttgcggttccatttaataattgcttttggtatttaataggctggtgacaatgtgggtcttcttcttcgaggtctaaaacgagaagatattcagcgaggacaggtatatggcatgaaattacacctcaggaatttatttagagtattgcataaaattttagttatagaaattgactactttgaaattacacctcaggaaatcttgggttgtggtattgcataaaattttagttatagaaattgactactttgataatttttgtaaggcaggttttggttctggtagttaggcttgaaccttggctagtgatcagtttgtattacgttaagaggactaatatttcaatattatatatagtggaaaagaatcttgtaactactgtgttagatacaaggattaccatttgaaatatcttatgtttctaatctttgttatcatattggattgtaaaacgttgtaagattgtttattgcccaggtaattgcaaagccaggatctttgaaaacatcaaagaggtttgaagcagagatatatgtcctcacaaaggatgaaggtgggcgtcatactgcatttttctcaaactacaagcctcagttttatatgaggactgcagatatcactggaaaagtagaattgcctgaaaatgttaagatggttatgcctggggacaatgtgaccgccgtttttgagttgattcaacccgttcctcttgaaggaggtatgttttcatattcttaaaaaagacgtaccctgcatgcactctaatatgtaacccgcatcactgttttttgcctttgattagtgtcatatttcatttgttcattaaatacctgaaaattacactcttcttgaatgtgtttattgttaaatggttcacacaattttctcatgggtgcatctccattctgtggtgtgactttttaaatactttttatgtctcgagctgtatacagttgtcatgaaacattatttgatggactagaacattgttggttgaacttgacaggacaaagatttgcattgcgagagggaggtagaactgtcggtgcaggagtagtatcaaaagtactgagctaagaattttgatgtgcccggtcctttttatgttgtctgtattttcattagcaaaaaagggttgataaacaaaatggaatattcagttggacaacatgccatgtggtaattgcttatatagtccacatttgatgcggttgttagatctaggcattatcaaagaggatgtttgatgttacaaattcgagtaaattgaaggatcgaggaatctcaggcatgacctttttgcatcttttttggtatttttgtcataaataattttccggtaccggtatacttgaccattgttgtacctgcttgtagcatgggatctgcaattcaatttaagattcaaataattttatttttatgttacttggcattatcaacgttttcatgtgagaaaacagctctcttgggcttggaattggattattaatcatcactgccactgatggtggtgtaatcatcaaggcaaattatattcttttggtttcagtaacacaacgaatcacttgtctttgtaacaatcctatttgtagagacaaaattctcttcttcttttggcaataaaatgaacacttttaaataaggttatggttaagtgtatgttgtgttggattatgattgaataaacatgagatacgataagtagacccgaaatataaaaagagcgatcattctcattttttctttcaaaatgaaattcgtttgtattatattactagtcattctaaagttttgttcagtgatttcaaatttaaatttaatgagatcagtgtaatgtacggtctctctacctagttccataagtgactagggttttccactcagttggagatgtcgccagcctgggagcgtgacttgccggggcctgaccgagaggatcaaatgcttccttctttaatgggaagtgattccaaggcaacaacgatgtgctcatttcggtttgtgactcctaggctctagggctttgctagtccttcagctccttttccaacactggtttgacgtgtggtggagcttgtgatcaggtgggttgtgattggtgtgactcaagatctcttttgtggcatcattaaagggtgtgctgatgttctccttcggcggccatttttgtattggttgttaacagtctattggcatttgttgtgtttgatcatctttttattgatttgttaatttttattttgaactgggtcatatttgttaatggacgtaccacttttgttacttagaaataaatatatacataaagttctaaaccaaactcgataatattgaccttgttcaatttattcctgttgcaagttatacaacctacagaaagccaagcttgtgattccctatctataaatacttgtacacaaatttattatctagtgatataatttaactcttagaatattgcgatggcattagtggtaaatattttagtttaaattaaaatatgtgagactcgttactcaactacaacaataatcaagatgcggtggggggttgtacagcatagggtgccatacaacaaagctcaatttttttaacaccatattggcctatagagctccctacattaacactctattagactagcatcttagttaataaagatatattaacattgttccacctgtaaggaggaataccatgctcaaaactgatattactgattatggtctgtaacaaaactattaatcaattaaccaaagttggttaaacaatacacaaaatctaattataaaacatcaattaatatgttgcttactggttgctgatcagacagaggtcaggtcatcctcgatcgaactctgcatcatctcaaacttacctagaattctttcgaatcccccttccacttatgtttcgttaaatttttaacttgagcctcttcatctccaccacatcaattccaaatgagcttcaccccaatctaatcatcaaccagctatacatatacatagcatatacagttactctcacatacacagctagtcatcctgatcttctaagttcatcaaacgattcaccttcgccctgaattttacttcctctaacgcttaagcgaatctcaacaacgcgactgccatcagagttgcagctctgaaatagatatctttcacactcttatccactttgttcatcacttcatcttctttcaaccccatcttccctgcattcttactggcgtagacaacagtgtccctcagcctattaactgcccaagaaagccaaaccaggccaaatcctaatccagtgctgacgagtctcgatgagcaaaatggtacctttgcacaagctaatttacagacaacagagaataagacagccaagccagtaccagcaataccgactgagaattgagtcaggagctcaggaagctcgggaccagattttttcaatgaaaggaaggcactctttccatgcttcttcttctcagtcattatagatagaaggttttcacatgcatggaaatagttctttttgtagagatctcgtactctgcccacccttttaccgctcttctttttttgtgacttctttacctttccaggactgttgagcacacgacaaaaattcgattagtaaagactcaaaactaaagccaacattggtgattgacatacagaaatgaagaaaataagtgcatatttctacctcttcataggagcaacagttgttgcatggagctttaaagaagatgcatcaagaataacccccactgcagtgctgtccaacctgttttgtagaattgattgcaggtgaggtttttacaaagaagaaaaagcaaaacccacgaaagcagtaatacatttaaatttaagaaaatttatatatatatatata

SEQ ID NO: 295702 - DNA, 4365 bp, Cannabis indica
aaataaaaaagtccctaaaaaaacgaccaaaatatttaaaagagttttaaaaaccgtaaattctactataaatatttatttttaaggatttttccaaattaatttaaaataaattatccaaggaaagagcttgagtcgagcagagcaaaggttgagcatcaatggctgttcaactctccggcaattggctacctaactttcccaaagtccctggcaatttttctcagacccgaaccaaaccaaagcactcattctctacacttatagctcgctcagcaacagcttcactttcgtctacacctcctactatccaggcaaacttctttttatttatttaattatttatctctggtttgctgggcaagctttttcttaatggggtttctatatcaatatgggcacagttttttatcctcaaaagacatttttttttttttcatttacatgaagaaaaaatggtgggtttttattttctagccccattcctgggctgtattccaaaaccttttatgcttcatttgacgtgaattctagtaaaatttctgttgtaattgaaagctatgtattctctgtaatgttcttatatgaaaaaaaaattgcagattgttggtgggaaaagtcctagtttttatatacatgaaagttccaattcacatggctcccgagttgaagatgactgggttgatcttgagacagatctttatcactggactaagactcttcgacctgttcaggtacgagttagctatggttaagagtcaagacagttatgaatatggacttataaggagtgtgttttttattattgcaactgggaactgatattttatacctcaaaatgctttgttgggggatgaattttgggcagtggtatcctggtcatattgcaaaaacggaaaaagaacttaaagaacaactcaagttgatggatgttgtgattgaggtgagagatggcagaattcccatgtccacaagtcatccacaggtgggagctccttactccagagttgcttaagttagatgatcagttgaaacaagtaccatcctatttgataaaattgttagtagattatattataggctatgtaaatgcaacattattttctaatgggaaaccaaatgaagaataaggaagtgttagttcgattggtacagtgtgaccaatacaagctttggaaattgatatgccagttaacatctttggtttcttaacttttcttaaaagtttcctcaacagatggatgcatggcttggtaataaaaaaagaattctggtgttgaatagagaagatatgatatctacagcagaccggaatgcttgggcagattattatgcaaggcagggaactaaagtcgtctttgcaaatggccaacatggaatggtatcttttccttaagttttcttataataagaagagtgatacctaaggatattcttttgtatgttttcgataatttgaacaagaacataacagcaaaatttaagtgcagggagccatgaagctaggccggttggccaaggcattagctgcaggtgtaaatgtcaaacgtagagccaaaggactgcttcctcgtccagtaagttcctaaatattgagatattatgctaaagttgaacattacagtaattattgattttctttgttcctaaatacgtgtgtacatttttatacacacgtataagtaaaatgtaatttgtttgtgtttgttatgcttcagtaattgtctttttcattttttctattgctgctactctttcaattttcaacatttttctaaaacattattgggggttctgtgtgtttttccttacaataggtttgtactttgttgatatatgtcagctttttaaattattaaaaattgatgcctggcaagaattttttattacaaataggttcgagctggaatagttgggtatccaaatgtggggaagtcttctttgatcaaccgattgttgaagcgacggatgtgtccggcagctccaagacctggtgttacaagagtattgaagtaagccatttttcttttgtattgtagcatatacaaataagggttagtgacatattagaggctcttctcacatatttttgttgttcctatcaaaggtgggttcgttttgggaatgatcttgaattgttagactctcctggtataattccaatgaggattagtgatcagtcttctgcaataaagcttgccatatgtgatgacattggagaaagatcctataattttcctgatgttgctgcaattcttgtacagatgctgacaaagcttccatctgtaggtatatatatgacgccggtgctttaatatttcttcatagcactatgatggcattggcattggcaaagacttaagattaaatcatttcagagtctgctatggtttcttattaacagtttagtttgttagtttgattttatggaactgagtgatttttcaagtactttgccatgtgattttcgtatatcatttatttcacttcagcatatgtctcactcaaatattttaccccgatcaggtatagaagttcttcagaaccgatacaagatcgatgcggatggccactgtggtagaaggtaagtgccactaaagtaatttccttgcacctggaaaatacaatgtggtaactgctataaatttttgttgtgaactggcaccttttgcatcaaagtaagaaaattttaagataggatttgggaaataagaaaaagtgaagaaatgagttaagattgtgttcttttttctattttgttcttattgttttctaacatgcagatttgttcacaagcttgcgaatcacttgtttaatggcgatgataaccaagcagcatttcgtatcttgtcagattttcggaaaggcaggttcggttggattgcattagaaaggcccccaaagtaatgccaccatttaaattagtggtagattaaaggacttgtcaggcttcaaagcagaatatgttcttagggaactgaagggatgctatgctgactactgagagaggtataatttcaagtccatttggattctgaagtttctaattcatttcagcattgatgaaaggaaacaaggctgtttgatgaaagaaagggttcactcaattcagcaggctggttggaaatggaaactgactttggagatgtatacagcttgtatatagctaagatagtccttttcaagttcttagcgggtccaatgatgatacaatacaaccaactacaataaaaaacataaagagggcttgctcagtttgtattttaattagaaaattttacatgaaaaaaaaaaaaaaaacaatttttattacccttttacctctacaagggtcggacaacttttgtaccacttttttttttgttttatattaaaaatatcacttacacacctaaaaacatctccaatggttaaatattagaagatgtttacttatttggcaaaacatgaggatgctatactattagagttgaataggtgctattagagttgacattgatgttataccactttttacaaaaaaaaataaaaaaataaaaaggtaaataaaatattgtgataatatttaagggtgtttataaaatagtcgatccaatctaatccgcaaagtgcgaatatccgcacttgtacggattggattggattggaaaattcaaaatccgcacttgtgcggattgaatgttaattaacatgtaaaagtaaccgattaatccaatccacacttatttataaaaaaattaaaagattatatataaaaataatattttaatataaagaaaatagtaatttaaaagtttaatacatataatacaattatattgtaaaacttaatagattaaatatatattctattcttatatatatatatttctacatacaatttataatataattaaatattttttatatacatttttttttcttcctttgaatttatttgttattttatttattttaatatgttgttggagacataaaataaatataatttattttattttgttactagttatgtaattttttttttcataaatattaaataatttaatattaaaaagtcacaaatccaaaataaccgatccaatctgcacttttgcggatgcactatgagcaaaatagtgtggattgaattataattaaaaataataatatattaaataataatatgtagatcataattatgtataacattcttgaagagtgttatactattggagtgtttttagaattaagagtgtcaaaaataatgtagaagagagataaaataaaatattatatttttggatgatataaaaatttttagcacctttaaaaaagagaaatgttaacaaatggccttattttttctctagtgaaagttaatgt

SEQ ID NO: 295703 - DNA, 3475 bp, Cannabis indica
taatatttatgttattgcaatatgatattttaatttattgaattttgctaatcttattagtaagtttatttaaattattaattaaatataacaatttgataattttaattaaataacatgatattaatttttttactttaatttttaatgttgtggttggagtataattttttttaaggtcaaatttgaatttaataatagtgtaacactaaatttgatctgttgttggaaatgatccaataatttcgaaaaatggcgttcaatgtaagagaagccactcgatgattgacacgtggcaaaattacttacccaatttacctagaacttttgccgccataacagttaaaaaagtataatcgagggaaaaaaccgcgaatttagaaaatggtaaaaacttcatttggcgccaaaaaatggtccctaaactcaccatatgtatatatatatatatatatatatactaaccccaccacacacgctcacacgactcttctcattcttcttgattctctgctcagatgagcgaaacaatggaagctgttaatgctgtagtaatggcggaggaaatgtgaataaggattccttcattactgggtccggtgatgataatcctgacctgctagcagttagccggacgattactagcacagggtttcggatttcggcccagaatatcaaagaagattctggagatttcaagaatttgaaggatgatcatttggaaaaggtgaataataaggttctgactcctagaatatcgtttgatgattttttgaaagccaccaatactcaggttatgactactgaggagtatctcaaaacccagatgaaagaatctgctgaagttgggtttgagaaacaggtggtatctgtgaatgaagtcaagaaaggttccaacgatgaaatacgcagtgttaaagcagtaacagcagaagaaacggtgaagcgcaagactcttgtagaacgatggtgtcaggaagaggcttcaagaaaaaatcaagttgtggcgaaactagagaaccccattaaagctgaaccaataacgactattgttccagtgaaagacgagcctattatagatgcggagccgattaattgggcgaaggccattgttccggtgaaagaggaagaggcagtaagagaaacattacgagagagttttatcaagaagttcaaaagtgcttctgttagaggaccgattaagcagaatctgcctgatgcaaagaaacagagaattgagaatcaaaacccttgtcccattccagtggaggatggagacttccctgaagagcccgactggtttttggtgggtagaacaatggtgactgcgctttcaaccactaaaggcaggaagttggtggacaatgagattgtccattttgcttttccttccaccgattggaaatctaacagtcgttggattgttcgcttttcgaccaaaagatatggagaggtacatttgtttacacttgatcacatttcatgtctgctaaaatttggtttttgaactgttctttgcaaatcatagatattgaagattgtgctatatgtgcattggttgctttgtaaagtcttattactgatatcaggtgttattaattgtacctaatcactagattggtaggcttccaatggagtggggaaagtgcattgttcctcttgtaaactctggtaaggtgaagttttttgggcgttgtgtagctgcaccagcaaacctttcattgatgcaagatattattttatatgtgaggtaaagttgcagtttgtactaaattactaatcttttagcatccatattgaacccctatttgggtttgttgtatgaatttgattacttgtttatcttatcagcttttacatccaccgctccatatttatagaggatgataattcttcatggggatggaagctagaagctgtgcacattgactctacagtctaccccctcctcaccttgttcaagctgttgaaaatccaaccgtatctgagggtatgctataaatttattgaaactgtattaacattcagcaagaaagaagatgttcaatctctagttccaattaactttaagtaaagatttaatttccatttgcttggaacaggctgagtttactccagaagaacttgattctcggaagcgtctcttagatctagaagtatgtactagttgatcaattatgtactggttacgcaagaattgctacactttgattgacatggcttacaaatcattaatttgttcatcaatgcagagtgctccagatgaaactgcatcaatgctgcctattgtaaaaagaagacaaggttgccagcagtatccagagcaaagcaaggatgaacaagctgtttctgagtcatctatgaataaaattgttggtgccgcagaatcatataatttggaggtttgtaatgtttagagtattatattgtttaccttgaatgaatcatggtattattctggatttgaaggtcctagttatcttgtatagtttctcttacttcctgttactatcttaatattttaggagatggaaccccctagcaatctcaattgtagtctaaggtcataccagaaacaggccctttactggatgtcagaactggaaaagggaattgatgttgaagaagcagcaaagactcttcatccttgctgggcagcctataaaataagtgatgagtatgtagttcttttgatgaaacatttctgctttatatttctgaatctgtattagtactcattctttcataatcatagttctaacttccaagtaaccattgaatatattctggtaggagggcttcctcaatctatgtcaacctcttctcaggggaagcaacaaccaaatttccaactgccacacagatggcaagaggaggagtgagtactaacacccttttctctattattgtgtaaacatttacaatttgtgttctgacttgagtatatttgtagattctagcagatgcaatggggcttggaaaaactgttatgacaattgctctaattcttaaatgtcctggccatgctagttctaataatcaaggacttcttaaagattctcagacagacacctcgtccaaaccaaaaggcggcactctcattgtttgtccaatggctttgctaagtcagtggaaggtgcatatctcttgcttaaaaatgctaagaatgatattaattgatatgttataattttattatgcttggaatagtacttactgtctctgcttaaaattctcaggatgagcttgaaactcactcagaggcagatagcatttccatatttgttcactatggcgggggaaggtcaactaaccccaagctgcttgctgagcatgatgttgtcttgacaacatatggtgtcttaagttctgcttataaatatgtaaggaagtgtaattgtttctgtaaacatttcattcccttttgtttttttgaataatgcatcaaaactttttttcttcgtggtacaggatg

SEQ ID NO: 295704 - DNA, 6173 bp, Cannabis indica
ttttgtttttttttttgtaggcggtgggctaagtctacgaacagaatcactcatgttgctcgtaaaaagaactctcgtctcataatgtatggtcagcattatagtcaacttccaagtcaagttcatggaatattattatatttatttggatacaccacttgacttttcccagtaaacttctgggatgcagcgataaagtcctaagccaactttgaaaaggtctaagtaactaccaaactaacgagtcacgaatcccttcctttctccaccacgtgttttgaagatagttcatcttttcttaagatcacttgcccaaatttatacgcacgcacacaaaaataaaaggtgtgaaagatagatcgaaagacctttggtttctaatggatcgaacagtgttcgaggctgcagcctcaggagacttcaacccttttcagggtcatagtgaacagcagattatggacttattaacacccgaaaggagcaccattctccatgtttccgctagattcaataacaagaagttcacagaacaagttatccacttctgtccaaggctgttgctcaaagaaaacactgctggtgaaactccccttcacatagcagcaagagttgggaaccatgagttagttgagctcctcataaacagtgctggtgatgttgagagagagcaaatcgacctgggaagtcttctcagaataaaagatttggctaaggaagacactgccttgcatgttggggtgagaaatggtcactttgaagtggctaagttgttgattgatgcagaacatgagttgcttgatgtgcttaatgctgctaatgagtctccactttttcttgctgtggaaggtggcttttcttctattgctaaatacataatggaaaagtgtcgtttttcatctccagcctcttgctcgggctctaatggcatgaatgctttgcatgcagctgtgattaggattcaccatggtaagttgacccttttggcttctggtcaactagtttactttacaactcaaaactatatttttttttcttcttgtctttagctagatttttggagcatcaagtgccagatttatcactcgagaacttgcggcgtctgataaggagctttctattacacttggaagaatgttttggaagattaccccaacaaactgaaataggtactttttggcatatgactaatgtggtaatgatattcttcatcaactcgttcaacccaacgtgcattgtaaaatatttcaatatccaatattaagattaatattgcattgtgaaaaatccactaatattaagactgtgtctaaaggtcacgtttggataatggaataggaaaaaatgtttttttttttcaatcttaatattggtcatactcaaatgtttttttttccacaattaatgttggtagagataataggggtactactagagagggaagaaagtcaaaaggctgatttactagaagaacaggacaacataatccaatggactcctctccattttgctgcatgtttgggtcatcttgaagcaaccaaacttattcttcaccagaattgtagttcagttgcttatctgaaggacaaagaaggcatgtcagcacttcacatagctgccaaagaaggccatgtctcagtaatgagagaaatcatccttcataaaccagaggcttgtgatttggttgacaacagaggctggacacctcttcacattgctgttgtcaatggaaaacttagtgttgtcaagtacattctcaataccgcaagactagacttcatgctaaacactgcagataaagatggcaatactccgttgcatttagcggccggttttaagtataaaaggattatcaatgttctagtgaatgactgcagagttgacaagagggctactaatctcaagtaccttaagccaattgacatacttttaactaatgtcaatattggtgaatttttcagggtaggtctataaaagtcttgttcttttattgtgcttgtgtttttattacttcttatcaactagttcttttaattaatatttcagtgttggtttgtaaagaagttggaacagcaaggtggtcaagagagtctacaatcaatcatctacagagtagaacaatggaatcagttggttagaaacgttgaccatcatcatcatcaccccatggaaaaagccatcaaatccgaccgattgaagaaaatctcagacacccatttgctggtagctgctcttattgccacagttacattcacagcagcttttactttacctggagggtacgaaaacgatgatcataccagtaagggaatggcagttctgtcaaacaagatatttttcaaagtctttgttgttgcagattcagttgccttttattgctctgcagcctcagtcttgcttcagttcttcagctcaattgagcataactattatcttctcctgcggtttacaagaatcgcagccactcttacttacatttccatctttggaatggttattgctttcacttcaggcttgcgtgttgtcatgccaagctcgtcgtctctagtgtactatactctgataatgggtggttgctgtatttttctctttatcataggatgtctttagatgattaatagtacatccttcatttttttcagtttaccatgaaatagtcaaaattatcacaactcacaaatccatttcgaaaaaagagagtataaattgggtgcacatatcagtactattttcttgtttttacgaaatcattctttaaattgtttttatatgaaagcatgggagtgcaaatgatcaacttggaatcagatggtcaaaataagcaagaaagcatgtgattatttaattttatgggtaaataatttggtttgatacagtagtagtagactaagttttatttatcaaacactacttgactatttcatatcatgacaggtaacaggccatatgattattgtttaacacgtacactatatgcaaattaaaaagtaacttaaagacaattctcaacaaaatatatttatatatatatattctataattttacttgtcactgaaaaattatgaaggtcagccggattcataccttccaaattatattatctatattaacacttgatatctggctactttatatatttttgaactagactatcctcctaatcctacaatataagtcaaccagaaccagaaacctatatcattgctatgtgagtcccgaaaaaattccagactcagacaagaaaacaagaaagcaaatcatatgtttgaccatttgagctaatcagtatgcaaaagatttgaaccttagataacaagggcacccaatcgccaggcgcccccggaagacagcatagatttgtgtaccatcatcatgcaaattatttgaacccatcattttgctcctgtgacaggacaggatttgagcaccatcctctgagaaactccttaaagtattatcaaatatataccttggccaagtaactatccgagaagatgttctgtattcaacctatttgctttctgtacaaaataaatgtgaacggaattcaaaatcttgcataagacaggggcctgctctcaggattgtcaaagatggtcactacaaggtggcaattttactagttgacggagactgataattggcatgtttcgtcaacaacgttaaggaatctccactgatcttggctgtggttagaggcttttacagggttgctcttcatttccttgatactgctccacaatgttcatatggaggaagaaacgacaatgtccttcatgcagctgtgattcgaacttatacagttaaggacatcttaaacacaatagagttgtgaaatcaattcattgatcaagtagataagataattttgagacactgatatatatatatgtgtgtgtatatatatatatatatatatatttatatctcttttccttacctcctaacaaccctgccctcttgatatgcaggtgaaaggttttgaaaaagtttccatcttcagtggcagaagcgtacgtaaagcacctcattcatacacttgcttttcaaaatcttataaatgaacaagattagcaaagaaatacacatttgcatccagcctcttcccagggacccaagagtagacaaaggagctctaaacaaggctagaatgacttaagaaacatcaacttgaaagataagttggcaagtcttaaatggtggtgttaaacctgacatgatcatctctttcagtacaagttcagcttcgcgcctttttccatctttgcaaagaacattgatggtggaaatgtagctagccctgtttggaaccattcccttattactcatttctttaagcaacttcaaggccttgtaagagttatcctccttacagtaaccactgataatcatgttatatataatatcacttggctccacatgcttctcactcattgatatgaacagttttgatgcttctttcatattgcctctcatgcatagcccatgtattaacaccccataggtgtaaacatcggcaactataccatctttctccatgatagaatgtatctgagaagctttttccatctcacctgacctaataaaggcatcgattaatattgtataagtcactgtagaaggagaaatgcctctctcatgcatttcactaattataccagcaattcctgtcaagtttttagctttgccataaccagcaattagaacattgtaagtgactagagatggagagtggccgagtgacttcaattgattaaataagttcaatgccttatccaattttccagtatcacagaacccatcaatcaacctattgaacaaaattaaacttggactaataccagctcttttcatttgatccattaacttctcagcttcctcaacccgcttcttcaaacataacccaccaattaagatgctgtacgtgacaacattacaagcaaccccttgttgacgcatttcatcaaacagagcaaatgcactacttatttcaccatcgttgcaatactcattgattagagaattgtatgtatgcgtactgggaatgactccattgagcttcatcttcacataaagctcaaacccatctttcttaagacctttcttgaaaaatccattaatcataacagtataagtatactgattaggagccaaaccaagctcactcattttagaaaacaacctctttgcccgatcgatatcgccattcttacagcacccatcaatcaaagtagtgtatataacaacgtttggagaccaacccaattcctccaactgacccaaaatctgaaatcctctattcaaatcaccagcctcacaacaaccttttatcatgatcccaaaactatactcatcaaattcaatcctattcttaaattcattaaaaacccaccaagctctttcgaagttattggacttaacaagagaacccaacacattgttgaaaactttggattcgggaacgaggccttgctccaccatacgagctaaatagcaaagggcatcttctggtaatcgagattgaacatgggcattgatgattgcttcgaaaagatatcgacgggaagagttaggaaaggagttgggctgggatagttggtggagaagagaggaaggagtgaagagctgtgatgagatttgagcagagagtagtcttagaatgatagattgggcttgaaccattaaattggaagaaagaagatgatgaagaatgaaggatatggaatgaggtgtatgttggaatccttggggagtttcgttgaagagtgaaagagcttttaatggcggactcttaaccattttctggataaaaagtagagcttggtgattttgagacatttttctgctcattttcttgctcttccctcacttcatgagaaataggagaagaaactcgtaataagggtttaagaccgtttattttcaacaaataacataatttccctataataacaataacaaggtgcaaaactcatagaaaattgtcatgagtctcaaggaaaaagcttttctctctttcctaatgctgtccttacttaagccactaaggttagcttagtggtgaaagagagatggaaaaaaagaaaggtcatagattcgaactcaggacctttaagttattaagctaatatataagggaaatttgaatttccatgcttaaataacctaaaaattt

SEQ ID NO: 295705 - DNA, 1451 bp, Cannabis indica
agtttattaaaagtatagtatatactacgcactatatgaggctcaaagctttgaatgcctaaattaataaatgagaaaaacgtacatatattgtgccaaacaaaaggttttgtagagtagatatagatagattatctgtcaaaaatttaattacatttactattatactgttcatattccaagctcaaactacatgttttgttttctttttttccttttctttttattagtacaaaagaagaaaaacaaacattcttttactgcgttgacatttattatatatggttatatggttattggaactacaaataaagccaaaaaagaaaaagaaaaccggaatgtaacaattatctaattaaattgttgtttcaataatgattaacttttgtgttattcattcacctttaattatttgcaactatatattggcaatagagtccaaaattttagttaaatatttgttttttcatatcttccaaacatcacagcaggattactatcctagcagataaactccttttgtctttattttatatattaattcaaaataaattacgagaccactttctttatacaatcataaaaaagctaccgacaatattggtcgaaaaaattgtatttgtggcctagccactccaacgttatttaaagccacagcataattgtgctgtcatagacaaatttataatatatagataaatgtataattataatatgttagaagaaaaaaatcaaaccaaccatcaaccatttagatacccaagtttactacttcagtacaatctacaaactgcaatagtcatttatgcataccttggaccattaagtactatttaaactaattaataatatcttttctaatatagctgtagtacgccttgctcacttattatttttattaatataataatgtttatgtatcttattgataaacattatatattaattagagtatgtacaaaaggactcacataaaaattgtttcatagtttgtgtcataggatcggtatgagcttgctgtttagcaaaagaaaaaaaaaaatgaaaggggcatgtctttcgttaggttggagtcagtactaatatgataccctactaaacatgaattggatggagcatgtacatgtatgttcattttcaaacactaatataatataaatgtatatccatatatgtttttataggtttcaaacttagttacgcttttaaatgtgtggtgatgatgaaaactaatatcacaaattatgactattaattattattattatacaattttttttttataatcaatattctaataagtttcgctacaaaaaactgttacttttaatgataatttttcagtcgcaacaataatttttttgtgactaaatatgacttttagtcactaataaaaaagttaattgtgactaaaaacataaatatttagttacaagttgtcactaatttag

SEQ ID NO: 295706 - DNA, 4481 bp, Cannabis indica
aaaaaaaaaaattagaaatttatgtaatagacctttaagagttgttttggtagatattttatatgttttgagagttgttttggtagattttttatatgttttggcatcagtaagagtttttttaactaatttttttttttatgatcttatatattgtaattatttatttataaccacttgtaaatttttcaaaaaaatttgaaatagtttaccgtgctgaaaaataaaatttaaacagttactatgcgtataagaaaaacagtcgcgtgtgcaataataaatataaattttattttgggcattgtaaactattcaaaattttctaaaatttactggtactcctaaataactataacgtacaataataaatataaattttattttgggtattgtaaactattcagaattttctaaaatttactggtactcctaaataattataacgtatacgatcatgaaaaaaattggactaaaatgctctcttatatgccaaaatagatagggatctaccgaaatactcctttagaggaactgtagacttacctttaaaactcgaaagagaaaaaattctttcacggattgttgcccctcttttgacccaatatacgtggcaaccccatggttggacatgtagcaagtgagtcttaagatcatgaagtacttaagataaatcctaagtattttctggattggatggacgtgtccgagaggtccctctgggagcttcatctatatctggatgccaagatattttgttcttctctgggagctaggaaagtctctaggatcggtggctaggtcccagacatgacttatataagcgcattaaatgcggcatggaggaagcgtcttcgaatgggtctgaaaagacatgtcagatgcattaaacccactctttagtaattacactctaattgatgagattagcgacgactgcataataaactatcacgttaattaaggaaggttaaaggtttgtcttacctaacacctagcgaaaaacttatgtaacctactgtgcagacatacataacctattattcgaacctaggaacttgtgcaagtcatggtttaaacacttgagacaatagaaatattttgactctcttcataaagctataaatacccaaccataatctagaaaagggtcagaaaaaaaggtgtaaaaaatatcctctctaagaaaaactactatattaaatactagtgactcgtggactaaggcttattaatgctccaaccatgtaaaaagtatacgtattaaatctcttctaatcattaaaacatctgtcattaattagttaccgaaaatcttggtcaatattttagtacttttattgagagttgtagaaggctttacataagacgaatattaaaattaaattctcggtatgatggtggaaactagaaaccttgcacgtcaactacgtcgatgtcaaggtcctagggggccagatgaagaagaagttgctttgcgagtagacgcaaaagcagaagagcaagacaaaactactaatatagaatacgatgacaaccaagaacaatatgatgcatatgatgatggaagttacaccgaactcgtagtgttgagacagaattcgctgaccatgaagctgagttgatagaacaaaaggagcaaaatagaaagttgcaagaaatagtggttgccttggaaaaggatatcgaaacgacaggcatccatgtgcatccaaatattgggcccattggaccagacaaaacgagagaagagtctccactaaataatcaaaggcataaaattcaagatccaagccctattcggtaccccacagaaggctctccaagggaaaaccccacatcctttcccaaaaggaacaagaaggcttaggatccacgaaaagtttgctccaatttccctaaaggaaaaggtccacaaatgggcaggtttccaaaggaaaatgctggccctcaaaaccggggagactaaaaatgcatatttgtatggcaagagctaaggggagagagggggaaaaaatacaaaaaccctccagtcgatttgagatagaaactcaatgccaaacacggtgatcttaggaatttcttggagagaaagaaacgagcaataccattctcaaaaagtgccttaaacgagggaatcttagtcgaactcgctatcctccagaaggatatagctaaagtctcttgaagataaaagtgaggtgatttagaatctgattgtgaggatcaggaaccctatgctaggaacatccttaaggcaaagctcccaaagaatttaaaaatgcctgaaatgatgttgtacgcaggagatagagaccctagtgaccagtacttgtcccagtttaaccgcgtgatgacagtcatgagagttaacaatgacgtgaagtgtttgtgtttcccactgacgtcaggagggtccgctaaggagtggtttaaacagctagaacctggatccatggattgttggaacaaatgataggttagtggatgatggacaccaattggcattacttcaagcaggaattcgaacgagaatccttttttggaatgagctctagcaagaaggagctgcttgtctttggactttcaaaagagggctcaaaagtacatcaacctagacgaagcacagataacgaattttggagggtgttatcccactagcggaccagggtatgcgtcaggaatgcagtttttaggagttactcttctagttgcatctcaaacaggcatagcgcctagtgtgcaattcttagtaacactaggatacacccataaccttgctctcaccccaacttagtctagttttggagcgctagggggtaacctagctcctagagtaagttcacaatatccttctcaatctgcacctcctgcaacaagtgcagcagatgctcctcaaatctctcagagtataagatcttcaaaagaaagcacgcgaacaaaaaagaagacacaaaagaaaggttacacctctcagtatacacagtataccgatctagtggacacccaagagcgtgtatacttagccacaagataaaacacccactaccggagacctcttcctctataccgggattgctcgcggagagaccctaacaaaagaatgaatattataatgatattggccacaccacgaacaaatgcaagaatttgaaagacaaaattgagagcctaataaggctaggtcacttgtatgaatggattatagataggttgtcgcacatgaatggacaagttggaacaccagtgcctcctagagtaccaaccccgatcccagatgagctagtccctccaagagtccccccctcaataccatccagcactcggatatcctcccaggccagatgggagggtggccatgatttcgagagcgccacatattggaggaactacccgaaatgagttaaagcgttatgctaaagagttggatcatgatgaaaaggtgtgggaggttaactagctcccgatgcaaaggccccgactgatggatcgaccaattacctttacagaagaggatgccaagatggtacatttccctcatcacaaccctttggtaattgaaacttctattgccaacaagattgtcccctagatcttagtagacaatggaagtccagtgaacctcctttttaaagatgcttttatttccattggactcacttatctagacctttccacgagcggttcacaactcatgggattcaatgggaccactttagttcctatgggaaaggtacgaatccttgtatctttgtgcccggacaccccccaaagtacgttcaagtattgcacctttgttgtagtagactgactcatgacctacaatgcaatcttgagacaatcggctttggtggactttggatccaatacctccattaggcacttatgcctcaatttccctactcaagcaacaagagttaaaaatgttcgtggaaaccaaagagaagtaagaaaattctataatgtggttgtgacaacaagccatttttatgctcaaaaagaccaagaaagaaatcttgcctgaaggacaagataaattggatccttgcatcggctccgaaaccgtattagaacttatggaagagattaagaaagtaagcatttgtgatgaagacccaaccaaagtgatccgcttatgaaagggtttaagccccaatgagaggaacaaaatcataggcactatcaaagaatcgacatgtgtctttgcatggtgccacaagtacatgacagggataatttcttcttcaactttatttgcgagataattaatagtttgattggaaaattgaaattacattcattaatagaagttaagaatgattattgagggtgcagaataacctttaactatttatctcatatcgtattatcacatttaattcgttttttatttttatttatgttattttattttaatcatcaaaactctcttttctaattcttcgaattcttgtcactaatttttgaataattgaataaacata

SEQ ID NO: 295707 - DNA, 3759 bp, Cannabis indica
ttacaacatatatttgtattaaaagatgatatttatagacataatagtaaccttggtgtaatggttaaggtagttggtaaataggttagagggtaaaggttcaaaccccactaactacactttaaattttctttttaaatttatttacgccccctcactttaaattctgggtccgccactgcatactagtgaatccaatttgagtcacccttagatttgataagttctagctttctaaattaatattatttaagaatattttgtttactaatatacaaatctgctctaatatacaaaggtagtgtgaaaaaagaatatttaaggtagtaatggattaaaagaaccaaagtcagcaagattaaaaaacaaacacttttattggcgctggctgctttagtatatcatatctgatttggtgtagtcgaaacgactattatttgaataactcaaaacattatgtagaatcaattgttcaatgtataaagtataatgtcaaaaatagacttacatggattacttctaaaagaaacacttctatagataaagaatgtatagatcaattgtacttgtttttctatttttgcttaagggcaaattggtgttgttgtttgtaaaatttatagtttggaggaatatataatatctcaactgattcataaaaaaaagttatgacaatgagtagattaacgtgaataaattgttaaaattattaggtgagttaaattttttaagttttaattgggtgggttacaattcaatttttataatccaatatttatattgagttatttaaaatatattataacccgactaaattaactgatatccactgttagtgaataatatgacaaatctaccagaaggcctaaaattctttttcttcaactttattttctaaaacaaatgctaagagaaaaaataataagatttttttattactgcatcaaatgtttggtttatttatgagcttttaaagtaggagaccagcatatagtgatcattgaaacctaatctttcatggctttgtggttgtaatgacatctaattggttgtacttgtaattcaacataaataaatgaaaaatgctttgggcaccttataagaaatgatatactgttattggtgcaaaaaataatataagaaactgtgaaccatttacaacgtgttacatcaatatagtgttgaacaataaatactcaggggtgtacatttacactcaaaactcgaaacctacccgacccgaaatccaaaaaaattggattacaattttagcaaactgagttcaagttatacccagttcatcaccggtcgggtttgagtttcactaatccaaatcccaaaaaaacgagattacacccaaatccacccgaaacccaaatatattttttattaatttttttgatacattttttaaaaatctaaacataaacaaaagaaaaactaattctaaataatgatatatcatttttattttcttcttctaatatgacttctttttttattattctattttttataagaaaatgtataaaaatgatatttttcaaaaaaaaaagtcagcccaacccgaaccccaacccgaacccggtcaaaacccaccaaactcaaatcaaaccgaacccgacccacctgcacccaaaaatccggtcacacaaatgggtgggttcgggttactaattctatatacccgaactcaaaaacccgaaactcgataaaatccaccctatgtgcacccttaatacacaccaaccgttgctgacttggtatttggaaaacaaggggggaaaattcaaataaaggaactttattagagtaatcacaacagaaataccaaataaatataattgattttattttatttttttgctgaaaaaaaaatagaaccacatcttgtgttagaaaaagttaatatacaatccaaaacatgttttcatcttttttgaaaaaaatatcatcttggatagctgtcaaaaagaataaaatttgatataaaggcaaaagtcaaatcttggaaattagatctaaaaatcaagaaagaagaaagagagcaaatggaagaagagcttagcaacttaatcaaagtatggctaacagttttcatatccttgtgttattgctacacaacaagtaaaattgtatcaaagggtcttcaaagactggttttgttactcccaatagtatgtctctttctctatcttcctctcaatctttcttctgtgacttttactggtttgactgcatttttcattgcttggcttgccaatttcaagctcttacttttcgctttcgataagggccctttggcatcatctgatcatcatcattctcttgggatttttgtggcccttgcttgtcttccgatcaagattcaacagaacaaacctccattgaaaaaaccagaagaatccgaatacagagaatgccaaacaccatcaaaatcttatgtaaatggccataacaaggaaaacccttctgtcaaaacgcctgataaaggccgagtttctcttctaaattatgccataaaagcagttttattggctttggttataaaggtctatgactacattgaatacatccatccaaaggtcatgtggattctttactgctttcacatatacttcttccttgagctggtcttagctgtaatggctgccttggctcgagttcttttgggacttgagctcgagccacagttcaacgagccgcttctctcttcctcgctccaagacttttggggtaaaagatggaaccttatggtcaccaacatcctaagaccgagtgtatatgaaccaacccttaacttgttcaagaatttccttggccgcgagtgggcatcaatcccagctgttatggctaccttcatggtgtctgctctaatgcacgagctagtgttttactacttagggcggctaatgcccaattggaagatcaccgccttctttgttctccacggactgtgtttgacagttgagattgttttgaagaaggctgtggcagggaggtttcagctaccaagactgatctcaggagcattaacagttgtatttgttttcagtacctgtttttggctgtttcttcctcagctccttcggtttcatgctgatgttaaaatgttcgaggagtgtgcagcagtgggtgccttcttgaggaatatcattcaatcatttactcactgaatctttccaatcatattagtcttcaggtaataaattagtaatcaaaaaacaagagagtttgagaggttatttatatctctattactgagtttgtacttctgttatcatctttttcataattggaaggagatgttcttgagaaagctctaactaaatgtagatcacattgaccgaaatactataactcgttgcgtgttcttcgtgcaagcatttgtgttttactttctgttttagatcttagctacattgtttgatcttgatttagctaaagcaaataggattagagtaaaagagaccagaattaacaacaacataagcagaactgcattagaaaaattcataaaatgacaaaatggaatagtaaatataatccaatcagtagataaaatttgcattcaataatagaaatcaatattaaatgaacacaatctttcttgtggtcactgtcagagtataataattctacaataaatatcaaactaacattgtggacacttgaacatacaacaaattgtaatctttctatcctatttatattttggaaaacttttacaaaaatactgttatacagaatttttttttt

SEQ ID NO: 295708 - DNA, 1122 bp, Cannabis indica
ttttacggtttaagttgtgatgatagttacttaggttaccctgttaattgttctttgtattaaaaatgataaaaactcctaaaaaaatatatattacatatattgatatatataatatttagcccaataatcgtatacattttatttatatgtatatatagattgattataaaatcttggccatattataatttttttgttgttgagaatattggccatatattatacttgagagagatacagagagagagatgcacgtttcttaatttataaattgatgaacaaaagaaaaaataatattgcataaaaataagcttgatcaatattatataatgatcttgaaattgacaataatgacttgtaataaaaacacaattatcagctatatatacacatatatattaccactaaacttaaagctaaacaagttagcttaattaaagaaattacatatataatatcatacaattacaagcccaaattaaaataatagcatgaatattaatattactagaaattaactcttaattgtcatgttacgtacgtacgtacacgtactgctatatatataatatgttacatatgaaataataataatatataaaccaaatatatattcttattaattaggaatgaaatttgaggagaaagcatcaagtaagttaatccaattctcatcatcatcatgatcatgattattatattgatcttcctgatcttcatgaatcccattattataattattattattattattattattgatttgggtccaatagtactgatcactcgtcttgatcttgacctaatatctcatcacaatttctttctaattatttcttcatttcttgcaaatcgtccccttatgcgtggcctactatctgccaatgttttcctacatgcatactgaaaaataatatacatgaaaatatattaacacattttaattaatattcactaataaaaaattaacataagacgacacataacaatatgagacgagaatttttataaaattgtcgtctcatgttgaaaatagacataagacaacggatttaaaaaccgtcatgtcatgtaaagtaaaacttacatgagaattttatttgtactaaaaatttataa

SEQ ID NO: 295709 - DNA, 3328 bp, Cannabis indica
tatagtttttttatagtgtaaatttttggtataataataaaattttttaattatttaagcatataaattcaaatttcccaaagagaatgttatgagatactagtgtttgacactttataaataattagtgatataataattattaaattaaattatgtttaaacattaatttttttacataactaaataaggatatccagccaaaagcataaaatgggcagttgtggtggatttgaagagaaactagtaaatggccagtgggaaaagcatatacatgaggcacagattccatcacccttttaccccattagtaacagtaacatcatcattttccttctcttttttttttttttgtattcaataaaacattgaaatacatacaagcagtactgtttttgcatgaaaaattaaagtgatttgattaaagaaatgggttacaagtgtgaaaatgaaagacatagaaagaacctttggtaaatggaaccaagaaacaaaataaaataaaaaaatgtggcatgcgtatcgaacgatgtccctcaagctgtcaaatagagatggacatgacacggtgaccaatgaaacatggcagttctgggattgacccacttcatttcactaatctaccactaccacaccatgtcaatcactataaataataacccaacatacttttgtttattattatcatttgcttctacatacaacacaaattgtttgtttgtaccaacaaaaattataggaagcaagagagcttgtgattattgtttaggtcctaaattataagattgaaatatatttccagaatgatctgtcaattatttgaattttacaccaataatttaacattattttaaaatcattttgttatttcttaatttttctttttctttttaacttgttaattttttttttttgtaatttcattacatgttataattgatgagtatataatagcgacagcaaaatgagtcatacctataatatgacttaaaatttgcataaaataactggatttaaaactttagtcagccttggttttttctttttggtacactaaagctaaattagaagaaattatacttggctttttaaaactttatttgaaatatatggtagttttatgtttgtctattttttatggtaacaaccgtgtttttcttcacattgttatatgattattagtataataaaatattgaattttatataatttaatataataatatttataaaatattactaactaatttaattataaatgctaactaataggcacactggtgcttagaggaatactagttaatctatcacataattaatccacttaaaaattagatttaagatatcaattagttgggttccgaagagattagccaatgaggaagcaccaataattagattcagtgatgaaggaatttataagtttattgtttcttgcacccttcaactacaactaatatgcccatgtgggccatacttctgtcatgtgtatgattggatcagattccctcccaccattccatgcacttatcattatactccaaagttttcaattaaataaatcaacttcattaaagaatgtagtaactagtgatgactagctagaaagaagaattaatgaatgtgtgttcattataaaaagtgaacactacggtgtgtcacggactcacttttttaagcagcaaaaatttatgcggtaccttaattttttaagtcaatgtgagccttctaactatccaaataataatggcttattttcgtgcaattgtgtaactcgtgcacatttctgtttctcaaacaactctcgtcgagtcatgctcacaagcatctatgaatgtatccatgcatcaaggctctttaatcaagatactcgcactgttcataggtttccactatgataagataaatctcaacatcgtcgctcacttagtcactcgtgaccaaggtagcatgtgtggcaagatgccaataccaagctgacgtgccaatacttttaaccatgccccattcgatattattcgaacagtctccctcatcacccaaggactcctatataatcatggtccaatccttaaggcatcatgtctccacacatgttgacaggccctcgagacaagccacgaaactagtagcacgtgttagacctctgtctctttccaacatggtgcatccatcccatgcgcgtaagcaaactagcccacgaatgactacccgtgtcatctcgtgttgagactcgtggccaaggtgcaccagaacgtctcttggaggtttaggccacgtcccatgcaagcggcatacctgcaagccgatggaaacatacttgctaacctttggcagcattcttagacacactactgggtcggctcgatagtgtccatgaatattccaactcatggagacatatgagtccccatggtctccatatgcccaccctactagtcccacagaccagtagtagctcacttagtaccaaggtgtcagggatggtggagagctgacaccaggtactctctcctttaaaagagcaatctaagcttttagtcttttatcatgaacatatataatttttgctctgtagacatatggtcatcaccatataccaaatcacagagtttttcaaatcaggttgcactattatattcgtagacctaagtaaatggcaaataccaaatcttgtcccgatctagacaatattgaaaatatttacgaaaatatcactaccgtacaaattaagcatcaacatgtcatcaatatacacaccatacatgcgccactacgtgaccactttgtgagcatcacttaattagtatcgtgctatcttggatcacaggttacacggtacagtgattaattcaaaatttaccaaaatatgaaaaggtataaccaatgagaataaattgagatgcatatgcagctgcaatcaaacacagagcctttagtttactactaatgctcccaccttatcacatcaccatttaatatttttctttcctatgagaattgagatgatgatgttctaaaaagaaaaagccagggctgaccagtgaccaggcacatgcccttttaaatattattctcaaaccaatcgtatataaaagttttaggataattaggagtttgtattaatatgattataccctgttcagggttggttttggggtaggcgcaattcgggccattggccaaggctcctcagtctaagaggcttcctggtttttttttaggccaagatgtaaaatggccctaaatctaaaaattaaattaataaatgtctcttttttaaaaaaattaacaaaatgtccgtttagttaaaaatttgatgataaaat

SEQ ID NO: 295710 - DNA, 3043 bp, Cannabis indica
tactactgcttagctttcaattcgcctacatcaaatgaaatgtgaataacccgtcctcctctctttgaaacaaggggcgcttctgacacctcaagataatccacctatggttcctactaaggtaaatcccagaggcactggggtgtcacacctggtgtcctaaaactggaaacattagtcatgtgtatactagagagactagatcgggcattgggcaaccatcagtgggagaacctgagtcaattttggggaaaacaatgatctacagaccctaagagaagttgtgggacaagcctagactcatactaatattgtaacaccctactaatttaggcgcgctacattattttctccttactatgcacttctttgttaatcaaagagtttatcgaaaaagtgttcaattaaaactttcttaaataaacttaaaatttaataaatacatataattacataattttgggatcccgttaaaagttacaactgtattcaaaatatgttttctacaaaagatattgcccagcgactaacaaaacatgagcctaactgtccataagatctgaataccccaagtataatcgtctcaatatgtacaatcttcatccagctccaaactcactgttgctcaacctttactttgcccttacctacacatgcaaacatatatctgtgagtcaacagactcaataagaaaagtatcagaccgtaaccaggagcccatacacctaatcacgatcatctcccgcgtccgacgcgtataagtcacaaacgttcttgacgacaatatgattgaccataatatcagcatatactcagtactctagtcatattgatgtggtagcatcaatccatacttaaccatattaccaaactccgtcagtatttagtgtaactccatatacactaaaactgctcttactgatatgttatctaatagggaactataaacatgtacactaaacatgtatgcgtgtatatcattatactaatttaaccatctactaattctcatgatttaactatgtggtcattacaaatagctttcaccataattaggaagaaacaaactctgtggtgaaccatgtgttcgaacaacagaggcattaattctatgagtgatggacaagcaaactaagtccatgtgtgcccagtaggaagaaatcaatcgctaataaagagaagctaacgacctgatcagatggttccaccaacaagctgggggcaggtactagaaaacccaccactaagaagaaatcctaaccaagggaaggaaccttatatctattagtttttaggattcatatcagggttgttgagttgttcttctatcatttccatcgcgaccactattgttgtttttggagtttcccccaccgtttggccttaaacgaacattgtgagagtcatcccatcccatatggtgaccgagtaggacttgatcgtctgtagggagcacttaattattgttattgttactcggggccctgttggagggatgacttttagccctctcttggttccttggacgttccttgggtccgtagaccaccttttgttgttagtttctcgggataggcactttcttttgattattggcctcactgcctaacccttgggtattttgttgaacgtagctccgaattaagtcgacaacttcttgagtgtaacaatcttggctgtcttggcaccttctcatctcacaagcatgttcttccaaccaagattggagctccctcatttggttagacagacctttagttaaggccgcttgagtttgagttgctcttggtgcacaatttgaacatgaccctgcatctagcctatcacgtcttgtagttaatccatctctgggtcaattccttcaatatccatatggggttccctccggggcctaaagacgccaggaccccaagtggtttaggtttggctcgtgccttcattagtggggacaaaatttttggtatttcccctttcagcgatgccgttagtagtgcctcctccagtagtggtggtgttagtggtatgcctagctgttgtctacccagcaccggcaatttagccagttgtcccgtgaccataacagtttgggtagtggcttgagtagtggtcgcaccactgttactaggacgtggggtcatttttccattatttctggctagatagcttgatgatggaagttgttgggtagtgtctacctcttcatcgggtcgttcttgagatcttctggtgagcaccatttttctagtgaaaaacttcaagattttagtttaagttctcaatgaaagcaccaaaatgttgactagatttttagccaacagacgcagagttgtaattaatgaggaattaacccaaaattgtaataaatgcaagtaaaggaaattagaattgaaagaggttcaatcctagatgtcggtaataacctactctccttgtcttttattaatcttagttgcagttaagaacaagcttttgagtgcaaaaataacaatggtagagtttctacttgtgagtcaattttagatccccttcctaggtcataggtgacctcttatataggaaaaaaggttagtacttctcgcgtcaagagacacgaccattgtagggatatctcaatcgtcttcttggttttcaaaggtagttgaaatttgattcttgtgataatatcctgtatttttgtgggttcgtaactaccgttaagcttttagtaggatatgaatattaaaattagttaatgacgatgagggtccccctagagtgtggtatggttgtttaactttcgctgtgggtagtagccactacctcggagtgacaccctcgagacccactgtgaaaggggtcatagtcaccacctcgggttggtacccctgagaccccttccacattcttcgatgttgtgggtagccttagagtcatgaagatggattatatcaaccgtgtcttatataagtggaatgtattacttggaccatgagcatgtgggggtttaaggatacatatcaaaaaagtgtttgtgattgttccagaagaaatgaaacaaagatag

SEQ ID NO: 295711 - DNA, 1999 bp, Cannabis indica
aatttctttgtatatttttttttgtccccgctactttcccaaacaaatttctacttttattttaaaataataattaaaagacataaataatcatgaggatataaggtatatggtagatcactaagaatccacctaactactcattcaaggaaaaaatatccacctactacctacattattttttttggaacaacctttttcaatatttttataacatgtttttataaattactctaaatttttaaaatatttggtaaattttgacatattaaattttaatctatttttttataattatatatgtattaattatttaagattatttgtaaatttttaaaaaaatttaaataatgaaatataggaaattattcacaattttataaaaatttatagataatgaaattctcttaaatgcttaaacaaaagagaaatgctaaaagatattagtactgtcaaacactttcctacgtgtcaatatcgctataatatcgctagccaatcgtaaaacgtcacgtcttaagagtgctaggcaccactggtgcccaataacaatgctctaaacaaaaatatagggaaataccctttaatcaataatcattaaaattcatgttaaatgcctaaagagactaaataataacagtcaatgatattaaatgacacataattaaattaatgggtatagaaaagtaacagttaagtaattaattaattgagttattattaataaataatgcgtttacttgttaattaatgatacagtacgtacctaattagctccctctgaagggctccaccatttttggttctcctgtgggaggtcgcaccgaatccggtagtgacaccatagctgtccgtacctttgtccatgctatccatgacccaatcgctgctggccttaaccccagcacgagctgactcagccagttccacatgaacccggttcgagtcgcggttcgctatagacgcaacctgggaaatggtcaaagtctctccaccgagtcggaccaccggtttacggtactccttcaccatacgtttcacctcatctaaatgactacccttcattgactcagccgaagcaacccaattcaaaggatcataacccactgtagtactggtacaaaactccatcgataatgatgatgatgatgatccattgttaagttccataataatattgtatgagaataaatattttatgtgtatatataagatgtgtttatgaaaatgggcttaatgggaaggcaaaaaaaaaatagtagatgtagataaatttggtatggtggaaaggaaaattttcagctttttgatgagaaagtgaaaatgtttcctgagttggttcaccaataaatggttgtttatatagaagagtttttatcaggacattgagagttgggtgggtaggcaaatgtgttagttggaagaagagagtggccgttggatatggtagcttattttaaagggcttagattatgacacgtgggaaggttgtgagttgaagtgggaattttatgctagtaaagaaggtgagaatgagattggaacgcgtaataggagtatttattaattagtaaatataaataatagtactagttgtagttgagtgtcaaaagtgatgtgtttgagagagaagagattgggggttggtgagaataaaggatagagcttagttatgggcacgaaagcacaacgtcacaccttaattaattggcaaagtttgataccacgacaactactaattaataaaacatttgtataaatgggagttcttgctgcactcccaaaagggtgtactggtctgcactatcatctctttatatgatatttgtagttattttgtaagttttgcaaaatttgaaaaatttattgagaggcagtgtggaaataggattcaagaacttgttgtacgagtttgttttatgtaggaaaatttacatggtatactaacttttattattttttttacaaaaatactaccagacggtattttttacttttt

SEQ ID NO: 295712 - DNA, 3556 bp, Cannabis indica
atacagatccgatatttaattatactaatagcgatatgggaccaagggtgtccttagtatttctctgcagttaaataatagatctcaattaatttaatgtaatagttcgtagaaaatatagctaatattgtaaagtacatctcttaaacaacgtgactttggccagcatcaatgctcttaataatgtcattgtcatttattcttcatttaaacttacatcaattcacgtaaaattttcactatttccaaataatgacaacgcaatgttcaagggacaacatgtttttcaactgacacagtactgagtcttactatcttggaaaatagacgagtcttcacaaatcacaactaacacatctaaatttaattaattatggttcaatatccgaagataagaaaagaatagagtgaattataatttaagcacgcgcgttgcaaatatagcatagcatggcataaatggttgtgatggcgtgtgaaataaaaatgtgctataattactgttatagaatcaaagtccataagaatgacttttctattgtttctgtttatttgctgttatttgagtgagtcatacaatcgtatgggtgatggagtacacgagagaagttagcaacattaatagaaaacaaacacaaccaaattcaatttcaaagttcacatcttaaattaaaagtgagtgtttccaaattcccaactttagattcgcaaatgaaggcgcaatttttaggagctgtctcgaaacttactgaaacactcttctgctgttattagcaaccattaacactattggacaaaatctgatcagttctaatttaggtaaccttatctttagcttagctttatatttattctttgctatttattatattctgatttttcatataaaaaatttccaaaaacagaaaagcttgattggtatttggttacaattttcaaataagtttactaattagaaaatattaaacacgcagagttactaaaatgtttgctttcaaaatcagtaaaagggagaccaccccattctcttgctagtacaccggctttgtctaacaaagtttagtgattgctggtatgggtttatttataatgggtatttacataaatatgtgaaaaataaagttaattttaataaatatggtaagaaaacttaatagtaaaaaataaggtatttaaaataaaaacttaacatatataggattgaattaccataaaaaatattaaaattccctttatattttttttaagaaaaaaataaaacaaacaaaactacagggatcgccggagttgtcaccggtgctggaaaaggcactagagtttgctgtcggcacctgaaaagtcacgaggaatagctgtcggtgccagaaaagtcatcgaagttgttgttggcgccgaaaaagtcatcggaattggcattgtcgccggaaaaatcaccaagaatcttcatcaagaaactagtttcttcatcaaaaaattggtttcttggtgatttttctggtaattttttcggcaacaatctcaattccgatgacttttccggagtttattgtcgacaccgaaaaatccaccgaagtagctgctcgtatcgaagttgctgccgccgccagaaaagtcattaaaattggcattgtcgtcagaaaaatcaaccaaaaaaactagaaaaaaaaaaatcattttttataacatcattatcttttttcttaatgttattcaataaaataacatcattttttattaaaaaaaatgtttaatttaagttctatttataaaagaaaacataagaatatttaaaattttattgttagttataattttaatttaattgtaatatattttttttagaaatatcatacatttagatatgtgtaatgagtttaaatttgaattgcaatagttaaaaaaaataactacatttaatatataataaaagataaaagagatatatgtagtgagtttaaatttaaattgtaatgttaaaaaaaatacttttagttttatagccatatttaatataactaagttaatattacgtgcaataaacaataaacaatatattttatattctctatttttattttttatatatatatatatatttttaattgtataattagttttttttatgttattcaataaagaatatattttttattaaaaaatctttaatttaattactttttataaaaaaaaataataataatatttaaaatttgttgtttattataatttttatttaaccgtaatacttttaattttacaatacttttattttctttagaaatatcacgtactttttatattttttaaataataataacaataatatatttttttagtaactgtcatataggtaacaacatcacaacagtagtctttttaaaaaggataaatatattttctattctattgttttaaaataaaacaataataaaaatatgttttattatatatgtggattgggtaaaaaaagataacaatagaaatatgtattttagatacatgaaatgaatttaaatttaaattacaaatgttaaaaaaaactataaccacatttgatataagataaaagataaaagaaatatgtgtaatgagtttaaatttgaattgtaatgttttaaaaaataaagatgtttttttatacccacatacatttaatataataagatagatataatatatatatatatatatataaatataaaaatattaattattgggtaaatactattttggatatatcctgtattttacaaaagttatagattgaacatttttgttttgttaaataacaaaatagacaataaaatttttttaaaatagtacaaataggatcttaaactaatttttttgttaaaataaaacttaataataattcgacttaaaagtgttatgttaaattcaaattataagagagtagtattgtgactgtggtcgccctttactattaaccatggaaaggaggggcacacagttctgattgttgaaagtggagcacagcataatttccctacagcaccatattgtatttttttttcattactcatattgtattacttgttgttgtattggacttttttatttttggaaaagataaatagtaagatgaatgatgtaggcctttcaatttcgcaagtggtgtgacactgtgatatatacataacaattctcattagaattttaattccattatccagtgagggtaaatttggttgtgggggggacgaggacctccacaacaccagccaatacatgctcaaaaacaactaatagagacaagtaattaaacacaatataaacaaaatgtaaaatttaaaagaaagtgcaccaaaattaatactttgttcagatacaaccaaggctaggcaatgcataagtcaaagttgctatattagaaaagattacaccctccaagctctccaaaatacatcaatggacatacaatctaactctctctcactagagaattacaatggtttttgctctttcagctcaaactctcaaaaatttggaatagcattaggtttatcggataatgcttaggtagagtcacgaaaaa

SEQ ID NO: 295713 - DNA, 4936 bp, Cannabis indica
attttaataaaaaaaaaactaaacataaaagttcaaatatttaatacatgttattaaaattagataataaaaagttaaaaaattgtagctgaagctatacatttaactaactaactataactatattctcctcattttatagcctctgcaaaaagcaacgagagaaatatgttacatggtttgagatatacaaaaatttcttcatttcttcattcctccaccattaaagctccttccttttcttcatcttcttcctcatcaaccaaaccccatttacaaaacctaatctttcacctcaaaacttgctcaatctcatacaaaaacacccatcaaaccctcacttgactaaacaaattcactctcacattatcaccactaacctcacaatcccacacaacaccacttttcttcttctcttcaacaatttgattcgctcttattccaatggagatttcccacacgaagctatatctctctacagatacttcactcacttttcctcttcatttgatagcttcacttactctttcgttattcactcttgttcgaatttgagctctgtttttacaggttctcaactccatggtgttgttttcaaggtgggttttcattctcatgtctatgttcagactgctttggttcagttgtatgtttcttttggctttttaggttatgcataccaagtgttcgatgaaatgtctgagaagaattctgtaatgtggaatgttatgatcactggtttgaacaaatggggtgagtttaaatttgctatttctttgtttgatcgaatgccgaatcgaaatgttgtttcttggacttctgttattgatgcttacactagaatgaataggtatggtgaagctttgaaactgtttagaagaatggtttcggatgataacattcggcctagtgaaataactcttttggctataatccctgctgtttctaatcttggtgatcttaagatttgtcaatcaattcatggttatggtgagaagagagggtttaatgaatttgacatgagggtgacgaattcgatcttggattcatattccaaatgtggttgcatacagagtgcagcgaggtttttcgaggggatatcatcgaggagaaagaatttggtgtcgtggacatcgatgatatccgggtttgcaatgcacggaatgggagaagaagcggttgagagctttagaaagatggagagagttggtgtcaagccaaaccgagtcacgcttctaagtgttttgaacggctgcagccatggaggattggtcgaggaagggctcgagttttttaagaagatggttgtggagtatggaatcgctcccgatatcaagcattacgggtgtttaatcgacatgttggggagaatagggaggctaaaagaagccgaaaagatagctttggaggttcctaatgagatggctaatgttgtgatatggagaacacttttaggagcttgtagctttcatgatgatattgagattggtgaaagagttactaagaagataatggagatggagaaagggtatggaggtgattatgtgcttatgtcaaacatttttgctagtgttggaaggtacaaggattgtgaagagtttagaagattgttagatgagaggaaagcttataaagttccgggccatagttttgtatgacttaaaagagtttaaaactcaaaaagtctatgacttaaaattaaagaaattgtagaagagaaaatcggaaagaaacacaaagaatgaagaaattgaggaaattatttaatgaggcataatctaaggggtaaaatagtaattttcacaatttctcaatttttttttttaatataataactaattttattgttgagagtcaaacaatacattgatcattaaacaaggaggaatttttttcaactaaaaaactcgttttttcatttgtagtgtatatttcgctaacttatgtactgtaatattaccattttacattatatgttgaaaatatatatttagaaagagagataagaaggacctaatacaatttctcaattttcctttcttattttcgattcctttcatattattttttcccctatacctaacatagtgaaaatgtctataattcttgaaaggagaattcaactcatgttttacttacaaactagagtacctactaattacactttctcttcaagtatgcacattaagctttgataaaatttcaaaatggaactcctaaaccttgtctacttgtatattactttacaaaatagcttttttttgataatattttataaaatgaattctatctgaatgagtaaaaaaatttcaaaagggttttaattttataaggtgtcgaaaatattcaaaaaatgttttttgtgtagtacaaatatctttaaaaaaccttaaaaaaaaatatttttttgagtcattgctacttgatttctaatagtatccctaatttatgttagttaagtttttagttcgaatagacaacttgtttggtttgataatatctcctatttttattaggatatttaaattatattaaaattgataccatacttatcaagataatttcatattttatcccaaaaacaagaaagaaagccaaattatttccatattgataagataccatccaacctattagtatagaattcatgaattatatttttatcatattgcaacaaatgctattgagaaggtaattttaatttaatgcttagtttttcttcatttcagcaaaaggattccccttgatttgatttgatttagagaaagactacaaaggaaataatcacagattcacaattaatcaaattaaatgaattgaatgatttaattattaatagggagtggaaagttttaagctttgttctgatttcacaatccactttttgatagaagcattgttaacaacaccagaagaaactcagcaaaccaaacatggatatgcttatgaaaagccatgaatggccccctcaattcatgacctttcaattcgagtttttcgaagggaggagacacccgaatcacccgatttttcttcatcacaattcccatctccacactttgatttcttcttgagcaatggagtgtttaagagtttcattttaagttttcacaattccatctcttcaacttgttgtggcgatttttcgagcttcgagttttctaggaagacaccctttttcgagttttctcatgtgaagatcaatgattgatttctcttggcaaatctccacaccctccttctccttctccttctccctcgatgtaaaaccgaaattgatttaatttcggtgggcaacatcgggtggccttcttatgtacatttcgcctcctcaaccttcttctcttcattttgtttaaggttcatttgtctagcaactaattcatctaaagcttctctcatccacaatgattgacatgcttctctagcttgagcaacagacatctaaaacaaaccaaaaaaaaataaaaaactttagaaaaaacaatcttcaacacaaggttttatagcatgaaattagcaagaatgatctcatttcggcatacccattggcgatttcgaaggttcttttcgggccaaagatctaactcttcactaacaagtaaagggacatgtaaccctcatgaactatgctctctcttttgctacaaataacgccatttacccaaaattttctgtaacaaaaaatacataacaataaacataataagaacaaaaatcatcatcactaaaaaattgagcctttgatcataaaaaatatgtaattttgaatagaaattattattacttaccccaatttttccaactacaccagcttcttctattgtctctcttaaagctgcatcttccatattttcatcactttcccaaccaccctgaaaaaaattaacaaaaataatgtcaattatatgaaatcatttcattttaaattaaatgaaaccatttcattatttaagtggggttttgaaaatttacctttgggaacatcattctttgacttttttgtgaacttatcaaaagaacttctaagtcttccacacaagaaaattcatcactttttctcttggtaaatctgtacggtacacatctgcaaaaaccaaaaaaaaaaaacaaaattaagaacaaagaaaaaaaaacagatttaagaatgtgccaagacccaaaaggggaaaagtctataaagatttgatttttaatcattattttagtctgcaaattgcacaaattagttaacaatgaaattaattaaaaaggggttctcatatatcaaagtcaaaacataaaccaaaaaaaaaaaaaaatcaatcagatttaagaatgtgtcaagacccaaaagggggaaaacaaaaagtaaataaagatttgatttttaatcatttttttaatctaaaaattgcacaaattagctaagaatgaaattaattaaaaaggggttctctcatcacaaaaaaaaaaatccaaaaaaatcccaattaaccaaaaaaaataaaaataaaaattgaatctttatagaaaagaaaaaaagataaagattgaatctttaaagcttacccaacaacttgtcttaaaccctctttatcatatctttgtaagagtcttccagaacgagaaaccatgagtttaccacattctttttcatggaaaagagttgaaagaatcaaattagcaatgtctttagacataatcaaacccatttagtataaattcttcttcttcttcttgtttgttcttgtttttgtttttgatttctcttattagagaaatagaaagaaaacaaaactaacaatctaaaaataataaaaatggatatttgagagatttgaggtgaaaaatatggagagaaagagagagagaagagtttgtgttaatatgagataagaagaagctaagttgtttatagatagagttgtcatatatatatataaagataaatata

SEQ ID NO: 295714 - DNA, 10511 bp, Cannabis indica
taagagattaatttaaaaaaaatcttcaaattaagataattacataagacattccaaaatacagtttactttttaaccatcctagtgaaaaattgattatgatttaattataggagagttttacgatcaacctcttattacaatctctgtatccaaaaatacgtcgaaagggaagcctatagttgggccaataattcggttgtaaaattaacttagcttttgggagagattcaaagaaattataattaattccattcaagtttgaaaaaattttggtgaagagaaaaaattccattcagaaaagtatacaattaagaaaattttgatctctagaatttcttttcttatcccatttttcttgtttaaaaaaaatatggccggaccaagcatagccatggaaagtaattcaaagcctttgaaatcccattttaaaaaacaagaacaaaaaaaacctaatcgaaaggctggtgcttggtcattgctattatttctacaagagaacagagacacaaagtctcgaatttacagtgaaacgaaacatccttgcttggatccatagtcggaaccaacacaccgtctctgaaaataaagttatgctccgatgtgagttcggttggtggattgtgacacccacattccctcggcagtggcacatagctctcattttcgagatcgttgcagttacatgttctcgacttatcatcatcgatgggattttctgcaagaaccctacttgcagcggatagaagatcaaccgatattgatgcaacaatatcgtgaacatcgtcgattttccactgactactgtacagtttctgttcttggataaggagtttttttgtcaagttattgagggtgttcatgcattgagaacaacaacggtataaacataaatctccagattttgtagctttcgttgaagggatttcttcgtcttgaagaatcttatcggtatcaatgctatgcacggtagaatctgcgaatgttgatccgtttacatgttcagaatgcccgtgatctaggtctacttgcatgatatttccacagctcgaagaatcggatggtttgtgtgtcccattttgcttattcaacatttcagtgtgctcggaatccttaacaggtttgttattaggggtagaattattcaccggaacaacttcgagctgtaatccatcggcgtcagcaccatctgtaccgtcagaattatgataattcaaatcaataacttctttattcaagtccaaatcagtagcgaaactctgttgattttctttttgtgcttcggaaacacaaggctttaactcctggctttgagtttgattatctggagttggagtgctattgagattagagttcactactggcaccatgggcgctggcattggagcatcgacctctaagctggaaattaaaacaactcgaattacacaagaacaaatacgaaacaataacaatccgaaagcagaccaatgacgattaacaatcttacctttgcaatgtgtatgcccagctgtttacaacgtcttcaaggtaagcaacttgtgacaaaaggcgaacgaattgatatctatctttcccggctcgaactctttctttgatctgttcaactagaagctcgagaaccttccttacatcaaaggagacctctctcagtgacgtgtagacgcctttgtatgctaataaaccaacagctactaagcccctaactacaccgggtttctctttcgttttcaggttggcagaactagagccgccaccagctgccttttcgtctgagctatctggccagatgatacaggaattgaaaggccagcctttccagggtccagttatgtccgctgagggaccttctttcagtttagatgtgaaccagcagagctcggcaaattgaggataccgcaaaacttgaaagccgaaagaggatacagctagatgcaaatttgatcttcctttgacagttttactatttggtggcagagaaattttatcgataggtccttccttcggttgtgctatatcttcatttgcatcacctgttccatcaactgtcttgtgatttaccgacattggatgctcttcttcgagtaaattagtagttttataatattcctctgctgatgttatatggatgtgagatctttggtgaattaactgaattagctgttgaatcacatcccttgataacttggcggcagataggttgattaccgagtcatggtcgaaatccccatcaacttgcacaaaatatcgaggaactgtgtactccgtttgtgatgactgattgcaatttgatacctctttcttgaagaactgcctgatttcaattggaagtactggaacttctgacgtggcctgtagaaaaatgaaaaaagtattacacaggatggattgaaaattttctgatctaatcattaaatgaaaaactattttatagaactaagcaaaatagcaaaacaatgatataggaaaataaaagtgttaattaatgtctgacaatacacatcataagctgtgtcttggataagagtttaaagtattaattagaatattttggattattattactaggtttcatataatttgtgattcctcttcagaaaaatcaaattagtgtctggacagtgggtaccgtaccgcaaagaaaatgatttaaatgactggtatttgaatgataggagcaaagacacctaagacatttcaatgatattatctgttaatgatcttccaaaaataaaaattacaagttttcgcaagagcataaaaaattagaaagtgatttttttcccaatacagctatggaaacaatgaagatcaaaacacttgtatgcttgtgccaagccattcatataataacctttgccataactataaatcaccaaaattgcataatatttggagaagagagattgacagagagaatatagcataccagaatcatcaccgaggtcgaaatacagatagattccacctgttcaacaaataatctccaggtattcgaagcattctgagtaaagccttgatctcctactgtccctgttaatttgctatgtggactagacaagtttttatttcgatcatgtttaatactgggaggagtacccttctcggtgcgctgatcgttcattgaattggaatcacagtcttctacttgctgaacagcccataaatcaattcttggcataaatatcatacatgaaccaacaccagcacatttccctgcaaaaaagaaaaataatttagtggtaaatacatttagtttatctaatctaactacctctcaaagcatattctttttcatcaataaaacacaaaattattttacaaaggaaaaaagatattacaataactggttgttttctagtaatcaagtttgaatgtaaaacacaacaattacaagaaaggtccccaattccaaattagcatagaaacatgaatccttaattttcttcaacataaaccaatgaagaaaactattccacaataataatcttcttcacacaagagtactaaaaaaattgttttaccagatcttcaaggtacttattgagaaacagatcttgaattttacaaaatattttggaacaattatgaaagcacacacgttgtaatggtagaattttaaaaatcacacaaatttagatgtagaactaaggtggttcaaggtattttcaataacaaaaataatacattagttcaagaaaaaagaaaagggaacgtacttaatatttgtgtcatcccctgaacaacatcgccatgcccttcttgtgatattgtagccaaatcaaccttctgaatttcaacatttccaacaaaagagtgaataagacaagaagcaagatgcctctgcccagatctgggacttccagcaattaacatacggaaccctgaattactcgatggatttaatggggcccgcaacatatttgagtgggctctgccattaagtttcaagtaaggttcgaattttgcattgctgtgatcactctcatcatcaaaatcaataattgcagtggaactaaaatttccgagggaaatgccagaatctagaagtttcttctctatttctttcgcaacatcaggttcttgaataaaatcatcaagaaatgaccaccaacaatcactgggcaatttcttcttgtccaaagttgaaactatcacactttttatcatgtctgcggctgtagaaagtgcagctggcaacaacaggcgttcatcgagatagagggagacgagcaaagtggctaatggtcgtagaatacaaggaataaggtggaaaggaagaggagaagatactacgtcattagcagctataccagcttcccttcgagagcaaggaggtggggagcatgataaagcttccaaccagtctttttcctctactgcaaagtttggaagaggaaggagtttaccagtggaagtgtttttctcagcagctgacaaaatttcatgcagaggaaaattccttttcaaaccagtgacagctgcttgagtacagagtgcctgcagatctgcaccagcaaatcctgcagtttttctcgcgatccactgaagcaaagatccactaactggtttcggccacctttgagtgtgaagcgaaagaatggcagctctgtccttcattgatggaagtggaaaataaatctccctatcgaatcttccaggccgccttaatgctggatcaactgcatcaggacgatttgttgcaccaatgactacaactgaaccccgagattttaaaccatccatcagagcaagtaatgttgatacaactgaactatgggtctgatcttgtcttcgtgagcggcaaggtgccaatccatctatttcatcaaaaaatattatagaaggttggcatttctcagcaacctgaaataaaagccttagctggcgctcagcatcaccaacatattttcctaagcaatctgcccctttccgggcaaaataggctatccgtttatcaccacgagcacatgcacctatcaatgccctcacaacgagagttttacctgttccaggatacccatggagtagaacacccctaggcggtgtaaggccaagattatcaaagaattctggatataataaaggcattatgacaacttccttcatacaccggatgacatcttgaaggccagcaacagattcccaaccctgaaacagttttccactttcagagtctgtgcctccaatatacacaggtgcaatcctcgccaaatctcgatgaagtctcttgctttcacgctttaaaaattcttcatcctcaccacagttctccaaccatttctcttctgcctcaatatcctttcgacaagcatcatttgaaagttttctcaattccaacttcattttcctagctttaactttctttattcttgtgaatttctgaaagccctgaggttggaagagacgtcgatgatccgtgcaggctataagaaattttcgatgatcaaagatacacccatttgctcgagcacaaggctgaaaaaacatgaagcacaatcaatatcattggacaatatgggtacatatgccatcactgcataagtacaatgcatatatatacctctcgcagaaactcttgattcctatattcttagttttccaataattccaaatagaaataactaaccaagtggtaagtttttggacatcgatcaacacgacatccaatggtggcccctggccttccacagcgggtacatttcaatgctcttcctctacagagcgcagcccttacatttttcaagcaacctaaaccagcaaaatatacctgcaaacacaaaccaaagtacaagcaaagttactgcgagtacatacgagactgcattcaaactaacgaaatgaagaaattgttgaattttgtccagagcatattgatgaaatcaagccacagattagtagatactttatcagcttgtgtcagtcaagaagcagagattgacgtctgtttcctacttatgggcccatcacaaatgacaaaattaattttctcccaaacttgtgtaattaggactccaagtctacaagaaattgaatttagtccagagcataaccacaatactccaacaactcaggttcagtccttatggttaccagcccagtagggcctaaacaagataaatagcagtacctgaggtgttcatctcattgaagtaaaaatttactatatgttaaaactaaagtatatccaggcttttgagtccaacacacacaagacttcagcaaagcagtaaaaggttgtagcagcgagaaatttcaacatctagaatatagaacactcccacattggtgtaaaagagagatgtttttgacatttattttgctttatcttttttaagaagtttcaataatgacactcctttctcacccgtcctgattcaaaatctgttaatcatcggcatgctggtctctttatatatgttaaaaaagtaaatatgcttaacatttagaatctttaatctttacagtcttaggctcttagtgcaatagaaaacaatggttcatgctttgatagatggaaatatatgatgcaaaatacacaagattaaaactgggcaaagggacacacctcaggactccatactgcacaatgtggtgaacccatattccagcaattccatgccgatcatttataggacccagaagacgtccaagccagccaggttcatcaccaaaaccatcccatatatcgtacttgtgttcctccgaagctgaagaaccaccgtacagctcattctcactctctcctgcatcatgagctaattgttttggcggtttaccatctgtgccgccaccacacaaaccacatcgcctaccttccttaatgcgcggtttgccaagtatggcacttgaagcacattttgaagcatccgccgtaccattttcttttacatgagattcatcaagttttgttttattcatattcttccccccatcataacagcctgggccctcctccaattcatttgctgcagatgcaacagcttccacttggttagtttggttttctccaaattctaattgttccccctctttctctacatgttcaacggcatcaacattttcttcattttcagcatcttcaatgatctctgcattgttctctctctctacatgtccaatggcctctgtagtgtcctgtccatcttcaacgatctccatattgtcatcatcctctacgtgttcaatagcctccccaacgtcctctttctcttcattttcaatggcctccatggtctcctcctcctgagcatgctcaatagcctccacgtttgcctctttctctatatcttgaatggcccttatgttatctttttttcctacactttcaattaactccaatctttccacagtttccttagaatcattgcaaatgcactcatcctcagactgcaaatgctcctctgtctcaaccacttctatgtctgtgtccctttcagaatgaccacctgaatcatcccttcccctgttatcaatgaccttcgattcttcccgtgcacaatcattttcaatgactcgcaactcctttactctttcctccgtcttctttaaaccatttgttgctttgatccttcctgacctcttagatttcacaaccgtatagttaccttctgattcgccttttcgaaccccttttttccccgaagctttttcataacttctacccacctctacttcatgaaaaagcttcctcttcccctttggcgaatcatcctcctctttccctctaaaactcacatttctacccctggatctcaacctcgacttccaacttcccggagtgtccaaatcctctgaattcgagttcctcagaggagaacccttcctcacactctcgccaacactggaaactacatctttcttaataatcttccgcctctttttcggcggcgaaggcgacaaatcaagcaaaaccggagcccgacgaacacgcgaacttctacggatctctaaatcagcactctcatttccaataacaccgctattctcattcaaatcaacacggtttttgttatactccttctcacaaatggcgtcaagcctcttgtgcttcttccgaagccgaggacccgacagattattactattacaacccttactttccttagaagacgatgcacccgacgattcccccgacgaaaatcgcatgacaagaatcaaaaacaaagaactctacacaaccacaaacatatatacatataaatatatattaatatcaacaaaaacctctacataatcttatcttaaatcaaacaaaaatttctcagctagctttgagaaaaacaggcattaatcgatcgttctcttatttcaaatgaatgttcaaatacagattcgataaatcaaagcaaaaataaaaactcaactcacctagtgttatgagctgaaaccaaatcaaaccaatgcttgtttcttctgaaagacgaaacagaaaccctagaagatgaattggcgaagcttcataagcttttccttaaggcctttcggcttagcctccatgaaattgggtctctctctctctaactctctttctctctctaactgaagctctgaattttatttcattttcatttttaatttaatttttgtaatttcagtttttagggcgtgaaaaattcgcaatatatataagaaagagaagagcttttctgggttgaaaaaccgacgcctatcgcgagagcgtgtgatcacgcgcttaatctaacggctgatgattctttcactgtttgaagtttattaaagtttgagtcttaagcgtttgtagagagagtgggtctctctcttccttttttctttttctttttgttaactattttttattttttatttttatgagtcgttcgttgccgccaaatattatttttttagtttatttgttaaataattaaaaagaaattgtgggaaaaatgtatttgagttataatttattttaaagatatgaaaaaaaaaaatatatggcaaatgattggaaaatggctcatcttgtatgccaaaatctataattaattgatttaaaaaaaaaccctaaaatttgtcacaaaaaaaaaacctataattaattgtttgtaataaaatttagcaaattggattggacaattaattttgtaagatctaacttttgtaatttatttagtgatatttaattacatatgttaattggatatgattattttttcttaaataaagcttgcttttatttttaggtgatggatatatttttgggaatatattttgcatactaactttaattattttccttatactagtagatataaatttaaatttcgtgataaaatgttaataattaaataaatattatatttaatgtaatttaaataaataaaaaaagcttaaattatttttctttgaataatgttaaccctattgttggtttaaatcttcttcataagttatactttacatacatagaaaactattaactaacttaagaagtcaactaaagggttcaaaaggtttactagcaagaaggttttgaattgtttggttcttcaaatatttgttaactaaagattttcagaaactatttatagttataataaagctaaagaaaaatattaaaaccaaagaacaagataatagattttacgtggtttaaaaattaataatctctagttcacgagtcaatattattatgattagaaaaatctttgagtattacgcaaatgtttgccaaagttaatgacccttaaaacttgccttagcttgcaagcactactacaaaaagacttattcccattgatttgcaaatcgatttttttcgagaactattgctaataaaattacgtgattgtttaaaattgtcggttatagtaaagtattcttggcgattttaaacagctgtggagaatccccgacgatttaaaagagtgacaagccaaaaaataaaaaataggttttatagggcatctcgacagttttaaactgtcggcgatgcttgtcttcaaataaaccactaagaaaattggtgtgagtctctcatattagttaacaatatttcatgagttgagtacatatacactatgatagaaagttcgtcatctaattaatcctataaaaccactcttattctgagtgttgaagttgatctggaagatcctagtgtgaagtcttcattgtgttcatattgcttttgaattggatgatcaacaatatatactgaaagaatcgaggatactctaatagacataaagaggtaaaattctttcactcgtaatttatatttaatttatgtaatcatgttgagatcttaaggattatggttgtaacaccctaactaacatatgcgtattacgtgatttttaaacatgctgtgcagctcgttgctaatcaacgaggtttatggaaaacgtgattaattaaaatttttgctttgtaattaaacttataaaataatattacaaaagactcgggatcccgattcaaaatcatttacaaaaagatttaactgtttatacaaaataaatgtcgcctagcgaccagttacaaaatca

SEQ ID NO: 295715 - DNA, 6096 bp, Cannabis indica
cagcaaattccatctaaagagagttgagagagcgaggaagcccgattacccatggtagtcaatttcctttgcagatcaaagcttatgtgggtttgaagctcaagattcaatggctggaggtatttcgatccttattcttagtgtatatatgtttgattaatttcgcacttaatacttaaacatatacatttcagtttatacatataaatagtctaacacaagcatcttcgcaatatcaacaacaagttgttgtcttctgctacaaatttagttttctgttgccatcgacctggttattgcccagatccgagattggaatttttgggtccttttgaactgtactcaatgcttactatatttaatgatgataacacgagtgatcacctaaattacgtaagtgaagattttgatttacccattccttcagctgagttggatatggctagtgtgttggggtctcactgtaatggaatcatttgtattgctgattattatcaaactgtaatgttatgcaaccctgcaatcaaggaatgcaggactcttccaaaaccttgtctatctaatgatggctttgttgtgttaggagcaggattttgctatgattctagagcaaatgactacaaggtcattaggttcgggatcgataggtttcttcctgataggatagagaatccgaaacccagagctgatatgtacagtatgggcagtgattcttggagagagattgagattcatttggagttcaatcgctttccatctcgtgacaaacaagttttctgcaatggagttttctattggtctatgtgggctcgtaagtactttatcatttcttttgatgtatttggtgaggtgtttcgcaacataccgttgccagatagtcttcaattcgatcgccttaaattagctgtttggaatgaatctgttgctttgttttcgtatcctgaaattagaggggtttcaatttcaatttctattgaagtttgggtattggatgactgccatggaggtgttaaggggtcttgtttttggataaagaaactagttgttggaccactagtgaacattgtgactccatggacattctggaagagtgatgagctcctgttggaaggaattgatggtgggttagtctcgtacaacctcgacagccaattgctgagaaatcttacagtttcggagtttggaagaatagggcgttgggatttttcatatgtgaagactttggtttcagttgaaggtaaatgagccacttgttgaataattaatgtttgatctggaattatgtaccaagatataggcagtagttatgtctaactgcagtaaatttcaaaaaatctgtttacttttgaagcaattcagtatttgatatagttgcacttgcactaaatggtgtaggaaatttagtttcctttgactattgttgcatttgactaaggttgtgtggtagcaatattattttatataaatatgtatatttaattatgtttttgtgtttatgctcttttgtttgatgctttttcccaattagcattgagatgccttgctctctttcatcttatgtgctctggctttcaaaatcaccaggctggcactcaaagcagttttgttaagattcatatcataactctattcttaactttcaattagacaacctccatttatgccaacgacttgaaattgcttctattttttatatttcaacatatgaatgaatgtatggaacttgcataattatcatacagcaacagttggataaagctttgggcgcttctgtttctgaatagtattgtttcgtctaataaaatagaaggatgaagatttcttgtttgcataaggacatggtctatcaatggccaaaattcttgttgaggaaagattggacagggtgctctgtgtcctgacctgaattgtttttatgtttctttgtttgtgattctgatcattcttctatagtgttgaatttgattaaagtatgctgcacctttttgattttcggatgtctaggtgtaagatagtagctttcatcataaatttagagaactatattttgctgatgccaccctaatcaaattatgtatgttcttgatgacaataattttttgattcatgtctattgaggatagtttaactgctaacttattattgcagaaataaagccaaacagtagcaaacaaatagcaaaataggaagaacaaactgatattaaactctcaagactagttttattgcttacctggcatataccgaataccacagccacgcctaagtctaactcaactaacctattatctcaacaaactcgcagagttaacaccctgctgctgccagtaccttacccttgtgttgcttagacctttaggaataaacaaatgtgagtgggggtctatcattttcctattgcacaattggatgagtatcttttatattcgactcctaagtcctaagtccttataggtgttaatgtagggagttcggtttcagtgtgagggtgggagttcggtttcagtgtgagggtgttaagaccatctaatatagtttttcttgaatagacacctttcttacagctacttgtacaaaatatttatagttacatatgacattcattttacttaagattcacaacagatgcttaaaaattattttgattaacaggaaacaggggaagtctctgctttgcaaccacatgagaggagccaaaacttcaccaatgatgatagattcaaagaccagatggtggtagctttcaattctgttgatcagagctattttgttaacaacacaccgagcatccaattcttgatatcttctgcactaagcccttctctcgaagcaaacatcaaagctgacatatcatgtttctcacttgatgagaagccaagaaactcgaatttcttatcaccaataactataccttctctcaaaatgataagtatcctatcataaactcttgtgcactttttctcatttgaagaacttggactcgtcgaaaaatcattccaatgcatcttatcgaagtcttcatcaacaaaagtgacacgaagaaagttttcgatatcatttggataattacacaacacgctattgcagagttttccctcaggctcaggaccagtgaagtaaacttttgtgggtgttatttgaacctggtgtaagtacactacatctttatctaaatgtaatttaggaatccatccactctttttgtacttcttatattgtttagtaagccatttaagtggctcgtagcagcattccttgcgttgaaagagtttgtcaagcgcagactctatgtattcaatctttattctacttggatcgactaactgaaaaaactcaagaccaagtgtctctccaggaagacatccttgttgaactaaggagtttatcttgaacaaaatcttgtatggcaagttaatttcttcaggtggaagtaccatgggaacaaggtaagagttggaagagaaaggagaaactttctttaaaagaaattggatttcatcttctttatagtaaatgaagttgttgcgcaaattcggaagatgagcagtggttgggatttccaagcatatggcagatgattgcccaatgcagcctgattcagtgaaatcaacatccctgatccagctgctaccagacctgtccttaaagttgtttaaaacagactcttctctcttataaattcgaggggcaccaagtaactagtagacataaaggagaaaaggaaagataatgaaagctagttagtcattttaatctaatgaacttcaagatagcaaggattaatacttctaacaacattgaacatacaaaaatgagtactaatagcaatgtctagaagaatttatatacatcttaaaacaaacctgaaggacaagaaacattgtggtttgtcccaatgggcggtgcaactcaatttgccatatacttttatgagagagctcaagcttatactcaacagaagaataaacaaaatagaagtagaggctcatctttcgcagtcttgttctgaatttcatgctcacattctttgttttccacagaacagaaaacatttcctttaaaacctgacatccaaagtacattattatgttctgatccatgttccacaacacagctttcggcttcgaaacgttttctctgttcagctcccaagctttgagacacgaattaccataccataattcgcgatcattcgccatggacaatattttttcagcacttgcaaagtcagtgaagtgaacatttgcatgagcggcattatgtgcccttgactgaccgatctcaacaccacatacagttccttctccactatatttctccaaaaacttcttgactattgcttcatcattgatctgatcaaaacaagaaaatccatacaactgaattgtagtatttgatcccatatcaattttatatttcacccttggactgaactgattgatatgggtattaattagtgttctcactcattatatgaccatccattgtgcccatatttatagttatacgtagaggtgaaaccttgtagcacaagccagtgtaacagattatggctacgtggtgaaagataattggaagagagggagtagtttattggaattgtgaatggcctactagtatgtaagcactctccttgtgtaagaagggtttaatggttcgaactcttcttgtgttacaagtatatttgccaagtttagaaaggtcaatgcttttttgaccacaattgacctaatcattgtttaaagataagcacaaacgttttaacttaatggtaaacacacacaatttgtctagttaatattatttaaagaattctgtactaggaatagtctagaataacctagaacaaagtggggaaagctaaaaatattttcttagacaagaatataaaagaatctcttagtttaagtcaacgaaaaagaattagaattacaaataacaataataagaaaattgtgttaggtgcccacaatcatgcaccatatgcttaataattagactagacgagcaaagaacaaacactactacaattttagacttttagggctcgtttagtacgtagtattgtattgtattatgttgaattatattgtattgtattagtattatttaatacaatactatgtttggtattaatctgtattaatatattgtattagtattatttaatttgggtcccggatttgggtctgggtcctaggtcggagttcgagtcgggaccggaagccggggtgcgaatccgggtcccaggtccagattggagattggtgttgactaaatattataatacaagctaatacagaccatttattatgtattaaataatacaaaacacattgcattaaaatttttggtcgtaataattaatacaatacattgttttatccaaacatagtgttatttattatttaatacaatacaactcttatacgtcgtaccaaacgaacccttaaaggctatttttttcaacaatttttataaaaatggaagctacgaagtataaaaatatctgtttggttcaaaattaacatttaaaggcaatttttaataaaaactgtagctatatcatttattacgtaccatttagagtcgattttaagatcaaaatatatatttccagaaatatcctctatggcgccagtttttatcaaataaccaatgccatatgacacggtgacacgtgttgttacgtttttagcatatggcgtcagttatttgataaaaatcgacgtcatagaggatatttatcaaacacttttagcagatgatccctcacttcgtcttcttcattacgaacacaacaaccaccaaaattagaaacccaccaccaaaaactcttgccaaccaccactctaaacacccatattttcctcattttcacaccattttacctcaattttttttataattttcgatacataaatctatacactaaaatagtattgttttcaccctatttcaccataaacagaacctattgaaaaaagttggtggcataactctggctaccaattttagtagacaaaacattgaatctcaatgtccattaagatataaatatgatttctgttcgttttaataatgtacattgcttta

SEQ ID NO: 295716 - DNA, 3274 bp, Cannabis indica
acaatgtagttgaggaaaacgtgggtgagggcttggagaaggtgatcgtgggaagaagaaatgggttagggcttgaaaatggtgatcgtggtaagctacggtttgaagacgagaagaatcagagaaaggaaaaattcaaaaaaataaaataagaaaggagttatgaggtggcgtgcgtgaacgtgtgtaaggaaggaagggagaaggtaattttgtaattatgaaactttttgaaaagtaaaattgaaaaatgtaaaagttaaaaaagtttaaaaaaccgtgtattgacaaaaatgtaaaaaagatgccaaatttgacatcaggtgtaaaaatctcttatttatttttaagcttatgtattatagtatagatggtatatgaaatttaagtaaaccccttcacagggtcagtagactttcaacagattttgtcatttaaaaaaaaattagtatttttactctttgaattttttggacttatttaattttaccctttaaaatatataacttattaaaaaaatttcttaaaatataacagttacataattatacatttttgttaagttctgttttttttatcgttaaaaattaacatttttactccttaaattttgaccaatacaaaattttgatcaatacaaaattttaacccattttattaaaaaattaattttaaaaattataatattctattttttttaaaacaattataatattctattaattaaaaaaataaaaattattaaaaaattaaataaaaacattaaattataatattctattttttttaaagcaattataatattcattccattcttgaatccttctaaatcccattcctctttttgtctttagattacacgtgtcatcccaagacactaaactaggaccatttatttcagctagacatttccacaaaaaactcttataaccgaattcactcgttgcaacactttccttagaagtatcataatttgtgcccaatatgagcgtgtataataaaaggatcgagtcactaaagtggccctccccgcatatgacaaattttttgaactacaaactcttattcgaattaccatctttttcagtaatgaatcacattaagttgttgtcaacctttttgaatagataaggaactccttaatatctaaatagaagattgttgttgctaaattttgagatttcaatttcactttgtacatcatgctcactcattttacaacaataaatggataacttggcttcacttggtagaagacccgaggtctgagagaagattttcaaccctaaagcatactgtatattgagataaattctccatgaaaaaaataataaaacatcgtctttgaaacataaatgattcaagttcagtgtctcacaccactcatggaacttgaaatattctttggagtctactttcatcataacttgggataagtattccattctaaggacaaaaagaagaggagacatcaggtcattttgtctcgaacccctttttgcctcaaagaacctgtgcatagtcccattaaacatgagattaaattttggagttcttacaaataacataatcaactggaaaatatgttcggggaactcaaaatcagttgacatctcttcaatgaagtctcattctaatgtgtcatacactttcttcaagcctagctttatcatacaatttggctttgtgttgttccttccataatggtgcaccaaatcttaacaaaccattatattatagaccttcgacaaacctactttgattttgaaaaatgaaatccagaagcaccattctcaatctcgaacaaataagcttggttgcaattttataaatgagctattggtcaaaaatataaaattaagtcaggacaattacctttcagaatcaaagacagcagtgttgttgcattgatctcttcgagcagcttctttgattgtaagaaggaaaacacagcttcactaatatccttgccaaccacttcccaattatcctaataaaaaagctactaaatctatttggagcgggtaatttgttcccaagaatctcaaaagttgcattcttcacattcttatcaatgtattcagtttgaagaagtttagaatgataatttgaaatgataggaattgttttgatgagagaacgcttgacaaccttcccccttccatttttcttccaaataatgagttatagaaactcagaaatgcctctgttacacattctagatgtgaattaaattgtgtaaagttggtcttaggttgttaccataaatctaagaattaattgttagtcagtttctatttttaaggcctttatttctttaagttgttatttttttttaacgtcttcttctctttcttctaaattttcttttataaagtgttaatcgatttctatatgcttgttatgtgatgttgtgcatgattgtgagcaatacttattgttgctttattatcacaaaatgacttcatatgtagactaaattgcaacttcaactctgtaagcacacgttttatccataaaagctcacacaccctgttagccattgctctatactcatcttctacactacttcttgcaaccacattttattttttgcttctccaagtcacaaaattatcccatacataagtataatacccaaaagtagattttctatatgtgatacataaaatgactcaccgtactcacaacaaatgcaatatcaggacgagtgtgagacaggtattaccaccaatcactggtattgttgaacatccacgagtttgccttgctgaatatcacaaagtttttgttcagatcaatatgggtatcttcatggcaacattcactcattccagtatcttttagtaggtcgagaatatattttctctatgagataacaatcccttgtctagactgtgctactttcatagccaaaaatttacttcatctctcttagatctttgatctcaaattctctaaagaatttacttttcattgcctatgtcccaaaaaagcttggtcatttatcgacatcggtgagtattgtggacaatgtcccacatggaataaatggtagagaattgagccatatataagaacatgggctactccactcattgccaattagttttgagatggaacctcatgattctcaacatggtatcagagccatatcccttgcgggcaagtgatcatatccgatccgcacctatatagatagtgaccatgtccactctgatacggttcaagattgatgagcaaaaaaatagccatcatcttgagggggaatatt

SEQ ID NO: 295717 - DNA, 3797 bp, Cannabis indica
atcctgagagtcgtatactagctgcgtaggggataggtctttgagaagaagccccatcttttcatattttgctttgaaaagaatgttggaggaagccccattatcggtcatggactaagccaccttcatgttagcaatgttcacttcaacgaccagtgggttgttatgagggtagataacatgggcaacgtcttcttcactaaatgatacaattgcttaatttctgtgcgactatttatgctttcaatcctctacgaccaatacttcttcatctttctactcatactggatggtctgagcttatctctctctggccttgctcgagtctctagcaatgtgcgaacctccaataatcacttctaaatgtatgtccatagtggaggcactaggtaattttgattattttcctgttggttttggtcaatttttatatacctacatatgtgcgggttatttttcctgatgaggaatttaattccctcctttaggttgttgcactaattggtatcgtggatgaaatcttggtgaaattgacagtatttggtggtatccctcttgctcgtatctttcttaatcagaggaagtctcttgcacggtataaccgactggcttgccatatatatggtctcttgagcgtcagtgagaatagtgaaaacagtgaacttcaaaggttttttgtgggagttttgttgatcggcattatacttatccttcttcctattgttttggttattcccatcattagaccttttaccaccattgttgttgttattgctagtttgagactggaaggtctagttgagctggacgaatgtattggctatagctgtggagggtttgtgacttgggtcagctttactctgtctgatattttccaccagtctgattacttctttgagctttataaagccatttgctcgatcaagaaattcccccattgaacatacagtgagcctcttaatatctttccatagctctcttttaggctcgattcctcctaacactgcaaccaatcttccgtctctggtaatttccttcaccttggttgtgttggtcatgaactgactgatgtagtcttttagaggttctccttgtatttgcttagttttctcaaagagaagaattatgtgtaaaattctaaagcaaaggcgttccttgagtcgaacttcctaggtttcaacttaaagtaccactgctgggcgacctttgctaatgttgttgggaagatttaacacctgacattgccttttactccttacaagcttgtttgtatctctaagtacttgatgtgagataacaaatcgtccttctcagtatacatcttccaagttggcattttgaacttggtcagaaagtatagagaattaattcgtgcagtgaaaggcaaacctcttatccgatcgagttcaagatcggtgagttttgggtgggctagtttttgtattagattcttaagctgatccaattgagctagcacccctggatcaacttggcatgcctgttaactaactatgtcacctgttggcccctttaaacttcgaagggtatgaagttgtctctattatgtggtacataattttccacattgatcggttgattattgtgtcaagagacagaatgtccatcctggttgcctcttctttggttcaaatcatcccaaaggtcattcccaagtctaggtcccattctttggaaaactgagtcagtcttaggcctcctgatagagttttggctggtggaccttgctagcatggggggatcttcatcgttctgggtgttaccctaatttccatcattaggcaagttatcttgacagtagtcacgccttcgattatcgttacggggactactgttagctcggtcatcattcctactaaggtatgattgtccactctgagaccttgaacggtctgctccatgttgttgttcgacatattagttttgatcatgaacctagacatttctatcctgattatacaagccacctatctctgggatcccccaactagccaaggagatacatcttctctccttccctcatgtctgggttagaagttagtctagtcgttcctcctgaggtagtgaccaggaaaaacttgatcatccatggggcggctgatggtttgaccctgtggtcttgaactagaaggtacatagttggttggcgttcctctagccaatattctggtcctctgctcaggatgtagggatctcttcccttgttaacgtctcatctgggcagttcgacctcctgtctttaccccctagtttattgggtaaacttctaatcagtttagtagcttccctggagcagcgatttatttcctcttgctgacacacatggattgagcctgatcgtccatccattctaacgcatggttgaaaacgatggacgtttcttcctagtagtggtggagtgtgttggtatgcgtctggacttgtcctagtgcatctctcaggttctcggactcaagattgtcccctagatctacttagggctctccttcagatggcaggtcagtgttaggtccagtaactctagtgtattaagttttggtcattctagtctcttgaacaccaggcgtaaattcagtggtaggggtagtgacccaacggttatgttgttagtccctacagggactgtacctccactcttgttcccacggttgagttgttttgattaggcagtctagcgttggggttgttcaatcctaagttagctggtgcctggacattagaatttgtcgccatcggaaaaggtggttcaattgatgaggatctccctatcaaaaccattgctcgctgatttaagtgtggattgaaaatcaagggttgatgagagcaggatgatattccaggctctcaataagagcaccaaaatattgatctcgcttctagccaatgacaccaagtctagatgaagcgataagaatttatggaggttcgacctcttattccggtagtatcctactccattttttgttgtattgtttttataaaagtatatcaagatcacaagttcaaccagctgagtttcttaatatttctcaaaaaatgttactaatattttcaaagtgttttcctctccaagtgcataaaaaaagggtccatgaatagtgaattggcctcattgtttatagagaaaaataaatacataagttacccaaaaaatacgagataaattgataaggatttaaatatgaatttcacgattttctctatctattaaatcaaattcatgaaaatagggatactaattggcttattattgtggaaacagttaaagaatatatctggacatatcttcagtgaatgcctctggtcagccattcgtcatcatctggtctggtcggtagaatattggtgtcatactcagcctagggtcaacttccttgccacgtgttagattaccaagtgtcacgtcattagtacgaattttgggataacaagatgtaaaaatttagaaaaatgctaaagtgcactttgcagtgtcctactgtcctactacaaaatagggtgtacatcgatcagtttggtcgggttatagcatattttactaacccaatataaatatcgggttgtaaatatttatttgcaacccgcccaattaaaaattagaaaaagttcacccctctaatgattttgtcgatttgatcgggttaacccatccaaaccgttcttcactttttttttatataattattattgttagtttctaatattcaaataattacatttaaaaaaataaaaatatattatttatctttcaagctaaaaaatactatagtttaaattaa

SEQ ID NO: 295718 - DNA, 2611 bp, Cannabis indica
ctctcatctatgcagtgtcaaaacttaatggcatgttgctttaaaggattccagaaatgcccacttttccccccactgaacctcctatggtctctcaattgtctgggaagagtttttaaaattgcctaagtctacttggatcattgacataggtgccacacaccatgtttgtcatgacatttctttatttcaagataagtttttttatcctaatctcactactgctaaattaccaaatggaagctaatgccaaaaaattttgcttaggcaccatacatatcttacaaacctagttctttataatgtcctttatgtacaagattttcattgcagcctattatctgtgagtgcattgactaattcaagtgtttattctttcagtttcctaactaaatactgcatcattcaagactatttgaagaaacaggtgattgggatgggtgaaaagattggaagacttcactatttgaagtctatagctgaaacacaaaatgactagaaaccttttgctttttctgctttttctaattctaagatttctgatgatactatatggcattatagatttggccattcctcatgtatcaaaacacatcctttgaataaaactttgaaatttcatgtcaacacttctcatgatttttattgctctatttgtcattatggtaaacaaaaaaggctttcttttatttccaactataacatgtctatttttacgtatggggccctttcaacactcttattctcgatggctgcaagtatttcatcactatagttgatgatcattataggtttacttgggttcattttatcaaaactaaagcagaggcacaaactgttatttctcagtttatattgtttgtccaaactcagtttgatgtccaaatcaaggggttcacgtctgaaaatgccaaagaactctaattccctactctttttagctatctttgcattatgcactatcactcttgtgtgcaaagacctgaatagaattctgtagttgaaaggaaacactaacatttgctaaatgttgctcgagcattgctttttcagtcccatatccctctaaaatattgagatgaatgtatagccactgatacctatctcatcaataggacccctactccaaatctcaaatacaaaactccttttgaaaagcttaaaactaagccccctgtgtatgaccatttaagagtctttggttgtctaacctatgcatctactgtcccacatgccagatccaagtttattcctagagtggccccttgtgtgttcctatgctatcctcctaggatgaaagcctacaaactacttatctcaacaccaacatggtgttttattctagggatgtccaatttcatgagacaatttttccatttgtaacttctgaaactttacccctcactatgatcactttttctcccatcctgttttgcctactaatgtccctgttgaaccttccccaacctcatccaatagtagacctactagacacatcacaaaacccttttattaaatgattagcattgtttcctatccattaaaaatgtttttgtttcatctcaggacataatgtctgtcactgcacactctctacactaggtgcttgattactcaaaactctcaccaaaattttgagcctttgttttggccatttcaagtttgacagagccaacttgttttgatcaagcacatgacatccctgaatgggataatgctatgtctacaaagattattgatttagaagcaaatgaaacttggatcattattagtcttccccctggccaacatgtcattggttgtaggtggatttacaatatcaaatttaatgctgatgggtcagtggaaaggtttaaggctaggttggtggcaaagggatataaccaacaagaagggattaatttttctagtacattttcccctgtcacaaagcttgttacagtcaagctttttcttgctcttgttgttgtgtatggctagcatttacatcaagttgatgtaaacaattcctttcttcatggggatcttcatgaagatgtttttatgactctacctcctaagtatagtcctaaaggggagaccaaactaccaccaaatgcagtgtgtaaactcaaaagtctctatatggattaaggcaggcttctagatagtggtttgaaaaattctccactactcttattaaagaagggttctgccatttagcaacaaatcattccttgttcatgaaattcacttctgcaagtttcatcattctactggtttatgtagatgatgttataattgtaagcaacaatattggtgatttggaagcactcaaaatcagactaaacaataggtttaaattaaaggatttaggtaatctaaagtatttctaggacttgaagtttctaggtccaataaaggaattttcatttcacaaaggccttatgcacttcagcttcttgaagagcttggataccttggatctaaacctgttagcacacccatggaagtgaatctgaaactgtcacaagaagctcaagatgaaaaggatgattttgcagatcctacatgttggaaattattttaccagatctagatttactaacaagtatgttggattaacaaccta

SEQ ID NO: 295719 - DNA, 5251 bp, Cannabis indica
tccaaggcccccgtgggttttcggcttgcagagggtctcccaagcaacagtatggagaactcgcttgtcatctgtgtcgccccaccagaagtctcttagagctttgtcaattttgtttgcagtggtggtgggcatgacatcagaggaagcgacataatttgacaaagtagaccctaccgatttgataagacaggctcttcccgcactagaaaggagcttggctttccaccccttgatgcgcgataagacccggtcgaccaaggtgttataattactcgatcttctttgagtattgaatagcggtaatcccaagtaggtggcattgtcggtcatttgcttcattcccaggatgtccttaattgagttgatccgccctcggggcaccccacaagagaaataaactgaagatttgtgggggttaatcgactggcctgaccatttacagtatgtggccaagcaatccatgaaagcgttagcttcctttgtagaagcttgtccaaatagcatgatatcatcagcgaacatgagatgatgaattgccgggccttgtctacccactttgatcccttttatcaagccttttttttctttatccaccaggaggcgagaaagagtttcggccgccataataaatagagtaggggatagcggatcgccttgtcggaggcctcgctcgggcttaatcttgcccgctatggaaccatttaacagaagtttgatttcatgcacagaaatacaggcacggatccatcccaggaagggattagtgaaccccaaatttgagagaattagcagaataaaatcccaatccattttgtcatatgctttttctaaatcaagcttgatcatcataaaacctctcttacccttcctctttttcatagaatggacaatctccctggcgatcatcgagttctctgcaatgctcctacccctaacgaaagccgcttggttcggtgagataattcgaggaagaatcccacgaagccttgaagcaatgattttggagatgattttgtaggagacattgcagagggcaattgggcggtagtctttagtggaagtaggtgcttcattcttaggaattaggacaagagaggtgtcattgatgaaccccggcagctctgagtgagtgaaaaaatgagtaaccatttcgattacatcctctcgagtggtgttccaatgatgtgagtaaaagcttggggggaatccatccggccctggtgccttgtctttccccatttcaaagagtgccgtggtgatttcctctgggttgggaatggaatgtagcagcagattatccccatcagttatctctttagagggaagacttcaatcggattcgacatttgggttaggacttgctttgagaagagatccttgtagtaattgaggaaacatgttgcaatttgtgcttggtctcttgtccactcgccatcatccggttttttaatacattggatgtaattcctccttcttcgcacaatggtggaggccatgaagaactttgagcacatatctccctcggagagccattggactcgggacttttggcgccaatgaatttcatctctaagaagcacttcagccaggttcttctttgcagtttctatatgagatatctgatcaggagactttgtttccaagtccctgagaacggaagtggcatcatggatttgctgtttaatgtccttgaagtgggttttattccatctcctcagcctgcgactggtgtttttgattttgcgatggaaattgatcatggggttagtgtgtagtctattcatccaagcttctttgactacccagcaacttctcggatccctattccacatattttcatacttgaataatcggcctttgcacatcactccaccattggtatcaagtaaaattggtctatgatccgagaccgaggaagataggtgattgactattgcagctggaaaaagcaatcgccagtccgtagtaactaggcctcggtcaagtctggcccgtttgagagatccagtgcatggggaacgagaattgcccctagaccaggtgtaacccggtccaacaaaccccaggtcaattaggcctgtacgatttaccattcttctaaagtcaaacgcatagcgggaggagttgccgctgttagtgtagttggtacattcagagtcttgtaaagtgccattcaggtcgccaataatcaagattggattagtttctagaagaaccatgtctcctattgtacgccagaattcctctttgtccgtggcatgaggggggccgtaagtgcccaagaatagccagtttgcgccagggggatcagaactaatttcacccacaataacaaacttatttgctgagtgaattttacattggacccctgttagccagcataatccaaggcccccagataaaccaataggaggaatataatgacttccagtgaaatgcagcttgttgcagagagtagtgaacttactttgtggtatacgagcttcagagataagaagcatgtcgggttgatgctgacggattagggccgtcaattgacgaactgtcgcggtactcccgagaccgcgacagttccaagcgaggattttcatggcgaatgtggagacttttgcgggcaagtctccgaggccccaaaacgaaaatccatttcgctagagagagcattttctggcagttcttgtagtcggcacgagggagttgggtttgccgatttctcaatcaccacaaagtgattgtttaaatcgattttcaaatcaaaatcttgcccgtgccactggttctttatcgacgagaagaagcctcttttcgtcttagaagctttcgttttgaatttcttgggtgttgaggaaagtttagccgtggaagaagtagattttcctcttcgtttctgcaaggggcttgattgggtctcagaattgggtgaagttaatttcctgggtcttcctcgacgcctgggagagggttctgcagagccttggccaagagcaaaagtaccaggagattgggaatgattgtacgaggttagtgagttttgggattccttaatggtatcttccttgctcctgtcagctactacaggggaatcagtattggtttcattatttgatattggtgttgggctgatcattataccatccgaggccttccgtttccgtgggccctctaagtgttcttggactctgaaatcttcaatattgagaatggggttgaaaagttgaggctcacggtggaacttatccaccgttagagatccaaagagaagttctcgggctttgtcttgggcccaacattcatttgagggccatgggataatttgggcctgagtacccagtattgaggccttataaggagagagacaaaccttttccatttcagtagttggggccattgtgctatgtttcagtttgtcttcaggcaagagggaggaatcagagtcgtgcttctccttcaaatgggtgctctgtgtatccctttccaacggcttcatattgttccccacagaaatggtaagatcctcctttatccttgtaacatcattgtcgtggtttgtatgaagagtattgcctttagaactggaacctttaatggtaaaaatccttgtctttttgccttcagagggtgctgcagcgtcaataaggtcctgaacctttacttgttttgaattttgtccaaaaggggatatttcacctatacccgggagataaaccatgggaagttgggtaatgaccatttccggttcctccctgtcgtgttcttcgtcggaatcagccacaattcttctcttggaggggagttgcattctacactcgcgtatttccgcctcttccccgtttcggatggccttttggactttaacttggttgcaaagaacaggatccttccctagtctcttctgcaatacccaatcttggaaccatttagctaatggggtggtgaatgtggatttttctttggcatcatttcttagccaggttccatacaatggatagaagtttcctaggctgtctttgaccacagtaggagctttaaaacaagaactctgttcatgtgaaagcacaccacatttgaagcagagtttcggagtttctcgtatttgtattggatccaaagatccttaagtttttgtctccgaagaaaaaagccgcagaagatgggtttgttgatgtcaatggttgctctgaaccttaggttgctcattccaatagcatcctctattcctgcaggcagttcgtggacaggtgaggctttggcggccatctcctggaggttggacaggttccaatagaagggtggaatactctccaccgtaacccacatcggtgttttgtcgaaccggacctcagctggtgtgagccaagcgggccagggcattagcaccatgagggcaccacatacgaaccagggtctgcgggcaaggacattcattgcatcctcccttctggcgaaagtaaattggagaaggccctcctctatttccttccatttccagcctttaacggctttccaagaaaggttcaatgagccctgtatcgcagcttttccgaacttatatctgttgattatcctccctaagagtacttggtttgtttcttgtggttcatcaacctctcccggattgagggtgaaggtaatgtcgttgggagatagttgtatagagtcttcaaagaggtcactgattcctgaggaatccattacgttgatagtgaaaatcaggacagtggtggtatagaacagagcaaatctctatgaacttccaggaagtgagctcctatagagcattcttataagtagagagaatggttgttgatcatggagctcctatagagcattcctatagagcattcagtactgacttgttactactctgtataagctcagaattacctcggaaacatgtagttaaatctgatatatacatacatctatttgacgcaaagaacgaactatttggtatagctatcataatgagaaaaaaagagagagagagataggagaatttggatccattaaaaagaaataagaaatatgagaatttggagataaataacctaaatgataataacaataaatataataaaaaaaaaaaccctaaaaattatattgggatataataatcacactgaggaagaaaatgtaaagtaaaagataaattgtgaaaaactaggtgatctcctaaaaaacatacattttttaatttgttttagatcttaaaagagttttttaatttaatttttttaaaattaattgt

SEQ ID NO: 295720 - DNA, 7008 bp, Cannabis indica
ttagaggctgctgtggtggaagcgatgggcatcaaggaagcgcttagctggatcaaagacaagcagtggcatgatgttcagctggaaaccgattgtcttgtggttgtccaagctgtacactcttcagttcttctacgttccccctttggcgtggtgattcaagagtgcaaagagttgcttgattctttaaaatctgttcagattcaatttgttaaacgttctgctaacaaggctgcccattatatggctcgcagctcttgttttcactcagttcgtatgtttaccgagagtactgctccggttgatcttttaaacattgtaatggttgattcaatttgctaataaaatgtcaccattttacctttagtattttttttttttttattctttttattattattattattattattattattattattattagagtattttagtaaatggttgttagagttataaaagttattaagttatttaaaagtattaattatttaaagtagcttatgttcaaaacctactattcaaatcaattatatttgacaagataaattttctcattttcacatagaacaattattgttaatatttatcaatattatttatttgtagtgaaactatattattaaatttgcaacattgtttacttattatgattattattttatattttttcccttactaataattttttttgtttgcagttaaaacattctttttccttctcacattcatgttactaagattgatctctctccaacctagatttgttcattgctagtttttttttttcctttgtcgagagtgatgttggaattattgtcaatacttgttcatttttttcaaaaggtgtctttgaatggggctcctttttaagatctattaaattttgaaatttgtttttctgggtgtatgtcttcaacatgtcatgcaaatgcactacagatgaaaaacgagatttcttagttgaaagaaattcctctttatttaatgatgaatgtattatttgactctcaacaataaaattaattattatattaatatatatatccatatttatatacatccaatctaatactatcatatatacataagtaatttcttcccatctcaacgcaaaatcaaagtttgcgtttaaaataattgcccaataacctagatacatatctgctggagtaaaactataaatattggacaaaataaaatatgaattcatttttgtatcgaattacactttgcattgaagatgatcttaacataaaatgcaatgaaaaaatagacagtgttaaaatttagtgaggttattaattgtttgcttagactttgtttatacttcgtttcaaatgacaatctgatctaggacttgttacaagaaagtgaggaattttttttcctttttataagaagtaagcgactaagcgttatttgacttttgtatctaagcagaatttttgtacactaattatgacaaaatttaccacagacaagtgttagcacaaagttgaaaaaccaaatccgaaaattctattgttctgagctcttccgagagcccaaagctgcaaatcttgagattaaactggacattcttcggattaaatcttcgaaagatggacgttgttctggatcactgcatatttttttaaggaaaaaaaaggtttcaagtaagaaagagtgtgattatattgtagttttaataagaattgtacatttaactaccttttccaacagtcttggatgatggattctacttggggatcaaggccttccggtagttctaatcttctatccatgaaccccacaactcccacaaccttatgagaaagtggtttacaattatggtttcagaattaaactaataaatcgaagcagaaatatagtttagaaagataaacaatagagagaaacctgtaaggtgtttatgttgttccaaggaatggattcagtcattagttcccatagaatgacaccaaagctgaacacatctgacctgttaaagacaatcaaactccttaattggaaatgtttctcgaaaatggagtaatgataatggttttcaaaatcaaccattgattttctgaacttacttctcgtttgaaggttcatttcggaggacttcaggggccatccactgaggctattaagtttaagaacgcaacaccttttaatacaatgtgaaagcaatgaaaattaaagagctagatacaaactatgagaaaagtttatttaccgttcctctaccagattttgtagtcagaaaggttgcttttttcaacctagaaaggccgaaatctccaacctgatgacacgaattgttaaacaggcaactccaatgttaaacaggttatatgctctttattcaaactgagaatcattgggcataccttgacagtccagttcttgtcaacaagcaagttagaggacttaagatctctatgcactatggggggatttctccgatgcaaatagttcatacctctagtctgagacaatatgaaaaataaagaagcaaatttaacagattcagcattagcaacttaatcacatgaataaactggcgggttttatatgcaaactataaacaaatcatgtaagagagaaccatagcgtactcacaacatcaagagccatccttagacggcgtctgatgtctaatgcttgattgctcttatgaagtgttttaaaaaggcttcccctgcccaaataagaaagattactccattattgggagctttttctggtgaaagccaatagtaattactacttagtctttagtaaagcaaagaatttacaaacatccgttattggtaggtattttttgcattctaatttctaaggtagagtaaaatcattatttgtttactcctcaccttttggtctctaatctgtccagaagtatttatatacttttcttatcttacctgggtaagaactctgtgacaatagctagccgttctcgagagtatgatgcgcccataaataacaacacatttggatgtctcaacctcttcattatatcaatctgaagtacatccaaaagttgatgctccccttcatcaggtatattcattttaccagcattattcataaacagttcagttaaacttagttgagagtacctcttttttgtaatcttgtaatgctccttcactgtattcgtttcgcaagtaaaccttaatggcaacatcctgattggagaaatatattttagggttagcacattcttaaaaactaaaactttggtatgaaatttgaggtaatctttcaagttttaaacgcataccgagccattccaaattccacgatacacaacagcgtagaaacctgtcaggtgagaacaaaatatacatacattcagtttcagtccagacaaatgaaaattttgaacttacatataatgaaaaataaagaaatttaccatgtccaatctcctccccaatatgcaagtcatcccagtgaatctcacagtcaacaacagagttggactcgagatcacctttgcttgatgaacttccatggcttccactgctgctgtctcctgaacttgggaattgtttaccatgtctttgtgcttcatcttcgacctggacatccatcaagttggattcttctgtttttgtttctgttgattttacttcagtgcttaacttccccaatgaattataacgtttggatgacccaaaacattcattgcattcattcctttcacgtacattcaatagctcatgaccgcatccacctgagtttcctcccttaggtggaagggaaacatgtcttttcctgggtcttcccctcttataatctgaattgacaaagtagccatctggtgatttctttgaaacacttggagaaccagactcatttttcacttcgttcatcactggagaactaccacagcttgtaccattttgtcgatagcttccatgttcattttcattactagcgttcccagttcccttgatttgcagctttgctaatacttttgtcgcctacagacatttaaacacaactgtttaggacaaaaattggcaataccaaaaagactatatggtttcacgaagtagaatccttagggaaagaaagacagcaaaactaaaaccatgtggccttattttcaaacaaagttatcatttcaacaatttgtctgcttaaagatacaatacaattatagttaaagtgataaataaactaatgttaaattatcttatggagaccaattagaaagaaaaacaaaattgaggagggaaggaactatggtagtgttacgcaagcaccagattcgaaacagatgacgcaatctctggagccaccgggactattgggggccgagggtgccactgtaaccttttgaatcttgaccgctgttgatctcttctttggtcattggcaacatcatcacaaggacttgcgttctctgcttccatgctgttgatcaaagctgcatcacttgcaacaacgatgaccccagcaagctcgccattttcatacaaaggacttttggtgacaattgccatgagtttcttgccggatcttgtcttaaaagggaattggcctgaccatggttctcctgttcgcaacaacctccccatgatcttctgtaatggaacataataatcttcagggataaggagttcagtgaaacttctttgactaactacttcacagtctctccatccatagaggttctcagcagaacgattcctgaaattggttgagtgctcttgttctcaaattcaaaacatgtggaagaaaataaggcattggaacctacttaaatcacatttaataccactctatgaattttccaagcaaaggtaagtaatttttacagagctacagctttcaataatgatatagaaaataaaagttggctttactatgcatcttagtttaatagcaaggttgatactgtttaacttagaaattacctaaaaaaaactctgtttcagatactaatctgtctaaacagagttcctgcaatgttccttaaaggcttgaacttgagtttatttatattgctctgggaacaaataactaacatcgaaatcataaacagtttatgcgtaccaactgtatgatttatgcaactctactctctttctcaatcatttggtctagtcattaactttttaagtcctgggattgaatgaaaaggacttcatataagctgacaaccaatcttccaaagttcaaattcttcaaaaactgactttttgtctcttttcctatccaacaagtatactaattccatttttttaatgaaaacttaattcgagtttcaagtttaataaaacttcgagatttattaaattttattaagaaaaatttcatttccagatcatattaaaattagatagaatagaatttctcttctcagtggacatatgtcgaacacttctattacttaaaagatataccaaaccactgtttcacaaaaagtatacacaatactgtgtatatatatgtatggatataaatattaaatcaaacacgataaaacaacgtaagaagaaacgaaaacgaccaaggctttcagagtattgtataaacaaatacacatatacatatatatgtaccagaagacgatctctccggatgatgcactgcataccagaacagcatgacctattgactccaacaccttcttgtacggactaccggaggaaaagttacccacaatacggtcttcaccgggataatcatcagccatattgccggaatctgtcgtcaagacacaatcttcatctttctggatcgacatctccctaagctgctcactaagtcttgtgtgactctcctccaagctccgacaccgatcaaccagagctccgtaaaaacgagaagaggaccctaatccgaccatggaagtcgccggagtaagggctcgcaatggcaatagtcaattcttttatttttaagctcgagctgaccgccatggttttttttttaatcttgaaaaaaaaaattaataaaaatgtatattttttaattttcgtgagcgatgacgtggagctaaagcgtttgcgccacgtgtcacctaccaaattgagggagttctcctgtaacgagaggtctacgaatcggaaaatgggatttggcaggcggagtttctgattggttcgtttgtttcggagatttgtcataggaaaattgccgcagttttattaagataattacgattatgccactcagctacgtcattggctcatttattggaatgggttagttaggttgcttacactccacttgaattcaattcaggtgttcttgtacatgagatgacacctaaaagcaagacaaattagtgatcaaatgtggttatcatcattgtaagtactgtggtttcttcttttttaactgttgatcttttgagtaactgaaataaaaccaatggatgttaagtatagggaagtgagaatagtttgaattgtgtttctgagtgtagacaatagttttcttgtcgtcaaagctataattaacccaactgtgtttccactttgtttagtcttctctaaataaatcgttgaaatatttaatgataattaacatagccacctcattgctacacccacttatttttataaaaatctcaaatcttataaaaattatttttcaaagaaaaagtccatttgatttatgtgctccaaaaatgagcataattacatcattacacctacatattttcagagagaatggtggactgcaggacccgcctctaatgaagcacaaattccttatctaaattgggaacaagatatggatgaggcaaaaatagaaatagtattttttacgaggaaatatactttatttattttaatttttatcttaattttattattctttaatttatactcaattttatagatcgtatccttattatgtgcattaaaaaatttaaatttaataagttatgtgaggttatctttggtactttgtttataaaagagagtatttatcaattaaaattattttagagttatatttagttaagctggagctatggcacgaacg

SEQ ID NO: 295721 - DNA, 6307 bp, Cannabis indica
ggtattgaaatatttttgtaattttggtcctaaatttttctaaaagttatgtatctttcataagtctaggggcttactctataacaacttatagattatgctgaatgaactcatgctaaaattgagaaagatacatttaatgtagaattatttatgagggctaacatagactcaatcaaacatttattgcttttcataaagggacttttcttacttttatttattaggagtgtagtgtgtaacaatttcaactcagcatgaatacaccctaattattacgacgtattattatctgtcctctaatgagtgactgaccaaaggctacagatcacagatgtaaaaagataaaagaaaatatactaaatacaaagctgttatgtggtgcttgcatgtatgtgtgccaccactattacatagcctaagtctcttcattatttattagtcataaaaaagagtttttttattatatagaaaggcaaagaaaaagaagaaagtggaaagaaaggtacaacacagcaaactagttttatttctttgcagcttttctattttattttgtattctttttaaattgctaaaatgcgccttattggtcatgataaaatgcgccagccagtacccctcctcatctcagcatatattgactctttaatggtgtactagcttaagcaaaacatgctttaagtttcttagttaagaagtaatataaaatatataatgttccaaatccaacagccaataaagtaagtaataatgtgataatgttggtttttattttattttatttttccttaacaaaggttgtaaaatacagtaagaggattctttctctgtcatatgactctataaataatgtagtgtaatgtaatgggtatgtgttaaaatgtactactttagtctttggatgcttctttccctattgggtctcgagtcttgagcttgagctttttttaagtaccttttttctgggtttttggtgttcattattttcttttataaaaaatatgtaaaagggtttaaaagattgagataaaaacagggttttgtggggttttcttctcttaaagatttgagctttgaaacaaaaaggaaaaatctcatctttaatgtagtactaccagttcttacctgttctctgacagtttctaatttaggaccactgctttctttgtctttttgttatcctaaagctaaaaacttcatagaatcctcttagtgacctgatgttgactttgagcttttggtttggaaatttaaaaatgctatctttgagctttgtttgtgggctttagagattctgaaaactgtgttctttggtgatcttcactctggagcctgcctcagattttggactgtgagctcttctctcatgcatgatttggagggtaaggtctgggtttgattatcccttctggaggaaaagacccatttcatttggaacttcttcagcatcattggtatgtttcttcttaatatactggatttatttgttttctttgaagtccttaagtaacaataggagatcatcaaaagttgagttagtgagagttgaaatcttaaggcagtagttttttggggacattttggtttttgatcaaagaattgaagatgaaagactatacatttaagaagattgtttttagcactctgatatgatgatagtcatttatgcttaatggtatccaaaacttaatattcattgttatttgagtaagagtttggtgttggtattgaccttacttggatagtggtaatcaaaataggttaagccaaaatgggctgtgctgcctctagatttgacaaggatgagagggttcagatttgcaagcagagaaagaggttaatgaaacagttagtggggtttagaggagaatttgcagatgcccaattagcttatttgaaagcattgaagaatactggtgtaaccctgagacaattcactgaatccgaattattagagtttgaaaatagtacaactgaaggtaccaccgaacgccttgtattgccaccctcaccacctccgccaccacccccacccccgccattggaagagactgatgaagaggaaattaaaaagagtgagtatgatggcctacaatttcctccaattataagctcgtcgttggaatgggacccttttcgctctactacaccatgttattgggaaaacgaagaaatgatggagccagtggatgaggagaactgggcagagactaagacagatttcgaggaagaagagtcagaagagaaagcttctactacagatgttgttgctactgaatcactttctaataagctacaaaacgcagggtctgttgatgataattcatctacaacgagctggtgtgataaagacaatgcagatggcactgcagtattttttaggggcaagaagtcattggaggctttagctaaggaattggatgactatttcttgaaagcatcagctggtgtaaaagaaatcactgttcttatggatataaatggaagtgatatgtttcttccccacagtttcagagagaacaagagtaaattcaacatccttttatcaatctcattgaaatttttggtctatacttatatgctagaacacttgataattagattatgctctttgcttttgttatagcctatatctgtattttctagatagctattggtttcaaaattggcttctttatcattcttgtatattcaaatttctttatatgctgaagcaacaatatagagtaactttcttttgtttgcatcactaattactggttctttacagggaaaggtaccaatcctgcaaaggtctttagtggattgtcatggagtcggtcatcaaggtcacttaccgaagattctgttgattctagtgaaccatgcaggcctggagctcattgtgttacacttaaaaagttatgcgacgaggaacaaaaactttacaaggcggttaaggtatagagtccatgaaaacatgcatttttttaattaaaaagctaactgttatatgatactgatcacgattatataacccgtgttcatcaaccctagattgccaatcctgggctagaaatattggcaactaaaatatgcatatgaccctatgatatttcacaaaacaataaaaacattttgagtttcaatctctatgtaattgtggagaatcgaatttgtcatggtcacgaagtgttacctcattgtaagttgaatgaaatatgtatgtatttaataaggacaaatactttccctatcttttgaaactttataagttatttgttcttatagcaatgtatgtatgtagttttcgatattctggctttaatgtatgtttactaatgaaaatacagcttaatgattatcctattttagtccccataggcatatgtaagaagtctcttgtagtgttttaatatttggtaagcttctaaatcaaaacttggttaagtaaatatatatatatatttacagtttatattctcttgcgttgatgtttatacatttcaattgaattgtttatatgcattaaaaagtttgcttttgatgaccactctcttctttttagagtcttctttttccagaagttgtttctcatggatataatcattttattatacatgtgtaggaggaagtgaaaacaaaattagagcttgaaaagaaatccttattactacaaaaacaagaggcagaaaaccatgattgggaaaagacagataaaactcgacagagcgttgggagtctggaggctattgtctcgcaactccaagagataataagaacggcttgttcttctatattgcaactcattgacgagaatttgtatcctcagttgattgcaataacttccgggtaaactttatgaaaattacaatatctattttgtgtggtcttatttgaacccttaaagtggtgtttgcaatgtgatttgtgaagctatttttaacaaaaaccgcagtgtaaagttcttatcgagaaagaaaagtatttccctccatttcagtcttttaatcctcctgataatttataagaaaggttcagtgtttttggctcagcataatatttataatttcatactaaaactagtggagcaataggctcgaaattgcatggaaaatcatgcacaaagtctctgtcttgaaactcaatctaccttgtgtcctcacatagttgaataaatcattttgtaggttgttgcagatgtggagaacaatgtacgagagtcacgaagctcagtaccgtaaatcacagctattgatgcatttaggggacaatcaaaaaatggatccaagtactgctaaccatcgccaagctgcagttcagcttgaaactgaggtcagttgttggtataacagcttttgcagagttgtaaactctcaacgagagtatgtgagaactctctttaggtggatcaaacttgttgataatctcgtagatgaggatcgaaggagtcttcacttgtctgcagttcaaagcttatgtgatcaatggcagctcgcactagacaaattgcctgataaggtacttatcgtttcactactgagtttctcgaaagcttatattatcctacaaaaacataatctaatgccttagcagttgaagttacaaaatgagtaacactatcacttctgctaaattaataaatagttatcaatagaagagaaactatttcgataaataccttcacttgttgcgtacacacaagatttttatgtttggaactaatatatttttctcaatgttgaaactgtaaaaatttgattttatctgacatagttgctaagatcagtacttttgatgatcattgctcccacacaagtatattgctaatatggtctctcttgaagcttttaagttttaattttgataatttgtttagtctcctttggtgtttttatttgagatttcatcgccgttgttgccttgtcattttttcaggcagcctcggaggccattaagggtctttgctcagctatccactcgatagtcgtccaacaagtagaggagcacaatttgcaaagaaaatatgaaaaaatagaccgaagagttcagaaggaaatggactcgcgggatgagttattgagcaaacttcagggtagcttcgagggcgaagacatgctttccgatttgagccccaaacatcctttgacactaaaggatgccaaaatagcagccttacagaaacaattggaaattgaaaagactcaatatcaaaattctgtgcaggcaaccaaagccatgactttaaacaatctgaaaacaagtctccccaatgtgttcaaaacactcgtggatttctccggggccaatgttgaggctatcgaggcttgtttaagctatactaaaccagaagatacctgtgaagctgaattggaaagcactcaaaattgaaccttgagaaaatgctgatcctggtgtttagggatgcaacaagttttgtttttggtgatatggaaaatgtaggatcttatatctgttgagttgttcataactaatcttgttaatcttgattttactttacacttcttctaggtcacagttctgtgcttggggtttttttattcttcttttgttgagaaactttttatgtttcaacaatgtctagccaaagttattgttcagaatatgttgaaccaagctcttatgtagtggataatataagatatgtataggaaaacatgaaaatgcatttggtgtattatgaagtgaatgcaaattaaagattgagtataaaactttaatattgatcaagaattgtgtataattggggcaagatcaaatgagtacacttatacaatatacgtataatgtcactaaagtcctacgtggttagaaatagaaaagatcatgaatacatagggacagaagctttttgggaaagtgttcaaaaataaaaccgtgagggtttagatctaaagcagataatattagatttctaacattgtttctttctgtcgtagagtaataataagatttgagtctagatctcattcaggtgttggattcttcacaatccttcacactatgattgagtgagtacttgacttgatatgagtgggcattgtactctatcaataaaagcttgaatttgatgaagaacaatagaaggggatttcgaaatacaaagggaggagctctcatttattagttgtctgacaaataataaaaactagattcagataaatggatgagaataagaattatcttattccttttatagtatttcaactagggtttggattaaaagtaaatggccccaaatcataggagtatgttagtttatgtcatcttttacaaaaaaatatagtaaatggccctaaatcat

SEQ ID NO: 295722 - DNA, 2683 bp, Cannabis indica
aaaaaaaaaaaaactttactattactaaatttaaaatatctttcattattatttaatttttttagtttaaaaaaattacaataacaaacacatataattacttttattaatttttaaaataataaaatttatttttattattatattattacatttattatatttattgatctataacattattattgttttttaagtggaaggattagggtaaaaacggtagtggcattgattagttggaatcggatgtgtgtccacaaggttcatgagggacttgagtttcagaagctttatgattttaatatttcattatttgggaaacagagctggcgtattcattctcgtcaagattttttagttagtcgtgtgttcaaagcttgttattatcctcgtcagtcttacttgggagaggggttgtgaagcaatccgattttatatggagaagtatccatgaagctcagtctcttattcggccgtatagttgttggacctggaatgactatagatatccttagggacccttagcttctagataaagagaaccatttgtggttttggatcatcctaatttaacaaatcaaaaggtttccagtcttatgaagattggagagtcgtcttgggatgaagaagttcttaaagatatttttgtagagagggacgtaaagcttattttgagcattcctttgttcccctcaacgtttgacgatattcaacagtagaatggtgagagttttggtgtatattcggtatcaagagtgcgtatcaacttcttcaagagcttaaaggagagttaattagaattgttaatactcagtctttttgaaagagttgtgggatttgagagtgcctcctaaagttaaggatttagtttggagggatgcttccatttgtcttcctacctgcatccaattaggcatgaaatgtgttcctcttctctcattgttgtgtctaattaaggtacttgcaagttggagagtctatatctcattgtcatgtgggatgtttgtttgcttttgattgttggcggatggtaggtatttcaatgatagattggtgacaactcttttgggagatgaattcatgatagatttcagtgtcaggattctgagatgaaagatagagttattatgctttgctgggcattgtggtctgtgcgcaatgacaatgagtagaatgtaagaataagattgttaaagaggtagttttgttggctaagggtagttttgtccaatggagttgtgcttataaaaattttaattcctctttattttctttacaagacgacgaagggtaggagcactggatttcactagttggttataatacaatcaaaatcaaaatcaatgtcaatgtatctatctttagcaatcaaaatagtatgggtatggttgagtggcgtgaaattcttctggtcagattattatggcttggacagtaagccagatgggggtggttgatcctgttcttgctaaagctatgagggttaaggaggtttgagttggttgaaagaaacatgatggcatgatgtggtggtggagtcggacagtttggtcgcgatccaagctattcaaagtttgtttagatatgactctttgggttctgcattttagagtgcagatgattcttagtttgaataatgtctttttgatttttgtcaagcgatctactaatcgtgttgctcaccatttgactagagcttcgtggttaatagctggttgtacctatttagattgtacgattctgagtagtttacgtgatgttcttttgaattgagttaataaaattacatttctattcaaaaaactaaattgttatgcccatatttgagccataaatatggacaagagacacgtggaaattattctcgaatattaaaagatatcatgattaattacaacgactatcttttctcgagagaagtaaacataaaaagataccaacctcgcgtcatgctacaatatcactaacacgtgacgacgaaaaagtacacagtattgcgagataacaactttttagggtcatctcagagctaaccgggatcacttggaagcgtacatgaactgaaataatgtcactgaaaagggtaaataacgagttctttaagagattgcaactcattgacctacatactcgtgagtatgttgaaagactaaggaaaatacgcaaaaatgtgacttatcacaggattcctaaaagactaatcttaggagttgacataaaaggcaacaaccaggaaaaatattctgactagtgtattgcccaatacgaccagtcattcccaaatatctttgaagaatgcgagctatattttagatatattatctcggcaacggaaactatttccttataagaacaaaaagcaattatcagtaattattttattttatctacatgttgtaaatataaaatgtggagattgtccacgtttcatgagcgattacctagataagatcaaaagagaaataattgtcctccctaaaaaacctataaatagggacagaacctgagtggaaagggatcgatcatttttgggaaggaatgtgatagtgagattgagtgaatattcagagaaatcctcttataatctaatcacattgtaagcagtggcggacccagaatttaaagtgaggggggcgtaaataaatttaaaagaaaatattaagtgtagttagtggggtttgaa

SEQ ID NO: 295723 - DNA, 7092 bp, Cannabis indica
ccacgtgtacaagtgtgtacacgtgaacagtccaccgtgacacttaactgtgatttttgaacggaagtatccaaagcaaaacagaaccatagtttaggtagtttagccgccaaaaattcggtttttgtagttaagtgttacaaaccataaagttcaggtgatttagtcgccaatatcccttacaagaatgaactcatttcatttacacattctaaaaaaggtagacatggtttagatacaactcatgtaggaaagacttgccaccgtcctggccccgctgctgctgctggtccacttgacaaactttggccttagctggtgtagcaacagttactgagggcacattaacaagctgcacattgaaataagactgcattattgtaggttctgtaatagggttaacatcctaacttcaccaaaagcatcacaaataacacctttgacagcttgtttgtcatctataaattaaaagataacagtgaaacaaaaatatacctctaggttgacatctattccaaacttgttgagcatctggtttaccaattttctccccttcctcatctccttccaaagcatcatcgattgcatcggccatcccatcagatacgaactccatcttctcattctgcctttcaaactcttgcataattttctgtagtgatgggaggctcatctgtctgttcacttggcccatcgccttcgtcacacctttctttgcctctcccattagcttgtgtggattccaaagtctgaaaatagaagagtatatgtagattaatcaacacttaagaagtcaacaagagctatacctcaaggaccataaagaatcagatattatatcatttagattagactcaaattctgatgtgacccactgatacacagctccaaattatagaaaaatagcaagaaaagaatataggtaatagatgaaaattgatctagttgatactgataatatcaaaggtttacagtagaagtccctaggcaattcgagagggctctctccatgatgcagagaacaatctcttaattcttgcatatcccataatatccccttactcacctatatatactacccaattcccaactcaagaaccatcctgaatacaatgactcaaattatcctttttatctagtgtactttagcacattccacacaatcaatcttggggtctagcaaattccaatcgacggtactcttaccattcttcaccaggtaaaaataagcaaatacagtatcttctattcacagttgtaagaactagggagaaaatattttttttttcaatgtttgtgtcagtttaaattaatttaattcgcaaactaaatattacctggactctaagagatactccttgaagttgtgatttgagcgtgtaaaacttttcaatctgatgtcttgttctaaccaggtctttctccataactttcacagctccctgaaacaaaactaaactgcatcaaaatatagttggatatctgaagcttaaacatgtcctctccatgaaacccataatgaataagatccagaatgagccaaatgaaatcatgcaccattttcccttgcttggcacttttctgaatctcttgaattaatttcttctcttgattctgaagaccttgtctcactttctgtttctctgatttatttgtccagcattctcttattttcctgcataagttctgacattataatcatatatgcttgttctcagcttaaaaaatgaatactttaacaaagtaataatatactcataataacgccaattctcgattgagcatgtgggtgttaaagaaacagtagaaaataaaacattatagaatgtttcagactcaacaagaccaactatgctcctcaagcataagcacggaccaattaaaactccattctctattttccaatacacgtacacacacaaagcatggaaaatccacatttacatataaactaaaggctttttgagaaaaaattacgaatgaagaggcttcaaatatacaatgcacgtacacgttgtagagcaaagtgagtaaaaaaaaaaagagtttgacaggcatattaaaacctgcttagctgaattcttctcttctcctttttatcctgtgcctgccagggtaacagctgagcttgttcatgaaacatagcattacttgaggaagataaatagcatgtacatctaaatgaatggtgccaggtttctttagcttgaagatttgtgtccaagtatatatgttgcgataagattaccaaaagtccttgcaagagcatgatccaaacttaaaatgatgaaatagcttattgtcacgaacaactatttctctatttgtaataccagagacaagcttcataacattgtggcagtcaccacagatgcgtagatttttaaaaattcttattgcttttataggcggactgtatatcagtgcaaatgcaagagccaatctttcactatgatgttgaagatgtttccttttctctttctctgtcattttatgaagcacatattctgtttgtggtatgtaacctaccaactccatctttttgtccagttcctctagttcaaaatggatttctttgattttaggatgggaactatcttgagaggtaaacacgtgaacttgtccatcaacctcaacccagctactaccaggtttcttctttacctgctgactgcccattaactttctgacatttctgacatcatcccacagacctttggctgcaaaaatgttagatagcaaaatataagttgaatccatttccggtatgagctcgaaaagcttttctgcagctctttttccatactccacgtttccatgaaacttacaagccccaagaacagtctcccaaattatggcttgtggagctattttcatgttctcaataaggctttcaacctctgtgaattttccagcccgaccaaggataccaatcatacaagcatagtgctcaattgtaggattaatgtcaaaatctttgatcatggaattgaagtgctcttgcccttctttaaccaaacccaagtggctgcaggcagaaaacacacctataaaggtggtctcatctggcatggtaccttcatctaacattttcctaaaagcttcaagacctctccctccttggccatgttgggagtatccacatatcatggtgttccatgagacagtatcccgtgaaaccaagccttcgaagacagtctcagaatcttctatgcatccacattttgcgtacatatcaactagtgcactattaacaaaacaatcatctgtgtgcccatccttaaatgccaaagagtggagctgcaatccatgttccagggtggctatacgtgcgcaagaatttaaacagctagcaagagtgaatccatttggccttacaccttctcttctcatctgattcaataaactaacagcattttctgcctgaccagtttgtgcatagccagtaataatggttgtccaagttaagaggtctctattaggcagtctactaaaagctaaatttgcatctttcaagcacctggttttagcatacatatcaatgagagctgttccaatgaaaacattgtcatgaagactgtttttgatggaatgggcatggatttgtttccctagacctacatccaggaggctggaacaagaccttaaaatgcttataaatgtgtacatgttgggcttgaaaccttcaacaagcatctggcgaaacattcttggtcctagattgcaattttcataatcatggaatccggataaaagagcattccatgaaactaagtcacaatcttttatagcttcaaatacccgaatggcatcttgcacgcatccaattttagcatacattgtgatcagagcattactgactgttagatcgtattgaaatgcagatttccaaacacaagcatggatgctttcaccatactgcaggtctcccatatcagtggcagaactaagaatactcgagaaactaaaatgatttcccagaatgcctatacatctcattagacgaaatagatgagcagcttcttgccactgcttttgctgaccaaagcaagtaatcattgcactacaggctactatgtcaggatttttgatcctcacaaacacttttaaggcatctgttgctagcccacattttgaatacatataaacaagattacaacccagaaattcatcaaattcacacccaacttttaaggccagagaatgcaagacctgcccttgtcttaagtttcccccatttgtacaccccttaaaacggcagacaaaatataattgtttaacacattttttaattgcctcattctgcagaataatttcaaaacctcttgtgaatctcctttctcagcatatccactaagcagtgcattccacgatacagcattctgctcgggcatgcaaaagaacacactatctgcaagttccattgcaccacattttgtataaaggtcaacaagtgaggatcctacaaacaaatccgagaaatatccagctttaagagattcagaatgcaattgtttcccgaaatctaattctaagcaaagagagcaagctttcaaaccagtggccaaagtgaactcatttggtcttatgccatccttcttcatctcggataacagaagaacaccatcaattccatacccttcagctacagacccctgtatcaaagcagtccaagacacaacatctcgctctggcatttcagcaaacacttgccgtgcatacaccctatccccacatttagcataaacattaaccaacgagatccatacatgagaatccgggtccatcccatatttgatcacctgcccatgaatcgccttgccatgattcaaagatccttttgaagcactcgtgcgtagcagcatagaaaaccttcttagtctctcatggctctcaaattttacagatctttttcttaccttcttctcacttctctctaaactatgccttgttccagttaaccttccaggttctctgcataacctttcttgaggctgacttggagagtttcgagcttcatttgtcaattcatttatggggttggattccaacaggctaagtgcagcactagcccaagactttaaccaaacaagggaaggtgaattcagagtcagaatgcgggtatggaagatgggcaacagcatcccttgaaaaccaggtgaaggcccaatcattttcggagcaaaaaattagaattccatgaacttgaacccagagcttcatctttgacagtttttgagcatcaaatgcatcaaatacagctacttccgttccctgtaacgtgtattatgggaaaagtttaaataaataaataccaagctagatattttgaaattgtggcaaccttccacagtttatatgcacacaaattatctcaaccttccacggtttatatgcacaaaacaaagtaaatacgtgtgtaaagcaacatcactgcattaaaaacaagagaaacaaaatctaaagtagctaacaaatgacaaaacaataccagctattgattaagatttaaaaaaaaatgacgaaagaaatgagaagcaactaaacatgaatgatgcacattatatactataaaagaaaggtttataaatgggatagtggagtctctcacttagtataaatgggatggctgcttgaataataaaaggttgtattcattatggcattatgtagatctaaatatatgttatatgatggccagtaataagtccatacgtccaaaaagaaatcatggccgagatctcaatctcttcttcttctttcactctttttcatatagtatatacatcatcatcatgctctagatttatactatgttttgtgatatactttccagagacaaatctctgttctagttacctagttttattaaagaaatttgttttagccagtaatgataattccaacaaattgaaaaccttatttgttttgacatattaaaagaacaagcagtaaattctagcatacaacaaagcattttctgaagtccattaaattcattgccgagaatcatcccattcgaaaacaagcttatatataaaaataaggcagccccatttacagtcttacagcatagaatcagcgaaggattttccaccgccatttgatgaacaattaacagattccatttcaggaaattttacatgaaaactaaaaccataattttcaaaatatttttatatatataaatatacacattcaaatcagattttagagataccttatgttgtggctgatggcagaggagaggtaaatctggagttgggagtacgaccaggcgcacagctaggaggggactgaagagagatggagatgccctaacaaggaaacactcaaaattcaatacaagcacactactcattccatgaacacaatcagaattcaaataaaaaatatacttcttgaaacacatacataaaagcttagaaatcccaaaagccaacaaagatacccttctttaatataagtacaagaaaattgttttatacacatatgaactagaaataagtgcaggaagaattaactatcaattactcacagagtcattttatcaaacatcatatatgtcaaatagacagtatcataatcatattgcaaatattactaaaggttgaacctgaaacatgctttctcttattaagaaacatcaaatatgtaataaccctactcagaaagagagggggaataaaaggcacatgactcgatgaacgtgagaaaagaaaggaaagggattgtgagtgactgaagataaatgaaggcaagagtgagctgccagcgtgagtatgagagaagcaagatacctacaacgatgtcagcgtgtgtgtggtgggaacggagtacggcggcggatggaggtggtagaccggcaatgtcgcacgaggttcttactatcgtcgtcgtcggctgatggagggaaagaggagaaacgtgtttggaatgcaagaaagcgttggaaaatcgaatatcgttatcagttttgtaatttaaaactaggaaaccaatttggattgagttttgaaaaatgaaaaacgttttttttagggataattgcggcaaaagtcctcaaaaacttgaggttgatgccgattagtc

SEQ ID NO: 295724 - DNA, 7190 bp, Cannabis indica
tctctctctctctctcttaacctcattttatgaaggaaagttaataattaatgatgctttaatggtcgtcaatcgtctcataaaatgttattacgacaaaaaaaaaatgcttaatgatggtttttcgcaatgacttagtgatggtcatataaaaactttagttaaggctaaaagaaatggtttctgatggtttagtgagtcacataaaaatgtgtagtttaggcaaaataacgatgcttaacgatattttgcaatggtttgcgatagtttgcgataaaatttcataaaaacttttgtgattgcataaacttttattcgattgttagtaatagctaatttatttacattaagttttttacatttttaaaatgagtagtgtgtaaacctaaatttgttgccccaaacggatagatgtggaaatttgttgttatacattccaaatttgatgttctaatgtgtagatttcaaaaagcaataataataattaaaaaaaaaccacttaaaaccaatcgattgaaaagtatgccttaccaaacttcttttttgggtgggagggtggaggttcaaaatcacgttccatgagatcatttgtaaaaccatcatattttttttttaccaaaaatcaacctttcattggataattactgaactattgttaagcattgattaagaatttttctttccttaaaaattttgcatatttgaaagaaaaataaaagttattcaaaaccaataaatcatgcacatatatgtttaaatgaaaccctataaattagtgttttcagtcagggacggacccattcacattaatgtgggggctatagcccccactaacaaaaatactgccttttaaaaaattaaatgtaaattttttaattaataataattataaacaaaatagtagaaaaactcccataaaatcacataaaattagataagagtgataataagagtaattatataaatagttatttttttatgataaataagtccccacaaagtaaaagttttgagtccgtcactcttttcagtaaatgggtttaaattttggatttgatttattaaaagcatagaacacggtcagcggtgagtggaggtagtgttagtgatagttggcagagcgggtggtcagtgttcgatgtccgaaagtaacaagagattctaagatcagctccagtgggagtagtctaagagttgctcactcacaaagtgggtccttgtttgatcttcataacaatgccctaatgaagtagtcggcatctgagttccacctaaaaaattgagtgagacatagcaaaaagatagagaaactgaaactaaaaaaacgcatgaaacatcaagttttcctaataacaaatgtgatcctcaattctcaaaataaaattatgtgtcccattgtggtttgatttggaagaggaagcagttggaatgtgcacatatctatatacatatataaatatgagaattgttaaaaggtaccattgatgcttaatatttttttcggtattatattgttattggtgtaattaagtatcgagtcttatataacttaagaaattaatttttaagaaatatcgctaaccaatcataaaacgccacctataaaaagtattggactccactagtacccaataataatactctataaatatatatatttagtgaggtctccatttgtgtggtggtattagtatttccattgtggtggcgtgtattttaacagttgtaatacaagttgttcacattgtcaatgtgttgtctataacattgtcacctgttgtttatagtgtactaatattgaaaataaaataaaaaagaaaagtgatgttgagatcctttcttgtaggggccaggacaagggcatgtgtagtttaagtctcatttttcatagccttattacatacaaagttactaacattcacattaaactaaccaactggcaactctcgtaatcctaaactaaactattttcatcttcacacgagatcctatgcaccacctactcaaaattctaatcccgaggggtccatcgttttctgatctcagtagaataaggtggttcattcacacaaaagtcagtttgttgagtgagctacaatcaatccaatatgtaaactaagtaataaagaaaagaccacacacattgtaacaataataagcaaaaacttattcgacaattaatgaataaacaagtaagacgatggagagctctctcagatttagattggagtttttacatgacacaattgctctctcagtctcagctaaattacggtggagaaagaaagaacaatgaataaattaataatactctttcaaatgtgaaaaatccccaattcaaaagaagaaattttgtgtgcaccaaaatacaaagatgacgaagtagcagtagtagtagagcaaacacctcccaccacatgagtagtaattgatgatgatgataataataccacctccctgtattgaaatttcatttggtataatatattattatactttggaatcacccaattgaacatcttttacagactccattccttctttcaacagtctgatttcctcttctgtcatgctatttttcacacttgttaaggccttggaattggcttgtttctctagctccacagcccaactgtagattatcatcccaaccactgcaagagccatccccatgatgttcttgaaagtcagctctgaatcgaacagcagccaccctaatgtgagcacgcacaccgttttcatgtggcctaaaacctggaaggagacggccgagaaccgtcctatgcagaggtactgactcatgttgcagaacacggctagggagcacgaaagaagaatgaatagctgcacatacatgacatcaaacatataggattcaatcatttcatcacccttaatcttatgaaactactaataacaaacaaacacagacagagacaaaggaaattgcttacaatggcaccagaagacatcttgtagcttgttattaatttcccactgaggaaataatcaatgaatgggccaagaacaaggagagacagagcttgaattggagccgtcttgctcagcagttcaaaagatccaattgagtacttcttttgaagggaaccaatggtctgtttatatcaaaatcaagtattaacaacaagtagacataatagttaaattgagtcaaacaacctctgtttctaaacgtgaattggtctttttaaatcaaaacctagggtttgttcttctatctagtgaaatcaactagcaccaatctcaatcccaatttctttctattatagagaataacaagtaaaagaggttaactcacaatttgctgcaacgaggttgagagaacagctacgcaagcacagatgaagcctttgagattgactttgacatcagtgacagtacaaacaccaacgccaataaccacaacgattacagctagcttaacctctctcgagtagtgcttgctgtgaataatccactccatcacgcacaccaccggaatcatgctcagcttcgaaatctatgtgggaaacagaattatcagccaacgaagaacacaaatcaaatctgaactatacatcgaagaaggaggttaggtacctggtaaaacccgactgagttaagcatcaggctgaagttcatgccagtgatggacatgtttgcaacaatggagaaccagagaagctcccagagaggtacgtgtttggatgcagaataaccggtagcattagagaccagaccgacaatagcagtgacggcgaaatgaaatccagttagagtggtggctgtgaaattaaaattcgttaatagattagattagatccgtgaaaaagaagataagaatatgaatacatttttaaatataccgaaagtgaaagcgtagccagaagaggacatgagctgcttgttagccatgattattccaacggagctgacgacgttcatggcccaagctccaacatctgaaactgcggccacagatttcttttctgtgggctccatcattgccttctctgccttcatccttgccgttcggaatggaaatgaagaaatcagaccagatcggatcggatctgatcagatcagatccaatatggagagagaatttgaatttgaattctgaaactgttgagttttgaggcgctattgtgtggctttacccacccacccactcaccacgccacactcacgcctgttcccgtagctaagctaagctaagcctcttctcttcttcttcttctacaccaacaatttcctctctctttctctctctctctctacaaattctatattatgtgtctttatatacaatagaaaatatcgtcatctccattcattctcttttcggtcaatttctttccttttcaacttcactaattttaaaatacatgttaattatgatttttgtcctcaatttttaaatatttactaaattatatttttaaaattgttaaagtgttaagtttttatttgaattattaaaattgttggatttaaaattttttatccaaaaaatttaacataaattaaagttcaggtattatttggtacatattaaaatctgaagagtataatttagtacatagataatcactaaattagtaaagttgattaaaattgaacaaaaattcttgaataccataagagaatttttaacggctaaaaaaataaataggatctctaaattacactttctaaatgtatattttagtaaatcccctgtctattactttaatcaagagaatttatatatagtataattattttggtgaaaatttattaatagccccaacatattacattgtgaaaaaaaaaattataaataccgaaataaataaaaaaaccttttagagaatctactgaaaaaaatattaaaaataaatattaaaagaaggggaggagacagagagagagggatttaagatggagggtcagttttcatccaacacaagatgaggaaagtgaaatgaaatctcgttccatctcgaccgttggatgggtttggtttcgtcccatttgggccagctagcattacaataattatcttatttaatcacttcacttcactttaataattacagtaacaatattgttagttaattaattaatttaaattagcttacggacggacaacgaacccttattaatggaagtcaccggatgtgtcttcctcttttagtttattaatgtaattattattattattattattggataatgtttcactacagctattaaaatggagagtttatttttctttaatttgcatcattgattcattttatatgttatttttttttatttattattctttttaaaaaattaatttttaaaaatactatcatatagaggtgtacaataacttttttttttacattattctttaacttacaacttctgagtctttcaacctctaattttctttaaaaaaatatcaaaacctttagttttgattacaattttagattctttgaggaacaatttttaaaagaaaaaaatgaaaaaaaaaatagacaagtgtcaagaaaaataatagtatttctaataaatatttttataaacaaataaataaaaaagcaacattaaatacaaacataaaataaaataataataaatattaaaaaatcgattctaggtaaattcgttttaatatatctactaaagcattatttattattattattatttagaatatttgcgatgaaattctcttataataaaaaaattaacgacaaaaatattttatattacaattttattgcagacgtatttttttttagctattaagtgtcaactcagaaacacgtgacaaaatattattggactatgtattaaataaataaaaaaaatatatcgtcttatgtttttgagctcagacttatagtttaattggtatttaacaactaaaaaaaagtacgactgtaataaaatcgtaaaataagatagtaaaaattgctactttttctaattaaaatcatatctgtaacaaatacaaatataaagagttttgttgtaaatatcccatattattataatgtttatgtgattgaccctctcacatcaccaccagacttctaattaatatttcgcaggaacatatattgcattacatatatgcttctccaaatttattgacaattttcttatatacatttaattttaggaaatttatgatatttaaattaattataaagaaaactataaaaaatttatacataaatactagtgtcatgtcagtagacatcatataaattgttgattaagattttggacaatttattaatgaaataagatgcttataaaaattaagagtagttaaacattataattacttagtttaggtcttaaaataaccctaatctaggaatcattgtattacattcctcataatttcagtagtatttttcttaaaaactgaaaattcgaattcatgtacaatgtgtgcatggtatttgcatgtgggactgggtaaagtttctctcgagcttaaataaccaaggtctcaatattgatgaagtttttctctatgcttcaacggttgtcgacactatctagcgggttcagaatgacaatgtttataataacaaactagataatgttaaccaatgtattgtttctattgctatgtcttatgcagattactgcgcctctcttctcctctcgcctacccctgctgtgtcggatgcttggctccctccaccctaggagtggctcaaacttaattgtgatgttaaagttgggctgtatagcatgtgcattgcagtcgtggctatgaaccatctgggcgaggtgatctaggtgcaaactaaactattggattttgctgacgctctgtgtggggaagcagggacctgttgtttggctttggaagtcgccaaagataaaagccaccagtttatgattgtggagtgcgattccaaggttgtggtcaatacactcaacggaaaggagacttgttggaggcttcagaactttacctaattttgtaaaaggccttttcctctttttgtgagttgtattctaaataatattagtagatcctgtaatttcgcggcccataatgtggctaagttagcgtttacccacaaacagtttggttggcttcttgtttcctccattccgtcggaactattttgtatgaccacgaggtctaatttctttttatatatgcacgcttatttaaaaaaaaa

SEQ ID NO: 295725 - DNA, 4845 bp, Cannabis indica
ttttttttttttttttccttaatcacacaacatttattaaattaccaaaactctcagtccatgttgaaaacaatttgaatacccaaaacgatagtgttttataaagatgaaaatataaacatctaatacacatcaagaatgacctatctccatcatattctaaatttcattacatccataaatgtaaaagaagaaaaggaactccaatacaaaatattaaaaaaggagctacttttggatgttatatattagaaataagattaattaggatttttgcccccttaattttaatatgtaccaaatcatgttttttgaacttttcagaccgttaaaaactccctgaactattgagattgttagatttaagaatttttgtctaatttcatttaattttactatttcagtgattgtttatgtactaaatcatggtctatcaattttgatatctaccaaataattcctcttgaattttaacatatactaaatcatgctccttaaactttcattcaattagaattttttactaaaatttgacaaaaacccttaaattcaataatctcaatagttcagggagtatttttaacgacctaacaagtttagtggacataatttagtacatgttaaagctcaggagataaaaattataattagcctaaaattaataatgttgatataaaacacgctaatcaataatcattatcaagtggatattatatagctaagaaatttattaatattgatgtaaaagatattaattgattaattatcaggtggatgttgatccataaatctatccacctaagcatcaattacccagtaatcggttcataaggttacttattacattgtcaatataaaaacttaaatcagaaaacaaatacaatttccaaacatgcatgccttccctctctgttgataaattatttaaatttcagttagccaagtcactatcaaatcatttaagagaagaaagaaacatccaaacatttgcctagaaacagcacaaagtatcccaaatacaaaaaaaaaaaaaaatgttgactttagattgatgggtaactttttgtacatgggggagttgaatggcttgaggggcatatcataccagtaagtaattacacaagctagaacaagatgttattgttcttcttcttcaactccacaggggcccatgcctgctgcaactgcaagaaactttatttacagcagacctatattaagtagaaggtctcttcttgtacttgttctgaactaagcttagcagaaaatctgtaaatatgtgctcataatctggcattttcccataacctgcatttttattattaaaaaaaaaaacaaatggtttgtttaagcaccttgcattcactcattcaaaagagtcaaaagttagatgccgaaatggttactttataaaacaattattttcgagaacacagcagaatctaaagaaaagtctgtatacttgcctggaaaatagttgatgtctattacataaaagacatctctggtcccatgctgtcggatcatatctatattgaacaaccggagaccctgacaaaattatatgatatacgattaagacataggaagatacaaaattcatttgttgctaaagttattttacataaactagtgagtgattagtatttaccagtcgtcgacgaagctctttagcaagcctctcgagtagaggtcgaggaggaagttctgcaataatacatttcacattaattcaagggaagaactttgcaatttcatcattagattctctgaagactgctaattatcttagtgtgcaaaccttatcacactactacacaatattaatcagaacggaaaaagatctggttacttaacatggattcctcaatagtcaattatgttatatcacatctctggtgagttatttagaccatttaaccaaaaaaaataaataaatatgtatactcaccagcaatactaggctccaaatctgcctcgtctgcggtagctgctgcacatgaaactctagggaatcgaaacaggccagtaacatcggccagttcatgtttagtaacatcgggtaaagagaaacgtctaaccacctttatagcatcaccaacaatatatattttaaagactacaccccctacaataaggaacactgttatataagtatcgatataaacattaaatggaactaaatatgtttccccatcagtaacagcattataccatgattcacaaactcctgaaggaccaagggaggttcaagttctgagagacagaattgatcgtatgctaggaataattcgtgagatttggcactgccatccacaagtaggggctttgcaactttatggaaaccacaaaaacatgtcagaatcgacagacagttaatggatttgcacagagatcaaaatccagaaaactaggttattagtgtcgggcatagagaacattacagcattaggcgacacaaacccaaatgtttcaacttacaagaataaaggaaaatactcaaggtaaagagcagaaaaatctacacaaaaacataacagccatacccaaaggtaaattcagcccagctttagtaacttcataaggtattgacaacggatcttcagtgataaccaattgcttggggatgcccaccttgcctgcataatagttaaattagaagcataatcaaaggatacgtcaccaattcaaaacatgtactttcatcaactatcttcagttacaggtaagaaaatatttaagcaggatctttaaaattcataaatagaacataccatggtagtcagacaactctagatctaccacatcctgaagcatggactgacgattatgtagatgctgtatggcctttggagaatcaagaacagttacttctggatgcttttgcctgtaatccttcaatgatggaaagaaaagtcacaaaaagatgtcaacaacaaacaaaattataccgcaattagtatttattttatgaaaacaagtaaaccatagagggaaaaaaaagatagttaaacctatcatactaatctgcaatatacatgtccataataatggggatgcttcttaaataatacagcaaacctatgaaaggaccctaatattttaattgaagacttgcacacatttaaaatccatcatctcaaagaatgcaaggaacaaacgtgtgtatgaagcaccaaaattttactcatgtttatagaaatcataccaaagaatcctatagtggcaacaaacacagatatatcaatgacgcaaaaatcacagatatcaaacacatatatcaaccctccataattaaactcaactagccaaataaaccctgtaaattcaaacaagacaaatcctacaaggtatgcatgacatctctttgcaaccaagctcgccaacacctagagaagttatctatattgcttgcagaagtaaatcctcacttgttcaatacttgggactgaattctacaatctggtcaagattcatgatgatgagagcaaaaactctgcaaattatgtcagacaaaaataagttttaagggtcaggagattggctttacaaccaattacgaattaccggcagttcacacttagtccacaccattactataacggcatattatccttttatactatcataaattgtatagcaagaaaatgcagcacacacatttgtaaccaactacagtttaaataagagatgcacaaatatcataggaccaagaatcgactaacctcaattacatcgctccattcttttcctaacaactagaagaaaaacaaaaagtgtcaaaggtttaatcaaataaaaattatacagtgaaagaacaaaaatctttatagacaaaaagagactcaaaaagtgatcatggccaatctaaaagagtaatcaaaccttaccttatgcagaagaacatcaaagggaccttgatccgatagtggcttgtttagatcaatagcaacaaagaatatccccttacttctgcattgatagaaaacaatctctacagtcacatatctaaattagtggcatacaagatgggattcttttcacaaacttctactagtttgtacatcgtataaaattagaagacattcaatgcaaatggaatggtcctgctgatatttgaaaactattatcaatactacaacataaatatgaattccagtcatatatttgacaatacaaattcatttctgaataatttttctgttatcttatcagcagctgatctgactaaaaaaagtgtaggaaataataataatataatagttacttaagtaagagggcacatgggcactgaaaacacaaacaatcatcccaaaattactagatggtaatccagtaaaataaaatagataagaaagttacgcaataatcccaagtataagcttgtcaatcgtgttcttagtaagataacaggggtcaaagttaggactagttccaaaaaataaaaataaaaaacgcatcaccaaaagaattgacttttggttccaaatagtaggcaagtaggttaatcaatatggtatatattatagaatattcctatttagaaaattttgaaggtaaagaagattctatacacccacaaagctaaccaaatatgcctcatgatctatgtttagaaagtaatcggttaataggtgaaacatgtttaaccacaatagacaaagatgcccatatccccaaaacccaccatcaccacttcaaagaagccgcttttttggccacaaagaaaaacacaacacaaaacaaatgaaactacaaaacaagaccaaaagctctcaccaaccatatatggaaacttaggtaaaaaaaaaaaaatagaaaaaccaaaaaaaaaaaaaaaacaga

SEQ ID NO: 295726 - DNA, 1636 bp, Cannabis indica
taactcatagcaagaaaacttacaaaataattatgtatatatgaagagaatgtatgtaaatatcgattgatgtttcgataaattcgatcaagcaacaatcttacatttgagaagacatataagatcgattagaaaatctccacagccagaaaagggacttattaattggcgcatgtggattatttatttttcctcttttctctaatataatttgaatattcttgaagaagttttaatttcttactagatagattggttaatttgaaattggttaaatgttaatggatattctattggggaaataaaaagttggtttaattcttttatatgtacttactgtattataaacttaatgaaaataaaaaattaccaaaaatatgaacaattagaaaccaatgagcagccctattggtcattgtattgcactcttaatttcacaccatcattacataaaaaccaagcacaaaaccaaaaatccctaatatccctactcttgttctttggttactgcatgggatagtgttttgattattgaacttcacctatttcagtaagatgaccaattaattatagggcttgctcatgtcttgttaaaaactaaactgttcccataaaagataatttttgttccacacaggaattaacccaagattaatggggttttgggttgattcttgaaacttatgaattatgttctgcttattattataggatgaaaaaaaggacagagacaatccaagtgccaaatatcttcactcataagaaatactactactacaaaaagcaacaaaaactaaaagatatgccaaaatgattgattgataatgattatcaaaagatgccagagagaagatttgcagctgcagagatggcagctccggttatggcacattgaaccacttgctcatgtgaagactcctccgccgtaagtgccaaagccaccccggtcagtgctcctgcaactgcactgtttttctacaccaaaattccataaccaaaacaaacattaatcattctaattatgcatagtaattagtacctaatgcatattgtttatgttttagactctaacccaatcatgagctccacgagcttcagatagtccataggtcagacctgaatacactccagcagccagtcctgccattgatacaccaattaatacaaattcaagtaattaagaagatcatgctcgtgactgactcaccccattgtaatgattcttttcctgtgcccttcacctgataagacaattcattattgttaatacaaaattatgaattggtaaacatggcatgtatttatacagagaactcaccatggcttcaatagaacttctgtttgtttcacctgaggaaatcaacaagagttacattatctaccaaagtgttgattaagaagagaatggaagaaatgaaactaacctctgaggtttgggaatcgactctttttggcagctgatgatgagacatctgaagtaataccacccacactactcctagaagatgatgaatcaagtcctgcatttatttactcacaaaacatactaattaacaccttacttatatatatatatatgttgtttatttcagtccttaataaaaccaattaagtaaaaggaatgatgacatggcaa

SEQ ID NO: 295727 - DNA, 11629 bp, Cannabis indica
aatttgctcaagatgaatataaatgctgcttccaatttcgatgacaaaaaattgggaatcggagctgtggtacgcaataacaaaggagttgtaatgctgccttttcaaagcgagtccaaggtgtttcagaagtgatgaaatgaaagcaaaggcactcttccacagtctgaattaggctacacaactacaaaggcaaatatcctatgtggaaacagacgccctaagagtttcctctgctttaaattctccacgtggagatttatcttgttttgctgatttaattgatgatgttcgttgtcttttatcctctttccctgaagttactgttactcatgctcgtaggcaagctaaccaagctgcccatggcttagcaaagtacgttctagagttgaatgaagatgtatcttggataagtgaaataccttatcctattttctctattattgtaaatgattgttaatttataataatatggaaaatttctcaaaaaaaaaaaatcacataaaaaataacttccatatttttgttaaaaccccttgatgaaataagaggcttaaaagtttgaaaacagtaacgtgattttgtaaagaacaccgttaatttaaagaaaatggcctcctatttggctacataatttcagttgttcatgtaaactttcttggacatcgacaatagacgatatatatggtttggagcctttattctcaagcagcactaatgaaagtaattttctttcagcagttcatctgggaaaattacaagactgtcacagtggaccgtggtatacacattgtacggtaattactaattcccttattaaaagtagctgaatttactgatacataaaaactagttatgttatttatggtgatcagaaagggcacctgcatgcttctatcccccatgtcttttcagcatactcctggattgttctgtcgctgctaaatcttcccgatccagcagcgctaaggatgctcatctcggtccacttatcttgatccacaaatgctttatcggcagcagcctgtgcccatatactcttcagtcagtttccgtacacaatgttttggtatatagaaaataaatttccccccaaaaaaaaaacaagaattacctgtgcctctagatagcttccaaaatcagaaccaaggagatagaagtccttatcagcctcgacagtatcacatagtgactcaaaatagtcttgaaagccaaaataaccatctcgaatcatcctacatttagaacgtacaacaatatgtcaaaatagtcttgcatcaaaatgttaatacgggacactatcattgttacatttaaattattatttggccttccaaaaacagccaggacaatttttcctttgaacaaattttatcgtcagctcgactatttgacaaagatgtggcaagcatttgttgggatattcatgatcaggtaataataaactggcagaaaaaaattaggaaaagaaaaatagaaactaccttacaacccgtgcaaattgcagattcactttcatgttaggtcccctctcacgcagagtgggaacttcatccagctttgcgccaaacaaaaactagaaaaagaaatagaaaactgtactcagaaatctgccctcacacaaccaataatgggtgaaccatagacagaaaacgcaatcacactgtatacaaaaataagcagacatcatgcttagcactaacaccaaccatcttgtaaaaactattaaatatttatgaataaatttttctccgctcaacccatgataccatacttttgattataaaaagggaattcaaaataacaacattagtaccagattttctgacccaatttcttcaataatttcaactgttgaaccatcagctgtagctaaaagtagacatccattcataagaaatttcatgctaccagttcctgaggcctcatgccctgcagtgctgcatagaaacggtcatgctcacacaaagtacataggctcttagataaaataaagaaaattgctaaagagcaccaatggtgctcaacaataccatgagatgtcatatcactatttgtgcaagttaacatcagatcccacatattttaattacataactattatagaaaatagttaaccaattgtaaagtgtcacctcatggtaatattggtcattagtagtaccaaaaagcaatgctctactccctaattccttagaagccccttcactaatcattagtgaaacttcaacccacgaccaaagaaaccatttccactacaggataacctgtgacccggcctaaaggctttggatggtttcctgaatatagaattagcattttctagaatataggtttttcaagcaccactcatgattgaagcatttagcattctggggaaatttaactcaacatttgggaaaactgaaagagcatttttctattccaggtggaagtgggagctaatgtttaaaatgggccgggttactcttctgagtttgttggttttaccacaaaagtgactctttacttgaggaaaaattagaaggaaaataaaaccaaccaataaaataactatcaatttcaaattattaaaaagatattgtacaataaacactaggatccagcatatctactttcaaaataacacacctcaagtgctgtgaaaggtcagcccctggtatcaccaactcagcaacagatacattgtaatcaggtataaaaacctgaaattataaataaacttttagcaacaaaaagaatgacagcatagtagcacggctcttctgctagtgcaattgaagtatactacatccaagcaagagtgaagaagctaagctatagcttagttatcctgtaataaacctcccataaggttcacttagaggaggaacaagaggaacaactaagcaagttgttttacttagctgagctgtattagtaggttgctatgtttctgttaggagttttattctgttaagagcagcagttagtttaggagtctaaataagtggatttgagttgagatttagactttggagaattagccatctcaaattagctactgttctattctttgtatgattagactctaatagggggttagggtttaagatataaagagagagttttctggtttgtgtgcaggtttcttggctgagttctatcaccctgacatcatactatgaaactaagagtttcacatgtgaaacttgtgagatttggcacatcattcaccccatgggcatgtctgccctaggaatacttataatcaaaagagaaaaggataagaaagaagtttctctttaccagctttaggagatctccaatatcactattattgtttattttgtctgcaacaacgtgacaaagtttgataatcttttttgctatctcatatcctggagcagctttccctccaattatgcagacacgaggaacaaccttcctcctgtcactctcattcatattctggaaagggaagagccaactatcagctacttactcaaaaatacttacaacattaaaaggaaagaggaaaaagaaaaaagaaaaagaaaaaaaaaagtgagagaagagaatacattagtatagaaatccaattaaatgcaccagttaaacttgtcataattgtttatatatgtgatcattactgacaaaacatttaattttgcaaatctcaaatggtattagaataatgcattccctattagcatgtagtgaaagaaggaaaaagaaagagatccatccaaactactgcggactactcattttgatagctgcagaaaaatgtgaccacttcaataacacttaataatgataggacgaaagaggcatgaaaagttgcaggaaataagtatgcatgagttgacgcagtaacaggatcttgtaattagtatattgtgccaaggtcaaattaagtcaccttgatacaatcatatctatggataatgccgagaatattaagcagctgtcgtttgtattcatgtattctcttgatctgtacatcaaacattgcgtctaaactcacctgcatttaaaataatatgccacaaatctcaagatatctgagcatcttttatgatagtatattaatagccgaaaaaattaaatgaagatatcattttgtccggaccttcaaaccactcagcacttcaatgtattctgcaagcctcattttattaaccctcctaacctacaatgtgaacagaacatgttaacacattactttttcatcaatgctcgtgatattggctagaaagtaccatcttccattcttgctgtagaactgcatctgtagcatattctcgaaggccagtcagaaggtcaacattgcgaatccaagcttccgttccaagccattttgtgataaggtcacaaagactgggattgcttactacaatccatcgtcgctgaccaaaaacaaagcaggtcaatacaagcaatcaatttttcctgtgtaatttcaatgagatgctttcaaccaatatgcaaaatgaaggtgcaatgcaccatttctacctgggttacaccatttgtcttgtactgaaatttctcaggccacagctcatagaagtccttttgagaaacagaggagtcaggtgattccattcattgttctaaaataattaatttgaacgataaactgacaatgatagtaaattacagtaccttgaacaccttggtctttaatactcaaaatgtacttttgaaacaccatttacagtatgtgaacaaacaattgataggtttgctgaccgaatgctctgtcaaattaaatggtaatcgattttaatgaacaatagatgtaaaaattaaaggtatatattaagaaataacagttaagcaatcagaatacaatctacaaaagagtgagacactctccattggagcacattcaccctcttctaatatggtatctcttttttagaaaattcaacaaaatcatgatactgtattttcctgacaagagaaaagcagataaatggagctggaatttctttttttttttatatatatataaaatgaacataaagaagatatgatgcagattttataacttattaataatattataattctctctatcaatctatctcacgcacacatcaatacaaaaagttcatataaatgaacaaaaatgcaccatgagttaataaatgtatgagctcatgttgtatgtgcaaataccttcacagcaccgtcttctacaattgacatacgagacagtcgactgtaatctaaacctaccttcttcttcaagtcttccataaatttgaaattaatgtcatatataatctgcaataaataaataaataagcttttggagcatctatatgaaaatgtattatttatgactcgttcgttttaaaatgttataaagcatctccaacctctagttaactttccacaatttcagtaaaagaaaaaaaaatctgccacaaatcaaattttgattcaagaaaagtataatgcaaaagtttattcaaaatcacaattgagtcatcctaaataattgcaagaagtggtcaagttttataaaaatgagaagagatattccaaatatcgcacttccaatggcgaggaagtagactgcccagtaaatcaacggggattttttcaagtccttctgccaatactgtgtgtgttgtgaatgagaagattttgcaaacaatgccccatgctctatcccaatccaaattctcttcatcaatgagaactctcatgatttcagctatggcaagtgatggatgagtatcattcaactgtagtgcaacctgaataagatggggaaacataaacttacaagcataacaaacaagacaaattcatagtaccataataatggaagaaaatccgtctaaatcccaaatccaaaatctaaaaggtaaatggatattgtgatcagtaaacagtacattttaagaaatatccagctgggcacaaataaatgtgtacaacaataacaggaaaaagaaaaccatcagaaggagcagagaaaaagaagctgcataacattccatggttgtcgagttcatatggttacagaaaaaaaaatacactaattatatagaaattagaaccttctgcggaaactcatcaaagttgtcgtgagcatctttgaatcttcgaatgatgtcctgtgtggatgctgagacaaagaaatattgttgcttcaatctaagttcctttccctgaacatttgaaaaattcaggataaaagtgaacaataagtaaaaaataaataaaaaaacatctatttctaaagaagaacaagaggtagatgaataaacctgatgagagcggtcatcaggatacaagacgctacttattgtttctgctttctgtcgatcgacaacagcatttatgtaatctccagtattataagactcctgcattaaatatatgtagaatagatcctttaattcaagggaaaaattaaagattctttaatacagggaaaataaaaatcctttaaaacctcaaatagaaatggaaaaacaaggaactactactctagttttggccctgaaggaaaaacaactaagcaaaacaaaacaaaaataaatatatatttatttacatgagccacatctattacacttattctagtaaactatattcgcctactaacccttaacaaaaaaaaaaaaaaaaaaaattacgcctactaacaaaaaaaggttaaagaaagtctaaagtaatagtaaatatacatcaataaatggatttaaatatatatatgtcattctatataagaggaattctagtttcatgcttcagttgcatattattgaactttcattgagttcttaccatatcataatgatcacttggtttagcagcccaaaggcgtagcgtaatcgtgttcctagttccatagccaggaataggattgtcataagctacagcttcaacctaagagaaacataaaccactgggatcatttaataaatatatttgtgattattaaatgatgttctctataacaaagacgaataaaaaccaaaggattaatatgtgaaagagtttataagcttacggtttctgcagggatccaaacccgactttttcttccgtccacaagttcctcttcgacagttccatagaactattcaaaacagataaataaaattagcaaaaagagcttaaatagtgattaatattaactattgatagagagtagttattgcaaaccttcactggatatgttacatgaactcgctctatctcccatggatttccaaaatttaaccagtagtcaggttgttcatgttggaaaccatccagaattagctggcgaaataaaccatattggtagcgaagtccataactatagacagataagattcaacaaattctttgatattgttatgaaaaagaaatggtgataagagaggatctaatttatttttgaaaattaattccgcttgtcaaagttagggaaaaaagaaatagcactaaaatatatttttactaaccaatcagaattgctcccagggtttataccatttcagtatcaccagcttagtaccctattatttagttaacttttaataccacgtgaatgataaatcaattcaaacaaaaaaaaaaccgtataaattaacatacatttatatgttttatcgaaaaataaaatacaatgtattgaagttctctcttttaaaggaagctatttaacacaccaacagataaaaggaggggcaagaaaataagagccagagctggtattttattttaattttcctattcagtaacctgatgaaatagaaaagcaacacataagtcatacccccatgcaggatagtccaaagttgctagagaatccaattggcaagctgaaagacgagcaagtccaccatttccaagggcagcatctccctccttgtataatgcagaaataacacatgaatatgaaatcaaaatcaccatggaccttaaagcaaaatagatcaaaatacaatagaacttgatcttatctagtgaagataaatgaagtgcttacaacaaaatttccaacctaagctactgcaggtatcttaagttttaatagttagcataatgtgtatgttgaatgtccttaattgtcatacatccatacatttgttttttcattaattagcttgtgatgaatgattccaatggcacatattattttataaaagatggcccagatattcttgaagcacgatggcaagtgcacatacagaagattgaccacacaacttttcacagtagagataaagaaacaagtgaaaaaccagttatcaaacaaacctgctctgcaaggacttctaattcaaagccaagttcgttcagagcctcagcatattcatcccggataccaaggttaataacactatttgacaaggacctacctgagatttcaaatagcagtagatgttttggcaggaaatccatcaaaaacaaagatagttttttatacacaagttcaatccactattaataatgatctctagaacaccgagataatacaggttgggagaaagaagtcatgtgcaagatgaaaatcatctatccactttccactataagatgacaattttgaagatatgtgttgaacaatgtcagcattacagtttataaacattgcatgccttacaactttcaagcaagtaatatatattacatgatgtttcactgtatttgagattataaaggaaaatataagcatcaaaattgatctgcctcagttgaaaggatgtaatacagaccaccctgaagaaaatcaatgactctttttaataattgtcaccaaaatgactatcctgtagttaaaagtcacgcgggtatgtaacttccatgaaattagcagaaaattcatataaagaaaaataaataatccatattacaataaattaaacgaaaatggacataaaaacaatgttgagagatttatgacttaaaccaggaggccactaccttcaccaaaaagtacatatatagaagaagagaaaaaacacataaatacccataagatactcgagtgagaggaagtatacgcgcttaggatcctccctcttgaagtggagttgagtatcatgccaacgctcgattaaccgatctctcacactatgcgacaaaccctgaaagcatcacacatttaagtaaattaatgatgatggcataacccttacaaattaacaagattcgtcttatcttcatccaaaaccttcctctgcaatctacaaatttaaagtccagctgaacatatctcattccagtacccctcaacaccatggaaaccaatcaatttatgaccaacatgtcgaaacaataagtctttcccgccaaaatcgaagagaacacaatttcacatttcccgcgcaaataacaaattgtgcagcataggaactgcaagaagtgtgtttgttcttttcttttccctttttttttcggtaacatattaatctgaaaagcttatagaagaaagcaatggccgcgaccgggatacctgatatgcttcaaaatcgtcgaaactaaagcgggacctagcgacagtgtactcaacgtgattaagaatatccttctgaagactcataggatcgttcttctgaaacccatccatcaaagcaaacatcctctccgccttggctttccgctccccggacaccaaccctgacgctggcctcctcacagtcacacccctcgtcgctgaacccaccacatcgccgtcgccaccatcgccgattgcatccatcagagcattcctaatcttctccaagctctcttcgtcgacaatcttatttccgtgcgagtcggtaacgaaaaacttcttaatgaagaattcgccctcaaattcaatgctggccttatcgatggacaggccaaggactttgaagaccctggtgataacctggagtagtccgatctggttacgcgcacggatgacgaagagagttgactcttcggaatcagcattctcaacggctatcgtctccgccgacttagtggaagccggttcgctggtggaggctcgcacaggcttggctccacgagaagcagcggcggcgttgtaaaaaatggagggtagtgaaaatggcttgttcggtagccttgaaactggagggagtgagaacttggattgatgagtaatggtgaataaaggtagtgatatggccgtcattgcagaatgcaaagcaatttcaacggggaattgatatgaatcagagaaacttcgagagtgtgggtatggagattaggaactaggtataggtaagcccatggaagtgggaagaagaagaaagtttgaacatgcgatcgttggagagaatcgagctgaagtttttggaagggtgggattttcgaaacatcgaagccattgatgaactgagcaattattccaagtgaacgacctcatttaagtctatggtggggggtctgttttactagaaggccacgggatatatatgagtctgagtactgcgagtagtgggcatcccaatcccatgatacaatctaatagtaattgaattttaaaagggttttttttagtggaaattacagcaaatatgggttttcaaaaatttattagttaaatatggcagttttaagtttccctaatttttatggcatttttttttttttttgagtttttattagttaaatatgggttttaggtaaatgattctttaaaatcccataaaatacaaggaatctgacttctctcttccccaacccaaaagctactttctatcgttctctctccaatcgactatattgtgccaagagactatcttcaaccaaaaagattttggctattcgtaattaggaaactaattcgggcttttcgcacggtgtttcaaaattattgtaatcttattgttaatttttttgtgcagaaaattaatgtataaaacttaatgtcacccacaccacatacacatttaaaaacatctaatatataatctcataagatttatatatattcaaatgttagaattataacgatcacaatattttaaatgtagattatttagttaccgtaaacttgatgtaaataactaagagaatcaaaatatgaatcaataaattctgaaatatgaatagaaatctattagtcaaaatcttgatatttttctaacttattttttcaaaggaccttcaaacttcttaagataagttatacgaattaaaaaaaaaataataaaaacaaaaaacaaatcttatactcactttaaattcttaacactatacaaacaactttcgtttaaaagatgctcaaacccaaaaactaaattatatcaaatcgttgtgtgcataaaattctcccgtaacaaataaatattttacatgaagtataaaacatcaaaaaaaaaaagcatttaatgtgaaaattatgtacccactaattacttcatcgttcttttttgtagtagactcccacactacagaatccatccttatcatttaataattatatttgccatttttcaagtcataaaaaaatatataatgacaaagtttaaattaatatcaaataacataactcaaaaattatttgcaaaaaagaagttcgagtgagtaataaaataaacatatataattgagaatgttgatattaacaaatcatactcaaaagagtgatataatagttattttgttataaaataatataaagtagatg

SEQ ID NO: 295728 - DNA, 3632 bp, Cannabis indica
ttattctattcttttgtttggttgcatattaaagtattgaaatgtcattctaatggaatgacctttgcaccattttagtagaaagactattccattttgaaatagaaagaaaaaccatttcaatacataatgagaaaaatttaataatttttttatgcattttaatattattcatttacattcctattcttattctcattctcattcctattcctacgttttcattactcccaactaaacgccactgacttacccaataatattttgtactcaaatgaaatatcatgaataaaaaaaacataaaatttattttattttctggaatgttattttgtctgaatcattacttcataatagatagaataaacaaaaataaagagatactgttaataatacatgcttacaacaactcatacataattacatatcagttttcaaaaaaaaaaaaactcaataatacatgtgagatttggtcaactgtgacaaactagtcgtgttactcgatgagtttgccctgcgaaactacttatcgtgtacatactcaaacataacataaagcatcaacaaatggtgaattggtttacaaaatttgaattatgtccgattaaagaagaaagacaaaaaaaatgaaataattagaggaattatgggtcgagataaggtaaccgagctctattctttatctttagtggttgcagaagaaccaaaaccctgcatggttctcttaaatgacagaaccaagtatgtataaatcacagttgttgccacaatagagaccccaatatagacacacacagttgcagcacacacataaagatacctgaaaaacaaagaaaataaaaagccctcacataagataagttcattcactctcaagtctcatcttatcaaagaaactcccctatcccccctcctttttcttaatgagattctcaggtgtgagtatcctatttcttcccagcaacaacaaaaataacattatgtcagagagacttactttggagagaaaacgctccacacaaagagatggttcctcattaatatcaatacaatggtgtacgacaccaacaaaatggagttcaagctcagtagaagtagacaagggaagcccagcaattttttcaggagtagtttggaatccatatttattggaagtgcaatatagttacagctcttaatcgagatgtacatcaccatgctaagagcggctagcattggggaggcgtaggtaatcataaacattaaaatcccagaaagtatagttgaatgacttgagatgccctgaggaaaaaaaaatgctaaaattagtaagataattagcttctgagataaaaatcattgcacagatcggaaattcaatgtggtttcttttttaaaaagaataatataggctgttcaaaatgaggatatacaataaaagctccagcaacatcaatggtggctaaagaattactgttccccaaagcataatggcccgccatccccatatagtaaaacactgcaacctagaacaaacaatacagcacaacattagtaccgagaaataaaatcaaataaatcaagtttcagtaaatattctaaacatatgagaaacctcttaaaaaaatttccatcattcaattttgagtaaataattgtctgacttttagtcatccatcaaacttgatgcttttattgtctggcctactggtaccagaaactagtttgaaatgcatagaaaaatatcatatttattcagaaggaagatgattctaaaactaacctcaacccagagcttgttatcttccccactgtgaaaacaataaagcatgccgactaaaacttgcaaaaacagcaataatataggcattgaattaattggttgttggagtaacaactgcagaaggcaccaagagcatatgtatgcccacccaatcacaaacgagcaatttctgaactccaccagcagaggcttgtaacaaagctcatcagggccagaagcagattcataggaaaatctatttgagaatgacttggaattcaaacaagatgatagccatggtaaagccacagtgataccaagtgtggcaaaaccgagaactgtatagattatttgtaccagcattgttgcagtatagctagatggtgcaaacatgctatcctgatgtttcataatatgttgcaaaaccaataacccaggagtcaaaaagcaaaatccaatcactgcaacagattttctatttaaatcaaatacagatagagaaaccaagcttaaggtaatgaatagaaggcctgcaactagctgaagtgctttaagtagatggtcacccccagcttgctcaagccacttggatatatcaggaagatccctccaattcacgcctccttgatgccagcctctcaagatcctaccagaaataagaagcaaaactatggacaatgtttgaaaaccaatatatttgttttttccactgaacaaattaaatatattctgtgccctttcaacttgtaaatactgtgctgatttacgcagtaataacaaaagcaatgtcgaactaacaaaatgccatatatattgctcttcctccaccatagaactcgatcccatacttactacaaggataaagataacaccaattgcaaaagcctcatctaaatgccatgcatgcatgatattactctcaaagtttgaaacgtatttcctttctctgccataaacttctttgcacattagacatagaaggctcagcaatattacacaagataggaccattgcagcaactccaaaaccaagcaagttgaaaggtttctgcatatcatacaacattatcagtattaaaaagaaagaatgagaaatttccattgttccatccaaacaagttgtcacttttcatctttcatgttacaaaaggaaagagttcaaagctgttagaaaagtacatacatcggtggctctgcgtgctaaccactcacttgcaattcttaaaaactcgttgtatgctccaacagcaatgttatactcatccccatggttaaacctatttccaatgatttacaatggaaagagagtacgaggatattagcagcatgcttcataaaatcttgtgttgtgattaatataataaacgctgtgacatacccacctcgatacatccttagacatccaggaattatggagaaattcagcagttgtatataagcaacaaaatttcgtctccaagctaccattgcacttacttattccagaggttttatcaattgattcatgatatgggaaaccttcacatgataaaccaggtagttgtgcttgcaataatctaagcaactgccatgaattcaactcaagtgcccttagcttttgatcatctatacaataaaaatgctattatctcacaagttcaataggatgtcagcatgctggcttcgaacttgaaaacaagacgcagaatttaaagaatgtgttaataaaacaatttgttaaggccaaactattcaaatgaaaaatgcagcaaaaactgtatactgacatcaatcttctatgtaaactactgtacccataaaaagagtcattaaacagataatcaatcttatgttattgtgtgtgtgtgtgtgtggagagagagagagagagagagagagagagagagagagag

SEQ ID NO: 295729 - DNA, 3343 bp, Cannabis indica
accaaatgccaccttagtgtttagtttagtctttagtaagctttagtaattggtttgaaactaaaatgctttctttttgggtttggtgtttgtgatattagttccaaggagtcatatagatgatgagtacgccaattcagcagaaaaggatcctagaattatgataactacatccaggaacccaagtgctccattaaaacagtttgcacaggttgactttttcatttttctttgtttttgttcatttgcattggttggtaccgatctattctgcaatgttatatcttatacttgaattgaatttgataagaattggtttgtttttccaggagttaagtcttgtgttccctaattcattacgaacaaatcgtggtggtcaggttcggaaatcttccccctcttagttttcatatattttagcaagagtactagttctcattaggataaattctcatgtattgttggcaatatgtttgatgatttcatcataatttttgctcatttcttgagtttgttttcctatttacttctcatgtattgttggcaatatgtttaaagattcgattaaggtgaaatgtaaataatcagtgattatgtaattgaggttacattacagccaaaattagtttgtgaggtttcggccatttgattattgagaaattgtttccatatgcaggttatttctgaaatgattgaatcctgtcgtcgtagggatttcacagatgttatattggtccatgagcatcgtggagtgccagatggcttaattataagtcatctgccttacgggccaactgcttatttccaattactcaatgtggtatgtactcaagtcagttatgttttatgagttgatcaaattgtgtaagacaaaatgatataggataaaagagcagaaaagaaattcagatattagcaaatttaaagttaaattgtgaagaaagtcttataaaagttcgatattgctaagagaatgaataagagatgtttactagtttgtttattctcttctaacgattttcggacattaattttcttttctcatttaggttacaagacatgacattaaggacaagaaaaccatgggaacaatgcctcaagcttatcctcatttgattcttaacaatttcacatctaaggtatcatcttttttctttttcctcgagatccagttgagttatgctgttgaagattttacactatgtttggtatagaggaaagaaaattggagtgaaagaaaattggagtgaaagaaaatatgaaagagatagaaaattggagagataggaaagagagtatatttctttcatagttgtttgtcatgtaagaaggaaagaaaatagagttattctaaattactatttacgcttaggtcatcaatataaattttgggtagtaaataataatttagtaatttcacattcctatacaattatagaacttttcctttctcttttcctcccattttcacttttatcatattttctttcctaccaaacatctcattttttgtattctctccacctttctcttctacaatttatttcctcccacgtttcttccataccaaagatagtgtcgtatcccgtatattaacttattattattgttattgctgaaatactaacatgtttttcggttggtaaactttttataggtcggtgaaagggcagcgaatattttgaagcatctctttccttctccaaagcctgaaacgaaacgcataattactttcgctaatgagtctgactatatttcgtttaggtttgttctatcacataatccgatgttatgtggatcttgttgttgcctaatgtcacattcccaaccaagttaactaacccaaataacattattataggcatcatatatatgagaggcaggcaggtccaaagtctgttgagctcaaagagatcggtcctcggtttgagttgcggcttttccaggtaattaagatgctttaagaacaacagttcaccgtggctcacacaatctaaatagttgttaaaatgttcataaatattcatactttcggtcaaaagatttcgggaatgctaaaatgatgtagacttgtatgcatgatgtgtttgtattatattgcatcttggatgatggaatctgaactacatatcttccctagaactggaatttaagacaagtataatttacagccttacatgttctctaatgtataatttattttattggggttttgtgtttggtttttgcagataaagttaggaacagttgatcaaagtgaagcagagattgaatgggttattagaccttatatgaatacatcaaagaagaggaagttccttggggattaattaagactaactgcatcgaatttactctacagatcatatttttggtttgttcaaatttcctcaaatgtattcttttacataatcaacatgttatgatgttttcctatgccattctataatgtagaaattttgatagtaagatcttaatattgagctttgttttgcataccacaaatatccatcttattaatgaatcccaagtctgattttgaccacttttaagtacaaaatttagtatcaaataatctaatgatatcaagcaatcaccattcaaggtaccaatctttaacttttcaattcacaaaattttaagctctaaagttgaagtgtacaaccattcttctagcacaacctataaattctatttaaatctcactatctcaagagaaagtatgacctataataccaagagaatttccagagttctccatagctatcaaagaacaaatcccaagtgggttcaagagaaaaacataacaaatagtatgaacaacttgctacaaaaagaacaaagggaaatcaccctatacaaacagagtactcactgggcctgcttgaaatttagtgggtcataggaaaaaataatatttttgagtctttaaaattagtaaaaaaatatgtaattttaaaaaataaatatttttttgggttccttaggctaagtgagtcctagacacatgcatgagagggcttggtactgagccacacaaagtattccatatccttatataaagaagagtaatttgcggcataaatatgtaagtttaacttctagttgcaaataaatacataagtttaatttttagcggtaataatacctaagttataattttagaacttttataagtacctgactgttaagtgaagtaaatttccacgtggtaatttttaattggtccaagtcattaaatttttatttttttaaaaaaattaatttaaatatactaataagaaaatgacacgcggacaatgacttagcatttaactgtcaggtacctacagagttccaaaaa

SEQ ID NO: 295730 - DNA, 2651 bp, Cannabis indica
aaaaaaaaaaaaaagaatgagagctttctgaatgagaactttgggctctcaatgaaagcgccaaaatattgaccataaatttagccaactgacgcggagtctaactaggattggatttatcttatgactatcacgctagattgataataaatataaagacacagacattgatagaggttcgacccctttgttcaagtaatgacctactcccctttttgttgtattctctcttgagataataccaagcatattacagtctgaaaccttgtaatatttagctatggatatctatagtattacaatgagaatgtattttgaaggtgagaagtacgagaaaagagagaattcattgccttagtgctttagatatttttcatgaatcagaatgtcctcttcttcatgaagggttatgaacctttatatggtattaggttttacaaggtttcttatttgaaaatacataaaatatgggaaatattcctaaagaatagagtcgttacatttttgcgttgaatccctagaattgtgggcagtttgaactgttccaaagttgcaaaagtgctgaggatgatttggaaagcttttgagaaacacacaagtattggagcgtaccctatatgcttggctgaccaactttattgaaaggtttcccggtggatgaagcttgtccaccctggctggccagctatatgtttggccaggatctgtcagtgtttgtacatccttatctttacaggtgactttaatatcaggataaacttgcttgtgtccatcgtgcagacaagtgatcttacaggttggaaggttgaacgacattaccctggccggttagtgttgacctatcttcaatgtgtcttttggtttttgctacgtggaggtgccatgtcaggtggacaaaatttgagataacaaaattaatcatgtttttcgataaatcctttgattagcaaaggtgtgcacattaattaagaaattaatgtagcacgcttagactagtagggcattgtaatttggtattatagctgccagtaattctccaaagaccgtcaagatatgtacagtcattattagagataagctcaactcatggtttggcaagcttctacgtattttagtagttttatttgttacgcatggttagaaaagcatgatagaaagcattttagcagatccatagctgaatagaagtatgttaagatcccatgtaagcggtaagtagattacaaattagtttgctgcctaactgagcaaactcatgaatttacagacttgtcctatatatggatccctagtgaaatacaagatgttgggatgatgtaattgagactggtggcggttggagagattgggatcccccttattctcaaggctgagttaaaggccgagaaaagacttatggaggtggttatgaaaatacactacaggctctgctagatttggagcaaaggttcgtggaaatggaagctagaatacaatagctagaggaaaagattgagaggttgaggaaacatggatctcctgttgtgccttaaccccaagtaccagttattttagctcaagagttgccagtaaaataattaattactggtaaccaaatgggtacattctatgggagattttggatgcaaagaccattggttatcttggaagatcaagatatgatgaatgcttttaaaaatcaagagtgttacaaagtttgctcaagagtcccgagggactttagttgttggtgaggtcactgctccccttactttcaatcttaataaaggtggtgttggttccttggataatcagaagaggaaagctccatctacattaatgggatagagttagaaaaagaggtttcgtaggaaaacaggtgagggttgccttggacgtcactatacttatccagagtacccccgatgtaagaagcatcatccgggagagtgtaacaacatttttccaatgcagtctagtagggcagatcaagagggaatgcccacagctgaagaaggaagaactaaaataggaggtaaaacccattccagcttgggtgtttgccactacctaagccaatgctgaagcttgtccttcagtggtgtcatgttagcttttattcaactactctatttactctttgttatttgattctagagctacacattcatatgtgggagccagggtgattgataaattgattacgccttgaaatagttatgaaataaggtttgaaaccctgatacctagcgaataattacttatctccaaaaggtggattaagtatgtgccgattagagtggaggatagggagttgagtgctgatcttgtagaattgggtatagtagagttcgatgtcatattcagaaaggacttactatttaagtaagtcgttaatgttgactgcaagaggaagatggtaacttttcaacctgagagtgaagaactattcgtgggtgtgggatacgttttgaattcctaaattctatttatctcggtgttaaaagatagagacctattgtgggatagatgcataggactgttgggttttgtgccctaaataaaacccatttcaatataattagatttactaattaataaagatcagaaattattttatgttgcatggttcacatgatttatttcatgattttttaatgtataaattctat

SEQ ID NO: 295731 - DNA, 1444 bp, Cannabis indica
gttgatggcacttgagggtgaagagcctaatactgttacttacaatgttatgattaatggattgtgtaaggaagggatggttagtgatgctttacaaacattggatgagatgttggagaagggtttaaggcccgatgtggtttcttacaacacgttattaatggggctttgtagcaatgggaaggttgatgaggcaatgaaacttttcggtgttttatctaaggatgagagctccattgagccagatgttattacgttcaacatgctattgatcggtctttgcaaggaaggtcgtctcgatgatgctatggagatctatagtaaaatggctaagaggggagtggtgggtagcttagtaacttataatactttgataggaggttatctgcagatgggtttagtcaacagagcaatggaattttggaaacatgtcttggagtttggattggttccagactcagttacttatagtgttatgattaatggattttgcaaaatgcatatgcttaatattgcaaaaggacttttttgtaaaatgaaagcttctggtttcagcccttctgagattaactacaatacaataatggcatccttgtgtaaagaagggagtgtggagcaagctaggacattgtttcaagaaatgaagaactcgaatcataaaccgaaccttgtcacttttaacacaataatcgatggaactttaaaatcaggggacataaaatctgccaagggattgctaagtgagatgctaaatatgggatttcaaccagatacactaaccttttccacattgataaatagattctcgaaactcggtcttatggatgaggcgaaaaagattctcgagaggatgatcgcctccaatcttccaccggattcctttgtatttgattctctattaaagggctattactcaagaggtgaaacagaggaaattattgagttgcttcatcaaattgcagataagggtgttcttttggacacagaacttacttctactatcttaatgtgcatctgtcattgtacagacaaggttgatatcatggattttctcccaaattttgctcaagaatcatcagaaggaacaagtatcttaagcaatgacttgttgatgaaacttgatatcttacctaccaacacttgacttgtgttatgaataaacaagttttcatctcaagaaaatctttaattttagccttttgatcatgtaagtgtgtcatatattttagctaatcattttgttaatatcttgtgtttagctctagttttctctctcaatatttttttttattgtaattttcttttctgagtataatttctcaaatctattggatttatgaaaggggttattttacaaatacacaaaaataataataaaaaaaattataaaattacagttgtacgaaattttaaatatttttacgttttttatgattttatttac

SEQ ID NO: 295732 - DNA, 2081 bp, Cannabis indica
gaattataactaactagattctttctgaagcttattttaattatttcattaaattttcctatttaagttataaattagttatttctaactaattttcatatcaacttaaatttgaatatcttttgaatttaaaattaagttgaggaattctaggaattggttattgaagattcttgagatattttttaagttgtttttattttaatcaacttaaaatgggacgtataaaagtttgtttttattttaattgagtcaagattttctctcgttttctgttcttggagctcgtgctgatgctatggcaaaaacaagatcaaaaaacaacggaaaattgaaatctgcaatgaagttagtgaggaagaaaggatcgaaggcaggattgactgagaaacaagagcaagagatggaagggattaccggtatcgatccactgaaacattctgaagatgaagaggatgcgattggcgagatgcatgggagaaggagtatggatgactatttccaacctccactgtctcctcgcagttctctgaaggagattcgccgaatggaggatgtcgagagggattttctaaggtatgttcactaccccaccagttctgggatctggcaatattgttcgtaatcttgaaagctcttttaagagccctggacagggaaacaaggttaggattgtgatgaaagatataaaagaggaagtgagctattggtcaccctcattggtctgctatgttcttggatcaaatcctcccttgcacatccttgagggttttgcaaaaagactatggggtgagaaggttgataaagtaaagatgtgggcttatggtatattcataatcaaattttgaacaattgagagtagggatacaattttaaatggcggatacgtcttcttcaatcggagacctgtgatcatgaagccatgggacccgaacaccaactacaagaaggaagacattcagcaagtgcctacatggattccactagaggatttggatctcaaatattggggtcaaaaatctctcttcaagattgttgggcagatggggcggccaattatggtggatgaagttacaaaagagagagaaaggctcaactacccaagagtattggttgaagtagaaatggaccaagacttgtcgagaatgttggaatttataaatgaacatgatatgaacatacaggtgggagtgacttatgaatggaagcctactatatgtaagcactgttttggaatgggccatttgactgatgattgtaagaagaaaacaaagccaaagaaggagtgggttgtgaaggttgatagtaggaaagctgctcccgaggccaaggtggatggagatggttttaaagaggttataaaagggaaacgaatgcaagagaaagaggtacctgcagtaacaaagacaaataattctttcagcatacttgcagaagacaaaagtggacagcaagatgctattcaagaggctgagattagatccattgagaacacaggaggggggagttccctctctttgtaatggataagttcctatgttggaatatccgaggagcaaataacattcaaaagcagaggtctataaaaaaatttattcagactcagaatgtttgtttggtggggctcctcgagacaagggtaaaggttcataaattggaaaccttgtacctaaatgtgtttgaaggttggtgtttctcaacaaatattgcttggcatcatggagggaggattgtaatatagcatggaatccaatgaggtatatagtggacatcattagatgcacaagtcaattgatgcatttaaaggtgaccactgtagataatacatattgtagtttcatcactataatatatgccttgaatgacaaaaatggtaggcagagtctatggaaaaatctcagggagctagctactaaggataaatggctcttaatgggtgattttaatgatattctggctaaagaggagagagttgggcaaagagtcaaatactatcctgatatagattttatatagtgtgtgaattattgttaattggaggatgtaaagtctacagggaacttcttgttggaaattatttt

SEQ ID NO: 295733 - DNA, 9918 bp, Cannabis indica
taaaaatccttctctcactttcttacagctcaatagtattataatattttatcagttgccgaaaacctcggtcaacacatactatcccatagttctagttctcctctgcataattcttggattgtggatacaggagctactagacatgtttgttcaaacatgaaactatttcagtatatatgtaagataccttctattaaactaatccttcctaatcatgactgtttgatagtgaatcaaagtggttctgttaagttacacaatgaaattgtcttaactgatgtgctatatgctcccacttttaaatataaatattatatcagtgagctatctcacaaacaaatctgccatttctattctttttacctctaatggatttactatgcaggaaaatgccagcaagaggatgattggaagcggtagtaatatcaaagatctgtacatccttgataatacaccaaactccaatcaagtgttgtccgtgactgctgagacttagcactctcgccttgggcatttatctttcaaacgcctgaatttactcaaaaatactatgaactgtaatatttctggtttacacaaagaaataccatgttatgtttgtcctgtctctaaacaaagaaaactgccctttcaaagcaataatactgtttcaaataaagtttttgatattgttcattgtgatatttggggtccctaccacattgtgtcacacacaaatcacagattctttctcactttagtggatgatttttctagattcacttggatatttttgctgcagcacaaatctgatgttagtttcatcatacctcaagttctatcctacatacaaactcaattcaatcaagttgagtgttttgttctgataatgctccagaacttgttttcaaagcacgacattttacatgaattttcatgtgttaaaacgccagagcaaaatgccatagccgagaggaagcatcagcatctgcttaatgtggctcgatctttgctatttcaatctaaagttcctataaaattttagagtgaatgcatattgactgctgcttatataataaatagaatccctacacccttgttaaataataaaacaccttacgaattgctgtttgaaaaattgccagattatcaacatcttcgcacttttggatgtctagtctttgcttctacattatctgctcacagaagtaaattttctccaagagcctgtacctgtgttttcatgggatatccccaaggaattaagggatataagttgtacgacatcaacaacaaacaaattttgtatctcgaaatgctgttttccatgaaaagattcttccttttcaaaaacttaacactgaagataacaacatggacccttttattcaaactgttcttccaaattccatgataactaacacccatgtttctgagtatcctacagataacgacactgaaataagcacagcaagtccagaaatcaatactggtgttagtgataaccatgtgcagcaggaaacaagcagcacagatacacctgatgcacctgcagctcctcctcaacaaccatctctggaaggtccaaggagatcaaatcgacaatcgaaacctccaagctatctaagagattttgagtgttattcacccatacaggacaactcttccacacctcataatattgacaaattcatctcttattcgaatttatcagactctcacaaagcatttatttttgcagtttcatcagttaaagaaccgaggacatattatgaggctatacaaacaatagcttggttacaagccatgcaatgtgaactaaaagctctatcggataacaagacctggattatagttccccttccagctaacaaaagagcaataggatgtcgatggatttacaaaataaagtacaatagtgatgggagtgtcgaaaggttaaaggctcgtcttgttgctcaagcttacacgcaacaagaagggctaaacttctttgacactttctcccccgttgcaaagatggtcacacttaaattgcttcttgccatttctactataaagaactagcacaccttacaactcgatattaacaacgcctttctaaatggcgatcttaacgaagaagtttatatgtcactgccacaaggacttactttgccttcttctctcaatgcaggtaccaatcttgtgtgcaaattgcacaaatccatctacgggttgaagcagtcctcaagacaatggtacaagaagctatctgatgctcttctccaagaaggattcaagcaatctcaagctgattacactctattcaccaagggatccgaggatactttcatagctcttcttgtgtacgtagacgatataatcatcaccggcccaaatatatccttgctgcaccaattgcaagaatccctccaccttaaattcaaactcaaggctttaggagatctcaaatacttcttgggatttgaaatcgctggatcaaaagaaggattatttctatgtcaaagaaatacaccctctaactccttgaagatgctggtttcatgggtagcaaaccttcaaaaacacctatggaccccaaacttaaattagacaatgaacatggagaagaattggacaacccctcacactatagacagcttgttggaaagcttctatacctgaccttatcaaggcccgacttaacatatgctgtaaattctcttagccaattcatggcaaatccccgtactacgcatctacaagttgtcaaccatctacttcgttacatcaaaggaaacccaggccagggtctcctatattccaagtcttcttcactccatcttcgagggttctcagattcagattgggcatcctgccctgttactcgacgatctacaacgggattttgcatcttcttaggagactgtctcatctcctggcgtaccaagaagcaaccaacaatctcgaaaagttcagccgaggctgagtatcgggccattgctgcaacaaccggtgaaattacctggttacagtatctcttacataactttcaaataccacaaccacaccctgctttcatcaactgcgacaaccactccgctatccatattgccaataatcctacgttccatgaacgaaccaaacatatagagttagacttccacttcatccgcgacaaaatcaacaacaacaccatcagattaattcctatttccagtgcattacagcttattgatgccttcacaaaacctttaacttcaccaattttgtgaactcatgtctccaagatgtcagtttatgacatacactctccatcttgaggagggggcattaagtttactgttttatttagtcttttggtcagctagcttaggtggttttgttttgtttattggtactgttgtattgttagttttggattgtttgttatctttttttgacagttggttatttttagttgtaacggtttgtctgttaatatcgttagtctgttcaaaggttcaagccttatataaagcttgctatctttttctgacaattggttattttcagttgtaatggtttgtctgttaataccgttagtctgttcaaaggttcaagccttatataaagcttgcctcacatgttcttgcttcttaataaaaattctcttttctctcatttctcaatactaagccctttgttttcccttccagtttggccctgcaagaacattagcaatgaaaatttacaacacaatttactgtataatctatttaccaccatttactaccaaaaccatcatcatcttcacgctccaccattacaatattcttctctcaaagtatagatagaagctatagatggaaatcaggaattttctgatccaagtatgaccaaaactaattacactacactactataagaaaagaagacttaacgtttctacatattctgagaacaacaaacttggcttcttttaattgattatgtacatgaggagattgctttctcaatctcttgaaactattttttgttttcaaaacacagctctctttattctaatcctgtaattgtaattttagattcttgaccttgatgattggctccgcgaataagatgaagacagcacctacatggaaatatacagttatcatcagagattcatgacaagtaaatagaaaattatggattctttctatgtggatgacttcatacctgatatgtctttggtcccttcttgagcagataaccaacactgtttaaattatcaataaaggcatccatatcaggaactcttagttcaatccggtcagctaaactgtatatttcctgaaaaaacaaaattcacttaaagaagaatgatcaaggatctgaaagtaataacaaaaataattggtgtacgcactgagatagaaaaacaatctttctgctgcaactccgactgtttgttgagagcacttaagaaccttttggcctctttttgttgactcataccaccactccgaccgaagtccacaaaaccattctcatccacatacttatcgtagagggactctctcatgatttcaactacatcctgcaaaataaacaagaatcattcacaaatcttttgaacaaaatctcatttcgaatctcacatcacatctcctaaagaatggttagccttagcctgcaacgcaactgaccattgcatcttgggctgttatttcttctcttaaatctaggcgagctctagcctctgccagcctcactagactctcaagttgtctagctgttattggtgtactgtcagctgatgtagcatgatctcttagttttaagtagaacttctgtaggatttcagctgctggctttgacatcctaattccaacaaatatcaaatatcaattaccaaatattaatttggaatagttgagaggaggtaatcagatcgcatacaattacctagggaaaacaaaatttcttgcataggcaatatatttgcggagaagttgaattggcaatggagcaaaatcaccatccttctttgggtctagtctcaaccttgacactaatgaaccaccatctactatgcattgatcattctgcgtagctgcattttagtaattaaaagacacatcttaagcctaactgtgtcaattactatgcattgactcaagtactagtagtataagagtaccttctcgtcgtattttttttgctggtggtgcatgctctgtgtacctagagtgaagctgcataatagacacccaattaattcagttctgcactcagcaaagtttaatacattgatgaagctcctattatcttaagaggtaatatgagaggaataaagaaactgctttttaagatgtcaccatgacttcggcaggataacttactgacatgatgtgctctgagagcctcttatccagaagttcatcaggcttgtctagcaatatgaagaccaaatcaaatcgtgacagcagagcggcaccaattttcagattttcgttcactgttttcgcacgactgtgaattgaaccttaaaatgtcacttgaaaagctgtaaaacaaatcaaagcataatttgcaggaaatatgaagtagattttatctttggatcacagtggacagatattcaagtgaaagacaacattacttgtaatggccaccgacggggtttgctgctgctaagacagaagtacgtgctgacaaacttgctactagtccagcctttgctacggagacacactgctgttccatggcttcaagtaaagcctgtaagaatcccagtttcagttagatccatattttgatgtgatgattagtggtgaacaaatgctaaagagtttatcacaaagatcttacaaacctgatgctctgaagtcattttatcgaactcgtcaatgcagcacaatccactgtctgcaagtaccatggcacctattggaaaatacatggttaaatatggagaaagctatagtattaacagagactatagttcattaaagcacataattaattaaagaaaaagcttctcggtcacaactgagattaatggtccttacatcacatgagaacctcagtcaaagaaaaaaaacatcacatgagaaccaaaacagctacatagaaggaatcttacctgcttcaaaagcataatcacttgtcattggatcctttacaacagctacagtcaagccagcttttgttgtagcattaccacacacataaatgcctctcggagaaactgctgctgctgcttgcaggagttggctcttccctagtccaggatcacctagaaaaataaaatgttatcacttacaaattcttcaattgcctagttcctataaattactttttcacactaacttccagttgatcaaattataaaataaaaagaataaaagaccattcatatttacagaaataactcccagaatataattccaccaagcaaaaaaggaatggttatatcataccaacaatgatgacatggatgtctcctcttacaggaaccttgttgccatcatttgaatgttttcttacacctccaagtagtgcaagtgttattcccgctagggaaagaaaagaaagagttctataaatcagtaacaattcagtgtgaatctcacaaataacaagacatttgacatggacaagtagcacaaaagctcacctttaacaagctcatgaccatagatagatggacagatagattgaagcagttgtctgaaggtatctgaaccatgttccttagaaaacttcacaataaattccaaatcccttgaagaaaatgagaataagtcaaaaagctccattggtcgagcatgagatttagaatcttcagagtcttcagatgtagaaagtgacttggagtttttgactgatatggcttctagatacaagtagtaaaatccttgacttttactttttgatttccctaaaaggggaaaaaaaacaaaatcagttgcacttatacacaatatgacaatgctctactcaacgataacatctttcacaatagttaacaagtggtatatgtcattcctgaaaaactaatactttgctaagaaatatgcagaaacatcagtatagatttacctccgccaatatccatgtaattgttaattactcttataattccagttacagtcaccacatctccagggatgcaggcatcaactagatcttcagtcaactcacactctacagttcgaggaacccggccctcctcatgatcctcaggctttaggagctcctgtattctggggtgatacccatatcccaagtattaacgattaaattcctatatagtatgtagtgatgctaatatataaacgaacctcaacgataatgatggtgatgatattgactcaaatataaattttaaataagcgaaccaaccttattttctgaaaatctattgtctgagcagttgatcgaattggaataaaacttttgctcttgcatccatcgaagcaacagatcattggtggcgagaatttcccgtcaggaaatattcttaaaatctttgtcttacacttggcacagtcaaaactcatttcaaccacaagaggcctaacagtgctaacttttactacggagccacgaacagatacaagcttgtctgtcactcacaccaaaccaacatcagttctatcactagcaattatctcagagcatagcaataaaaataactgtgcattccaaaaccatagaattaccaatatatgcagcttttaggttcttcaacgcaatcaaagattgaggataattatgcagacgtatgtttactttggtaccatcctccaattcgctttcattccatttgttcagcagtacctgcttcttttgtcaattagtttacttaactcaataaaataaaattaaagttggaacaaattcccaaccaccattgccatgtaccttgtgcactgaagcactcatgcataaaagagcaatcttcggtttatcctctaacaattcataaaattcatgaatatcgcaatcctttcgaaatcgttgaaagtcgaccgagaaaatgtatatgccattatcacccttgacctatatccaaccacatatataaatacataacattttagcaaaaacaattcatgcagctcggaataaaaaccctagtcgagatttctaaaagacaaagagagttagataagacctgagaaaggagattttgcgcgggtggtgaggaaaagaaggaaatcatcagagaaacaaggttggacacaactttttcatcgccaagctccatctgagaaaagtacttacaccaaatatctccaaagtctccaccaccatacacggatccatactccctttccgagccctttcccggaacaccaaacatcgccgccaccccacctcaaagaatcgagctcctgcgactttagctgcgatttagaaaattggagtctcacgtgttttggtgggaaaattaaaagcagaacatattcataagaggtttggcggagagcgactacggcgtcgtttagattcaaaaataataataataaacaaattatatacgtaaaactcatattaataacataaaatctaattagaatttttgccctgaactttgacgtgtaccaaattatatcttctgaacttttaaggtcgttaaaaatgcctcctgaactattgagattgttagatttaaggattttcgtctaatttcattctattttactatttcagtgattatttatatattaaactatgcttctcaaactttgatatctacaaaatcatgcccctcgaactttgacatttactaaatcatgtcccttggactttcatccatgttagacttttttactaaaattagaaaaaaaaatccttaaatccaacaatctcaatagttcatagagtatttttaacgaccttaaaaattcagggggcaaaaatcctaattagcctaacataaataacgttgactaattatatagaattctaataacgtgacacctcaacaactatatcttattatcaaaaaaattacttactaactaattgaaaaaggaaaccggctatttcatttcataaatgtaccattttcttccataaatgtaccattttgttgttgaaggaatttttacaacaccaaaaataaataataacaataataaataaggaatatacgcgagtactcaacctaaaatggcgagtatttgaatcattagcacaaaatactttagcaaaaactggaaataaaatgaacacaacagagtatagtagttcagccagatcacggtatgcttaatccactattgcaaggatttctctcttatttatttcacggcggatcactcatttatatacaaagcaagtgtcttatcatttacacaaggattgaattcattatcaatccgttcatacattgaattacaataattaaaccaaaaaacgtaaacataataaatgaaaaacaatttccagtttaattcactaaatacagcaacgtatgcgacttttatagtgcgagttggctgttcatattcttgcataagcttgcaagcttaggatgcattcgagattagtcgagtctaggatgtctgcgtcctcttggagttgcttatatcgacatcttataacaagctgataaaactaagacatgggaatctatatcagtttatcagggcagttgggtctatgggaccagctcgtaatatggagaattgatctctatgtttttgcaggaggatcacggtgatactcgcatatatcctgatgtatgcgagtttagaatcgttccatggtcctacataacgtgagccatacgaatgcgattagactcggtcatattcgcatcatctcgttgagtctggttcaggcgaggttcgtacctgaaaggtctctcatcgacatctcagctttcctcgaggaaagtgagtacgcgtatctttttaataggagtccagtctcgagtttctaggtgaaaaaaatctcactataacacatgcccct

SEQ ID NO: 295734 - DNA, 1832 bp, Cannabis indica
aaaccgccaaataaaaaaaccgccaaaccgcccaaaaaccgcccaacccaacccatgtgcaggcctaataaagagtcaccttgagagtaagagtgtataaaaaaaagtaagctgatagagatagagggagagattaagtgaaagggatacacatatacatatatgagctacgttactgactgataaccattgtaaaaagttagttcaaaatagtttgttgtgagctgaaaattgtttcattagtcagctttgccacttgtcttttggttgttattttttctgtttctgtttctctgttttcgatttctgtaactaactctggtatcttactctataaatattagttcttaatcaaggcttgctcaagttttgctagtcttgtgattctatcattttattgagtcctgttagatttacacttataagttgacacttttcatggtatcaaaaagctcttgacaacgttgatcatggatccccgccaccttgaacctactacttaaactttggttgctctgccagtataatagtagtcctttttagaattatttgaattcatctctcacagtttgacttgatcgaacaaaatttcttgcggggaaattgcaagtcatccctactgtcatcggtcacggcctcgatgacatcctcctccccaaaattgctcacgcttgaatgcttctcaatggcataactaatctagaatatacaacatggaaaagaaaagaccaactattactcagctggcttcgatcttcgatgttagaaacaattcttggatcattagccaaatacaactcctccttcaatgtttggtgtgccctagaataatgtttttccaatgaattgaaggccagattatgtcaaatcaagtcgcaactctcaacaatttagaaaggtaatttatccattaacgattactgtataaaattaaacttcttgctgattctttatccattgttggtcaccctcttgaagagagtggtatgatcacgcacatgttaaatggattgagacttgaatacaatcatgtggttgttcatgtaacgagtcttatggataatctttttttagaatcgattcagtctttattactaacccattagagcgggcttgaaaggcactataatcttggagattcttcctctaaaatatcatcaaatctcaacatccacaactcccgttacaattatggtaatggttatcgtccctatggggctcaaggtcgtggatatgctcccaacaatagatattaggggtgctattctggtcgtggagacccatccattacacggctattgtgccaagtgtgccataaagcagaacatatagttgcaatatgtcattacagatttgataaagggtttgttacacccaatattagtgaatatagggcctaccttgatgaaattgataagcaagaagatctccaagctcacttaagctttgctctaccaaaatttgtggatgataatgattggtatgcatatacaagagcaacatgctcagggaataaaacatcttgaatcttaaattccttactcagttcagatactcttgcagttggaaattgaaaaatactctcaataagttatgttggtaactcatctctcccttcctctaatgtctccttacatttaaataatttccttaatgctcctaaaataactaaaaatcttgttagtgtgtctaagttaactgaggataacaatgttttcttggaattgttcattcaaaatgttgttttgttaaggacaaagtaacagggagagtcttgcacaaggggaggcttaaaaatggcttataaacgtgttatcccaatttttgtcctc

SEQ ID NO: 295735 - DNA, 1405 bp, Cannabis indica
gtaaaattcatgcaaacataaatcacttcaaatttcttatatggataactaattagattgtaaaaggttttatttagggaacaaaacccaacaactccatgcaccagctcgcatctaaaagtttctgaattttgttgtaggaagttctcaaattctgccaagtacaagctcctccttcgcagcccaaatccacacctccaaagttgaaaagaaaatttcaaagaatttctccttctcgtctatcatacactttgcgtcctaccttctcggacttgtcaagaatgacattgagatcacccattaacgcccaaggatcacgacactctaccactttttccgtgagccaattctagtaggctcctttcaaagcctggtatggggtgccataaacacaaattcaactccacattggttgccccaggccatcctgaaaaagatacacgaaaacccgcatcatacatttctaaaacattacattggactcccctcctccaagccacacaaaaacctctagctaagccattcggagggatgcaccaagaatttacatagcccaatcgattcataacattgatcatagatttcgcatccacctttgtttctgaaagaaaaagaaaatccacatctgaggcacggattaggccccgaagggtcctttctgtcgtagatcgatgtaatccacggtaattccaagccaagcacctcatgacgatggtgggggcatgcttctagccgcctccttgtcccttccaaaagtttgctcataatccactctaacatccacacaattagcaggaatttcattcaaatcggctactccgtttagctctctgtttacctttgattttcttccacggcctgagcttctcttacttgtttcgtcaccccagcaccaatacagaaattttctgcctcaacaaagcactgatttttttctggctcttcattcttacctggtccattgggcaaaataaaacttgatctcgaagaagaagaataaggttgataccaagtatgggcctcttctttttagtgttgcccaataaatgcataatcattttagaaagatctggtgggcttgagataagacactgttgaccgttgtaaagattgagcacctccggcccatataggttgatgaacattttttgggcctctgaatcgtcactaggccacctaatgggtgtaggttcagggaatttgtggggcatctgagataagcaaatgaattacactagtattatatattagataccttaaactttattgtagggtccttgccaaacaatcttctttttatagtataatttgtactctagtactttgtcactttcattgacgattactctagatgtggtcacatttaccttatacataagaaatctgaaacgtttgaaaagtttca

SEQ ID NO: 295736 - DNA, 3897 bp, Cannabis indica
cactttcagacctagaatcatcaacaaagggtcgttctttgggaacaaattcttcactagaatcagacacaccctctgagtccttatcatcttcgatctcttcttctggttcaaaatctgatgatgaaatgggaaggaggattctctttgaggtttttgccctttgaggatgaaggcaccactttctttcctttggaatctcctttgggaagaaccacttaaggtttctttggtgtggacaccttggacctggttcgagagcttactgtaggtaaaggcacaagctccccagttaacatcagagaaggcgtgaagttgaaatggatttggtgtttaggcagaggagctaaagaagagacctcgaccaggtgcacctttcaaatattgtaagatcctggtggcagctttcatgtgaggttgtcgaggatcactgagaaattggctgaggcagttgacagcataggtgatgtcaggtcgtgttaatgttaagtataatagttttccaatgagactcccatatgaagtggggtcaaattcaggggggccaatgtctttgctgagagataggttggcctccataggagtggagacagttttgatgccaagtgatcctgtttcagtgagaatttacagggtaaaaggcctttgagagacagcaatgcctgctttggatcgagcaatctctaatccaaggaagaaacgaagtggaccaagatccttgagttgaaatttgagtttagaaaggttttaaaagcatatgcatccaagtcattgttacttgcaataactatgttatcgacatagacaagaagagcaagaaaagtgtcattagatgatctggtagatagggaatggtcatttggggattgagtaaaaccattgctaagtagattagagcttaacttagcaaaccattgcctaaatgactgttttaaaccgtataaactcttatttaatttgcaaacagtattgggaggaagctccccttcatgtatatagcctttaggaattttcatgtagacttgttcatcaagatcaccatgtagaaaggtattatttatgtccatttggtgaagagaccatttgttaagggcaacaagggcaagcaagagtttgagtgtattgaattttgcaacgggtgcaaaagtgtcaacatagtcaatgccatgttgttgattgtaaccttttgcaataagtcgagccttgtatcgtacaacttcacctttggaattgtatttaatcttacatacccatttgttttcaataacatggcagtcaggtggaagagaaacaatagaccatgtatttctttgtttgaggcaaaaaattcattatccatggcttttagccattgagagaatttagaagcttgactatatgaagttggctcgagttcgagatatgcttggagtatggcatttcaaaatgatttgtggagcctgtcatacttgatataattttcaagtggatatgcagttgaagatgtgcatatgaaatcttttaaatggacaggttttgaagtaattctgctagttttagtttttttttttgtatcaatagatacaacatgaggaggggtgagaggaaccttagggggatcagtatgtgaagctgtatcaatatgctatgaaggcataataggagtagggtgaaaaatggcagcaggtttggcaaaaaattggtcgagatcagaatttaaggaaccttttaaagggaaaatgatttcataaaaaataacatctctagaattgaaaatagcattgctggctaaatcaaggagagtgtatgctttcatgccattgggataaccaatgaatatgcaagcatgagcacggggaaaatttacgtctcttgctaggtaaagaagatgcataagcaaggcagccaaaagtcctcaagtgaccgtaggcaggcttcttatggtgcaagagttcataggctgttttgtgatgtaataggggagtaggagtcctattgatgagataaacaaatgtgtttatgaagtaaggccgctatgctaggggaagggatgattggaaagccaaaccctgagtaacatttaggatatgttggtgtttcactcaactacagaattttgttgaggtgtttcaacacaagagttattgatttttataccattttgagcatagaaagatgtcatattaagttcttttgcattatcacaacgaatagctttgatatttgtagcatattgtgtgtgtataagagtgtaaaactgggggatataaatttgtgccacagcttttgtttttaacatataaacccaacagaagcgactgtggtcatctataatagtaagaaaatagtgaaatccttcaatactttggatatggaaagtgccccaaatatccatgtgtatgagatcagagttagatgcagcaaagttgttattcgaaataaagggcaatttcttttgctttgcaagatgacatatggagcaaggagaagaatcattagaatctttagaatgtaacattttattgattagatttgtagtgtacatagatggatgttcaagtcgagcatgccatgaatgagaattattacaagagatgttacaaacagtattatggtggacagtaggggaattatgcaccagaaaatagaagtgaccgatgcgtttagcaatcccaatcctcttgttttgggaaccctataaaatgcagcaagattttgtgaaaaatatgctgttagtaagattttggaggaaagtaggaacactgaacaaattaaattgaaaatcagggacataaagaacattgcataagtagagtttattggaaaaaatttatgttgcctgatttgtgaattttaatgctcaagccatttggtaatttgacggatgtggcagtagggatatcatgtaattgagaaaataaagaaatgtcacaccaaatgtggtgagtagcaccactgtcaacaatccatagagaatttgagttatgtttggtattctagaattgtttgaagcaaaaggctgtgcttctgagttcgaagtagttggctgcagctttagagtcagtagagaaatgagggtttggatgtcttcttgttcagtcagattggccaagagtgagagaggatcagtagaggtagatgcttgattagcagcttcctgtgtttctttcttcttgtctccatagcttggtagaaaaccaatgggaaagaatcatttttctttcaaatgaccaggtttgtggcagtttgtacagtaaggtctcattctcttattgcgattttgatttgcattagcagctgatgcagagggattgtgtgcaagagttggattagtggcagaatcttgagtagatgcaacaagaaatggaatctgaggggtttttagttttctctgtctttcttcatggataaccatggagaaaactttggacatggatagaaagggatcaatgagcaatatttgagctctgacagggtaaaaagattcatttaaccctgttaaatattaaagaacatgttcttgattcaaaaacacaagattgtcaatggatgcagcacatgtgcaagggatccgtggacgaagttctttgatctcatcccacatgcacttaagtttagtaaagtaagaacttacagaatcatcgccttgatgcaaagtgatgagcgattctctgagttcgaaaatacggggaccgttttcttgattgtaccttgaattgagctcctgccacatctcagcagctatgtccaagaacataatgctacttttaatgtcaggcgagatggaatggaggatccaggacatcaccatctgattacatcaaaaccaatggtgatgtagtggatcgtcgacaggaggttgaggtagagttcctttgaggaagacggtcttgtttcgcgcaccaacggaaagttcga

SEQ ID NO: 295737 - DNA, 2095 bp, Cannabis indica
aatttttaccctatagcccactatatttcagggccgggcctggtcgagactttattggatgaactttaaacaaaggaagaaaaatactgaaagcaacgatttaggattgattgattaaaatactaaattcttccatgctaaaacttctgctcgaaagtctaacaacaaaattcgctctctccaagatgatgatggtaatattactacttcaaaagatggtattttcgagattgtgttcaattattttcaaaactttttacagcatctcaagaggattattgggctctttcacatgttttatccaccattcctactaccattactccggaacataatgattatctgctaagagattttatttcaaatgaagttaatgatgctttaaaaaatatggcagttgatagtagttcgaatttagatggtatgtcggccatgttttaccaacataattaaaatattgtgggacctctggtaactaaagtggttttatcagtactgaataagggggccaatcctgctgcttttaaaaaaactctcattaccttggttccaaaggttaagaagtccaaaactatgaaagattttcgtccaataatagcttatgtaatgtcatgtacaagttttgttctaaaatattggttgctcgtttcaaaacgattcttcctcatgtaattttcaaaatccaataagtgattttctttcaaaggctgatctcagacaatgttcttgtgggttttgaattgatccatagtctgaaacatcgaacaagaggtcgaagggggtatgttgcattaaagttagacatgagtaaggccttcgatcgggttgaatggtcattcatagctgctgttatggagaaaataagttttaatatattcgatggatctctctgattttgaccttattgagctctaatcattttttattccttgtaaatggtgttgtttctgattcagtcacacctcaacgaagtttatgtcaaagagatcctctttctccttatttattcctcatttttttagaagggttctcgacattattacaatatgaggaaaatattagaagactcaaagggatggttatttcttgtcgatctcctataatttctcatttgctctttgcagacgatagtctcttaaagcgtgcattggatattacagagcctctggtcaacaaatcaacacgaataaattagttatggctttctcaccaaatacatttgaggttgtgaaactttctttccaagagattttggaaatgccaatttatgagtgctataataaatatcttggtcttgccgcttattcagagtgtgataagaagtaattatttaataatattaaagaaaaaatttggaagcttatgcatgtttagactgataaacttttttcaattggaggaaataaagatttattgaaagcagatgtacaatctattcatatctatgcaatgagttgtttcaaattttcattgacttttgtggatagattgagtcaatggtggaaaaatttggtggggtacttctaatgacaagagaaaaatacattaacaaaatggaaactagcatgagttttcaagattccattcactttaatcaagctctgttagctaaacaagcctggtgtattttttagaatctacaatctcttttaagtaggcttttaaagggtaggtatttctctaccaataatttttttgaggctgaaagtggtggtatgtcttctttgacttcgcaaggaatatgtcggggccatgacttattgatcaaaggcttgaggtgaaaatttggtgatggctctaatattgtttgtggatcagatcctcggattcctagaaaatccgtcttcctctccctttgcgatactcgaaagcagctttaaagagagtttgtgaatatatgtctactaatggtgagtgggatttaaataagttgtagcaggatttcttccgtactgatatcgaatacatcctctcccttcctctctctgttcataatgcaaaggatgagcggatttggcaccttacatgtggtgattattgtgacagtcagtagtcccgtgatccgtaagggaaaataccaggtaagctgtgcaat

SEQ ID NO: 295738 - DNA, 2203 bp, Cannabis indica
ttccattcctattcctattctcattcctattcccatattttcattcctccaaccaaactcctccttagattccacacatttctgtgctttccctttcaggaaaaaaaaaaaaacttctgtgcattcccagttacaagactagaatatcaaactccattaaaaacttccccagcttgatatattttttttttaaaaaaaaaaaatcttttagggaggggaaacaaaaacgggtagagtcgacatacaaagctagattaatacacacatatgtacactctactaccattactatactatcactaccacaacaatgtccaatatatatctgcatatagaattataaactatactaatataggaattaatttattatttggaactgaagctaggaagagcttgatgaagttagtatctcagtggcagtaaatggtaccatacatagaagaagcctctcattcttcaactcttctctccaccttaagttagtcctggcaatgaattcttcacttctcttctgcaattcaatatcatcattaccatctttctctttgcaacccaatagccattcttcatcatcatcatcatcactacttttatcatcttcatcaatatcttcatcatagccatcatcatcaaaaccatgaaagtacacatcatcgctataataatctttatcatcaagaccataaatataatccttgtctgcttttgctgccactagatgataatcatgataatctttgagtggtaaagttgaaacatgatcacaatctttaaaacgcttaaaacttccgaataaaattgcgataaaaattacattaaagatgaagaaaattgcaacgtgactagatctgaccgccacaacgaggttgtaagtagagttgatactaatttgaaggtgtgataacatagataagaagctaatacatatggtcattatgagaagaagattcaaaatattacatagtgcatgtacatgaatattatttgagattgctaataagattttcttgttcatgctttatttctaaacagagcgtttcagagtatatgtactaatagccaacaatttaaaagaggtacatgtaaatgtatgtgtataaatatattgttatatggaagtttcctaagaaagttaggttaggttatatatttttattttctaatatgacataatacacagaactgtcacggcttagacatcatagtttatagtacttttccaagttgtcatttattttatacgtataaaatactaattgtgggaaatttcttagcattctcacttagggaaattgctaatatctatctacgaaatacagtagaaaagagtgatagcagcacccatagaatggtatatttatatggtgaccttaattaaattactacataattatcatcatgagtggatatgtgtcttatcattaattattaattcttgatatgactatgtgaaaaaggaacattagacatgttggtgttgctatagatcttataccgtctatacgtgtaaagtttgaaaaatcgataacgataacgttgacttgattaatatattttagctcaagtcaagtctttcttatttaatgtatataattaattggtttatttcttccattcctaagtctttgtttatttacattacaacatcccaagattgtcataatattctgttcccaaacttaaggggaaatttggagaagaatccaattacatagtttttatatctttaatgagcaatgcaatgtcgacattcaaaatctcaacgacttaacagtcgttttcggtgacacaatatataacttgctactttttgaaatagtagtggttacaaataacatcaacttatgtatttttagtgtaaacaaaataatgacgtatatgtttatattactagcagtgtttacaggtgtaataatctaattttttttaaaaaaatatgtatttttaaagaaacaataaaccaaaaattaattaataattaaaaaatatttaaacaaaactaaaataattaaatttaaattatttttttaaaaaaattatgtaacactgatataacaatagcctaaattatctcgttatcattctcaataactattttaagattgtgaatagttcggtttgaaaaccatttttaatgaagtgaaaattttaagattacaataatatataattaataatttaaaagtcaaaaatcctaaat

SEQ ID NO: 295739 - DNA, 1984 bp, Cannabis indica
acaaccatttagacacctggttttaacacaaaattttatctccttactcatagctctagcatttttgcatttcatctcaaaatacaacagttcttattcatccaaacagtgtataaagtcgccaaaacaactgaattaagaatctttttctgtaggttgttggaagggttcgaaaaccaatccctgatgttagatggccaagtgaacttgccacaccaagttgtgatctcgatgatgactctacgggtgaagcaacaattaacaaacaagtgttgatgagattccttttccacacagcaaaccggacaactatctgaaagaataggcatgattttgctgatattgtctctggttagcagttggtcattcacaattttccaaccaataaatctatgctttattagtgtcagcatattagtgtttcatattttgatactttaactacttaaaaaaaatatacatatatattcttgaaaaaaaaaaaataaccaaaaatattagtattttcaccataaaaaaaaaaaataaataccaaaaatattagtattttcaccataaaaaaaataaagttttagtatttaactacataaagtataaatactttaatcataaatatctgtatctcattatctcattcacaaaatcaattaaataatttttattcacttgtttaaagcatgttattatcaaaagtgtatttatatttgcacacaaaatatgtacaaatctgcacaacaatgcaaaaattgcaagttcattttagtttgaattttattgattggaaaaggttaaataagatttttgtcttttaaactttaacatttatcaaattatgctctttgaatttttttagttgttaaaaattttctctgaactattgaaattattggatttaaaattttgtctaatttcattcaatttactaattcaatgattatttatatattaaatcatgttcttcagactttaatatctactaaatcatgtctctcgaacttttatatgtatcaaatcatgccccttaaattttcatatatgttaattttttttttattaaaattggacaaaagtcttcaaatctaacaatatcaataatttaagagaaatttttaactaccttaaaaatttataaaacataatttgattcatgtaaaaattcaaaaggcaaaaatattaattaactattgaaaaatattgtggctttagtgcatatattttatttgtaaacagtattactccagtcaaagttgataaaatttagaacataactgtaaattggatgataagattttaataattaattggataaatgctatgtttacgttgaatgtgataatactatcaacactatccatcttgattattcatatatctaaagataattttacaacaaatgagaaaagatagcagttaattctgttactttttggctttcttccccggaaagttcgaggtgtgtttgtttgttttatttttttttttaaaaaaaatgtgtaattaaatggaaatgaagtgttttgttcgaatcaaacacgaattctgagtcatctcatctatttggaaagttaaataagaaaatgttaggagttaggaaggtgctaggaaacttcacttgtttcagtacttttctatataataaataaaaatattgttattaggtattatataggactttaaatttaattacacatgaaaaaaaaaaatattaggcaccaataatattttgtagcaactctcaataaataaaaggaaatgtacgaagtgcctcaccttatttgaggtttttcacacactacacataggccaaaagaaaattaaactgtgcctattttttttttctagtttatgcagcctgtttctcacccttggccataggcgtagatggactaaacttgtacctacatattttagaagctaaataaaaatatattttttaaaaaatatatatttttaataatttttaaaaatattatttatttttata

SEQ ID NO: 295740 - DNA, 3164 bp, Cannabis indica
ttattttttcaaataaaaaataaacgggaaaagcagttgaactgtagctcagaaaaatgaaggttcatacctgcatttgtagtctagcaatatcctcattcaggttcacaatcatttctttagctcgaacctgcagaaacatcagaaaatgacaactaactcaccttattgaacacaaaagccgaatattcaatcaaaaacattatggtcctgtaaaactctccttcctgccaagaatatgatggagttatattaccctggggatcgtaagttctatatgcttcatgattggctaaggtagagtcagggaatcagagctaaagctctactgggagatgaccagtcaaattatctaggaagtaggaaccatttcaagatttctctttgtaatactctatttccaatttgataatatgattacttcttttgtctttatgctattttctactttggttctatcagacatatagaaaaggtcggcaaaaaaatacctcgttcagaacccaggactgtctctctttttctagatgttcaactctttcttgtatgcttacctgtgaaaaatttataattataagataatgacttagaagttagaagtattgattcttaaaaatatatttgcactcaagtattattgattcttatagtgtttcaaatttcaccagcaacaacaagaaacagtgatttggtaaaagaaacataggagcccacattgaagtatgagattggttagtcgtatataactatttgggcaatcttctctcttaggctagcttttgggagtgagttttacccaagtggttgtatcacatgacaagaaccagtgccaacataaatgtcgattacaagaaaaagaggagcgtggaaaaaattattcaggaatgaagttacctctttcaagaaaaaaaagaaaatcgtgaaacaaatttctattaataagattgaattaaatataagtagaggataaggttcattttttctcctctcttttactccattcacaagggagagaggatgaaaaaacttatgaaaaaaagattgacctctttcagataccaagtattcttctcatcaaccaactgatttattttctccaccagctgaccctgccaatgacagcatcaaattagtcccctcaaattctcaatttgcttcataaaatgttgtaaataaaaacaaactttattttgtgtagagaaagagcagttgaaagtacatatcaacaatcaacattattatatattgttacaaatttacgtaagtaatatctctctgcatgtgtatttcagcaatatatatgtatgtatgtatgaatgtatgtatacgtatattttaagaaaattctatacttaagatcacctctttttgaagccataaatctttttcactctgtaattgaacaatttccaactctagactatcctgtgatttgtaaattatccagtcagctacacatggaagaaagtgcataaattccaaacaggtaatggactacacttctaaatccatacagaacttttccttattttttctcctaattgtgtgtcatcgttctaatcatattaccttgttcaggatacaagaacttttttcatcttgtaattgtttgatcacctccccataggtaaactgaaagagaaatgcacaatatcttaagcagaacaaaatgtttataaaaattcaccaacttagagtaaccacctctttctgtaaatgcagatcattatctttttgtagtttattaattgtatcttctaaggaagcctgagaaaagggaaaatggtgagtctcatcatctaaaccccaatccaagcatgatataatagtaatatatttttgaattaatctcaaaataaaatgtacagactgcacaatacctctttttgtatgtgattatcattttctttttgtaattgtttaattgtttcttccaaaatagcctgtaaaatgatagtcagtatcaggtcaaatctatattcaaaagaactatctagtttggaaaagtataaatcagaattaaaaaatagtttactactaatatattctattgtcaatagaatccccagcatttttcatcatattctattgaaatgaattgaaatttaaaagaagctggtcggtaatgcataaacatataattgttctctatatgggtatgtatctatagattgagcaacggtgtgcaccaaacctgtttctgaaagtgaacatctttctttgtctgtaattgtgcagatgtttcttctaaaatagcctgtaaggtaataataacggatttaggttaactgaactccattacaaaagccgaattgctcagcaaattggaaaacaaatgtgtacctcttcttgatgcgactgaggcacctcagattcagctgaaatggactgctgaaaggcatgtttgcgattcagtcatcgagattacaaatatataaatatacattcaaattatttatgcagaaatttctttaaattccgtgcctagttttagcagcactacaactgttctgtaagtatatgtttcctaaaagtgtacacaataaattcccaaataataatcagtcaaaaggatttcttacggaatttatagtagcatttagaggagcgtcgtgttgggcatggccattgacagtagcccctccttctacttctgtctccgcaatcttactctgtttattcttctttttcttgttgtttttcttcttcctcttctcgtcctccattttcgaataattatttcaaaatgtgtcctccaatacaataaaccctatatagtaattgtaaaacaaaactttactaatttaaaatgattctgaaaaaacactaacacgcgacatacagatccactttctgcctattatcaaatatagggagcctcctccagatccagttagcgagaatgcgatttcattttgtactttgttttttctttttagttttcgttgattattttcattgaaattgagtatgtggccgtctatctactactctttcgcacgttttctcttgtccagaatcagggctgcacatttgggtctctaactcggttcccacccaataccccccggcccgaactcaaaaaatccgaaaaaataagggaaatttacatggtatactaacttttgtcattttcttacaaaaatactgttaggcggaatttt

SEQ ID NO: 295741 - DNA, 1243 bp, Cannabis indica
tccgatgggtccgattggtcggaccccatcggaccccatggtccgaccatcggacctggggtgtgggattcttgggaccggccgagatagagagagaaagagagatgctgtgagagtttgggggtatttttggggttttagaaaaaaatgtatagttttttaggtttaaattattagtttagaaatcaaattttttgattttctaagtatagaaaatcaaatttcccctagtttaatggctcaattaagtgatgttttttcgtgaacttattaatgaattacttttatgtcccacaagtctagctagctagctagctatgtgtgagaaaaaaaattatgatttaaagttatgtaaagccataataagataaatatataatgatgttttttcctacaacaattatatatattatttcttcttatttttgtatataaatattgacacgtcttttcttcaagtttgacaatattacaaaatccacctaactcaatctaccgggaatacgacttgtatatagcgttacactaattttatgccctttcttgaatcaaaaatgatatcaaggtttgacaaaatcgaccctgtcacttaattcaaaagttctcgttcattatgtttcgtcccactcctcttaacctactaacatatttaaatatataactataatttcaatttttacattttcggtgctaataaatttatctagatagtatcagttttggattaactaaaacaaaaatataaaagacgcactgattaaagcaagagagaagaaggaagacgtcattatataaatatatatatatattttataacctagctagtgctggaagaaaattaaccctatcattcttgtattggttaggctattctcctttaaatcttatgcatgctcgacaaaagaagccggaagcaagaagaaaggtcaattaaaatcatctaaaaaaacaagaaagaaaactcactacttttattattttattcttggcaatggacaagttgggccaaaataattagtttgacttctccaaaatgatgaagtactggtcccgcattttaagttctatgatgtcttcaagagacatttgctcaatgttttgggccctgcatgggcccatttcaaccctaaagaaaccctcagagcactcctacaatattcatgcactatttttagaggagtactatcgtcaacttcctgttacaatctcttactcaacttctatgtccaaaaatatatgtcgg

SEQ ID NO: 295742 - DNA, 5572 bp, Cannabis indica
cttaatgatacaaccttctgcacaaattcttatttaatttttttaattttctttattattataaatcaagttcactcaatctcttaattcgagatgatgcgaattttttcagatttggtctaagcttaaaacacagaataagaacattccagcttgagattagaaagatttaaaataataaataaataaataaaaatacacagaaccttagcaagattcaactctctctcatcgccacatgcacgttcccaattgaccacacctcgctgccgtggctgccacctcatcaactccaacgctttttattatttttaattaaaaaagaataaacaaatcaaaatctctcctcccaataattactcttttttatttattttcttattcaatttccctcttaacatttccaaaaccaaagccaaaacgttaacaagagtagtaagtaatgatacacaacaaaagatttttctctcacattccagttttggactacttttaaagcttcttctttaagactggtaaaccaagtagaatcttttattcattcaactaattttttattttttttttcacttttttttcttgttgtttgctaaagtcgaggactcaaaatttaatttttattttttatatatatataaaaattagttgtatatgattttgaaacttatgactccaaaagaaaaaggttgtgatcatcataaccatttgtacttgttatgaacttttcttcttcataatccttccatataaataaaagaagagtctttttttttattatttgaaatagatcctgaaatttcgttttgagatttaagtactgaagaagattttctcggctattttttttttttttatttttcttgctttccaaacagggtgtgtctggtcttatcacactacaattacttcaactactactatgtctggttcgaatacgaatcatcaggaaactaagtgcaagatcaggaagcgtaactgttcatcttcgtcttcatcttcgctcgtgagaaagtatcgattcaagcggacaattctgatggggaagcgtggaggttcaactacgccggctgttactatgtgggagacaacctcatcgccggcaccggtttccatggcggaaaccgggaaaggtaaagaagctgctccgggaaaatcggtctcggcgagaaaactcgcggcgactctctgggagttgaaccagaagaaagatggaacagccaagcttgataaattaccgaaattaccctctcaatcagcctcattgcctccagatccatcctatactcccatttcagatgtgggttattattttaatttcactcataaataataattaattttaattcactgaaaaaaaaagagagagagaaaagaatccgagagactaatcttatcagcagaatgaaattttgtgccaaaatgagtttttaaattgtgagtgagaacgtgtgaatggatgggttgggattggttcgaggacattgtgcttcgtttttttctcagttgtaattcttgggctttgctcatttttgtctgctgctctgttatttgaaaaaaaaaaaaaaaaactaaatgtatttccttttatatacatatatatatatatttatattttttgatttttggtttctgggtatttgcagagaagaagagatgaccatgctgaaagagtaggccaccacagaacaatgtcagctgtaacccagaaatttcagctgactgattactatttggggggtttggattcgcttagcacagccagtttaatggaggtaatagattcaccattgtatgtaaattgtaaattaaactaactatattcattttctattttaattttttgggttcattttcagcttcgtctgtttctttcttccttcttatcctttctatttcgaaataaaaggaaaagaaaagaaaaaatggttgaaagtaaaattgttggcaacaattattattttccttttgtgtttataaaaaattaaatacagataataattgtcacttaatggtcttgaaattgtgtttacacatcagaatttggttctgtgcgttgtcattttcattatgcattcaaataattgcaacacaatcacaatcatctatgtctactacctacttggacaatatttattatactcatttacttcgtataataaggcaactatctcttttttcttcttttggggttgaaattatactatgcaggttgaagatcatgctcgagctaaaacacaccaccaccaacatcacaagaaatgtgtcactaataatggagggtccaacaagactcgtttgaaggaagttagtagtggacttgctacgtccaaggagcttgtgaagctcttgaaccatgtttgtggtcttgaagagcaacgttctttgagcacttcactcttttccgcgctgcgttttgagcttgaccgagctcttattcatgttgatcggtttatgagagagcagaggtcaaagggaggagaaattgagttcttggttaagcaatttgcggaagaaaaagcagcttggagaagtaaggagcgagagaggattcgtgaggctatgtcgtgtgtggctgaagagctcaaggcggagaagaagttgaggaaacaaactgagaggttgaacaagaagattggctgcgaattggcggatgcaaaggctgctctttcgaaggcggtgaaggagttggagagggagaagagggcaaaggagattttggagcaagtttgtgatgagttagctaggggaattggagaagatagagctcaggttgaagagttgaagagggaatcggagaaagtaagggaagaagttgaaaaagagaggcaaatgcttcaacttgctgatgtgttgcgtgaggagagagttcagatgaagcttacagatgctaagtatcagtttgaggagaaaaatgcagctgttgaacagctcaggaatgagcttgaaacgtatttggtatcgaaaattggaggaggaggaagaggagaagaaggtgaattaggctctcccaagtttgaaaagattaaggaactagaagcctacttgaaggaaatcaactttggatcatctcagaaagaagatgaagaaaaagttgaaaagacaacaacaacaacaacaagatgatgatgatgatgatgatgatgactctgctgatagtgatcttcattccattgagctgaacatggataacaacagcagaagttacaggtggagctatgcttgtggagaggaattgaatgaagaggaagacgaagaatcgagaagggtttcggttgatagagatttcaagggaagaaaatccatctctgaaaagattcaatggggaagtatctgcttgaacaaaagtgacaatggtcttgagttagactttggcaacaaaagccagggcaattcagatggtgttgtttcccaagctaagaaacaagagtttgaagatgaattcaagagatacagatcatcaatcaagggtcttgcagatcaaatactatcagggtcagaaatggtaccaattcatggccttacaagtccaagtcgacaatggggtaaaacttaaagctttggttttttttttaagagttaattttgttggcaaagaaaccattttgaaagtccaagctagttatatatatcagtctctaaagtgcctacaattctctcaatttattttgcctttttgagtttcatgcgtttttgttttccaaatagtttggaagcttgcttgtgcttgtttgcattagtcaagtttggcgcaatagtttgcacaattgtaaatacaatattgtaaaatgatgtatgcaatgtccattataatttattatacaaaagcacttttcatgcgtgattgagtaatgaatatatatactgtgtagcttaaataagtatatcattggttgaatgtcaaggacatttgactaagaatatgaattaggaaaagtttttattattaggaaatataacaaaacatgcttgcgttagttaaaaaagtaatacctaaattaaagttaaaatcacaatgtaggtatattttttatatctctcaaaattactctttttataataaaaacctcacctagtctctcttttttcgatgttataaattttaagcatctatcgaactactattgacaactatcagatcactattggaccatttcatacatttatcaaccatcgcaccactatcaaaccattattgaactttcatccataactttcatattacactactatcatacccaccatcgtactacatcgtaacacatacaaaaaaatcacagaaaatacagattttaccaaaaaaaaaaataataaagaaagtacatatcgttcgtctattcgttcgacggtggtggtcgtgggtcgtcgaccacgcaccgaagaaagggaggattgttggtcgtcggtgaagcaacagagggaaccagagagagggagggtcatgggtggtggtcaccgatgttctacggtggtttcaatagtggagtttggtgagaactagagagagggggaagagagaatgagctggtgggaaagagagaataactaaaaaaatgtaggtggttttttaaaatgagggataatttagattatacaataaaatgtgtctataccgctaatatttagcaatttaagtttaaattcttatttttaacctatgaataaaaaatcaaatattatataatgtttctatttcaaattttaccattttttttttcattgcataattaatgaagtgtcaattaagacttcttgattttttttttcctaatattagattttttttaaaaaaaaatattaatgatagatctattgttgttatgaaggtcttttcataagacaaaataatattgaagatgaggatatggtgaatgaatttgtggctgaaacattaaagatgaagagaagtacaattgttaagttaggtggtatttgaaaatgtaatagtgtgacatgttaatacatgatagtgtcacttaaagttgggcaaataatatgtggatatgtactttctttcattgaccgtttctttacttgcatacacgcatcacatacataaacatgtcgcaccatatatttaagagaccgttacattacattacatgatatcctcttagcccaactccaaccacaaaccccatttcggtattcaactttgatccaatactaaaatgggaacctaaatatatagcaaaaatattatatttataagatattattaatacaaaatacaatatatatatagatatcgtgtgaacaatgctacatcaataaattggtcacattatttatttttctcattttgttgtgtgttttgccaaccatttaactgttacttcagtgtgaggttggcaatcgttgaattggacttagactaaaggatttcaagaagaaaaggtgttaaaaaaatcaatactaaattatcatgattttctttgtgttgagaatcatggggttctatctcaaaatcaattggcaatgagtaaagtagtccatgttcttatatatagctcaatacttttacatttaatcctgtgggacaatgttctccaatatcccccctcaagatggtggc

SEQ ID NO: 295743 - DNA, 3214 bp, Cannabis indica
tttagggaaaaaaattactaattagccttataaatattacaaaaatttcgaggcaaacatctcaaaattaaatgagatcacaataacaaataggaaagcaaaaagacataaggatatcatagcaaaacatcaaagttcaaatatttgcaactgacaaacaagtgttcagtcactcaaaaaaaaagaaagaaagaagtgtttgagaccgtatatgcaatctccaggtgaagaaaaatggcggacatggatatcgatacttgttcaaaaccagaaggtataaatatatatatgtctaattactgttattgggttaaactcgaatatgatcaatattctaacattttaacattgctcatcaaaacaaaaaaaaaaaattgattatgtttgaaggcgaagaacagcaagggaaagggaatgctatggtggtaatcttgattggtccaccgggcagcgggaaaagtactttctgtgaagaagtcatgcgcttctccactcgaccatgggttcgcatttgccaggttttgtttgatgggttcttacctgtttgatgaaatgctccaatgggtttatgtttcgtctttttgaaaccccatttgttttgaactggaaattattatatttcagtgattatcataaatacgtatgtagaatgaagtgaagactacgtctttttttcagagttttgccgggttttttttggatgttctttgtgttatctttgaaattggggtctttataaagtgatatattgttagcttgctgtcttgtcttacatccagaatggtaaataggttttcttttcatcgtttgatgttttaatgtttgtcagtttttttgtaagactgtgtatcaacagacatttgctcagagatgtttgtgagtgttggactgttggtattgaacttctagtattgtgatgttcatgatcttttgttttttgaatcaggattatgtcttattaagaacatacagttacattagggcccattggaaattttggatattgggtgagagacagactatggtttatcgtgtgacagtatagaccttgatgagatttttgtacttcactttacattatttgtgttcttttttctgttttatcttagcttctttgtaatagtagtttaaccaagtcagcgaaaaagttggaggcatatctcgattgttactttttactataagtttggtcattcagaataatgtgtttaatatggtaaataaaacttcattatatgttacaggacaatattgcaaatggtaaagctgggagtaaagctcaatgcataaagagtgcaactgctgctctgaatgatggaaaaagtgtgtttattgacagatgcaacttggacagggaacagcgtgcagaatttgttaagcttggtagccccaaaatcgacatacatgctgtcgtacttgatctgcctgctcgtctttgtatatctagatctgtcaaacgaacaggtcatgagggaaacttgcaaggtggaagagctgccgctgttgtaaacaaaatgctgcaaaataaagaatttcctaagcttactgaaggatttactagaataactttctgccaaaatgagactgaggttcaagatgccattaatacatacagtgcacttggtcctttggaatcgctgtcccaaggtgtgtttggtcagaagaagtcagatgctaaagttcagctcggtataatgaagttctttaaaaaatcaggaacagctgaatctggtaatgttggatctgttgcaactagtgatcagaattctgcttctctggaaaaaacagaggataaaggttcctgctccaaagcagctgtatcgttttcagataatgctgttacagagataaatgaacataaagaccaaatgaaaggcatggttaaggatgcttctgcttctctgggtgatgctcccacattggcatttccatctatttccacatcagatttccaattcaatcacgagaaggcatctgacattattattgagaaagtcgaggaatttctggataagattggaaatgctagacttgtctttgtagacttgactcatagatcaaagattttgacgttggttaaggaaaaagcttcaaagagaaacattgaccccaacaagttctttacttttgtaggagatattactcaactttattcacaaggaggtctacgctgcaacgtagtagctaatgctgccaattggtaagctactctgactgcatatatttaagcttgattgccatgttttattcgttgtaaatgcagtaggttgaaactatgatgccaagaaaataaaataaaaatacagaactgtctcataccattggcataacaaatgtctaaatttcaactaagatctgtataataatgtctagttgtaagcatagacaattgaccaagtttaattcatgacataattatgccattgtttaggagttagttgacttgaattggccatgatttagctgaccagaaggttctctgcctatttgtgttgttaagacaaatgcggagtaacggaggcctgttggttggtggattaataacttctaactcctgtaatttattaagttggaacagtcacaaaaacgtatgggttcattcgttagcctttctgtcacccttgtaatgggggaagtaagctgtgttcatataattatttgcatctcaggaaaatcaaatgaaccatatttcggtgcaggcgactgaaaccaggaggtggaggtgtaaatgctgcaattttcagtgctgcaggtccagccctagaggttgcaactaaagaacaggcaaacactcttcttcctgggagggctttagtagtttctctcccttcaaattctcccttgtttggtaaggaaggagtaacccatgtcatacatgttcttggaccaaatatgaacccacagagaccaaactgtttgaaaaatgactatgctaccggctgcaaaattctccgcgatgcttacacatcgctatttgaaggttttgtgtcaatagtaaggaagttaccccccgggaagtaatgataatcttggttcaaagcagtcggagatacaaatacgcaatgaaactgcctcaaagaatagtgagcaaaaatttagaagagatgatgatgaccatgaatctgataggactaaaaagtacaagggatctcatgttgaaactaaggtttctaattctagtgttggaaagacaattcagagtggtgaaaagttt

SEQ ID NO: 295744 - DNA, 1412 bp, Cannabis indica
tttaaatcagctgatgatcatcttcttaaaaaaatcagcttgctcgggaaaatactccagaacttcatctttggttacccaaacaaaatcctcgcacttccttatgttgaacttgttggttgcaataacttgagacttaaagaagaatcgctatttaagcacacatcaaacgaaagaaaaaaatcagtacctatcgatcaagtatacttagttacactattgacaggtcagcaccatggaataagaatatatatccataatttcatattagactatccaacatgacacggaaattgattaggaaaataataccttgagtgatgcagattctgcttgattctctgtgggctgtatagccatgtggcccataggggcattaccaacaaaataagtattggataggtctcctatgacatttttcaacgcagactctgcacactgtaaattcatttgagttatatatcaaagaggacgcagaacaagattaatgattttcaggaagaggaattttcacctttcgcatggtctcttctgactcgtaaactttttcgggaaaatgccacacggccttaccagtagagtccccatttgtggttccatatagaagaagataaagccttctgtcgagtgctctttgtaatgacctgaataaggacatggcattttacataattagtcaaactgtcacagcatctcctgacaaagtgtttgattcaaaatcatgttggaataataacaaattgtataagaagaaagaatgataaaactttgtgtcatcaaacccaaactcaatttaatctcagcacacacagcatgatacacctaatactataatcaataatcctagtgcttgcaaaccattcaaccattggtaaattcatgtacttttgcatctccacactcagttacataacataatgagaaatcagaagctagtgcgatacatggagttttcctttcaacttgacttagaagaatttatcttttcatgtttaataaagtagatgatcatttataagaaacaacaacaaggattgcaagtaaaaatatgtaaaaccgataagaagaaattagttaagaagtaatcactaactataaacataaataaaacccataagactatccaaacttattttatacagaattgccctgccacccctatgagtatgtagatagtagatactataagcaaacaaactttctcacatataccaaattccgcggaaagaattgactgacaagtgacacacataaattataaaactatatgtcatcacattaagagcactatattttgtctgtttaaaagctaaatattaatatgaagctcaaagagtcacaatgaaaaagctcaaagaaaaccctttttaagtaataacagataagataaaataaatataattctaagcatg

SEQ ID NO: 295745 - DNA, 2692 bp, Cannabis indica
aaaaactttaacgattgaatcaaaaaatctaataacatgaacatgaattaatgattactcaggccttagcccgatcagttattgatcatctttatgatatgaattaggtctttatggtaaacggtaagtttgataaagataactttattcatattggtccttatcatatataatctctattatatacaacacctttacatagatgtcatgctatatcattaatccgaatcgagattacttgtaccaaataacagacattagtgaactgcactagcaactattgattaaagattcctaaactttaatatgttgctgactgttttgttcatggctaagtgatcttaattttccgtacaatacaagttacatcctcatgtataaataaagaattatttgatatttatatatagattattcaatattaaatattaataatttaacatttatgcatatatcaaaatattcatattaataatgaaaaatatatttacaagctttcagaatataaaccctaacactacaaccccatattttaattattagtagatctcacactgtccatgaagttagcaggttgacttgtatttttttaaagaaaaacaacctatacaaatagattcaattttttttcactactctaattcaaatttaatatatgatataactattaatttaaaccaatttaaaattattttaatcataatatgatatatatttaataaatatacaaataagtatatgcatatcatttaaaaaaaatgcatatataaaatatacttcttcagtgaggagagagaagaagagccaaaggaacaagaaactgcgagtgccaaggtggactagatcggtggtgttgcgtcaaccgttttagagaagggaggagtggggggctgattgggaccttcagagagattgggagatgggccatggggggctccaatccaatgtgggggtgtggctgttgagtgaatgtgatgttaagtgttttagggtttttaaattttagttaagtctaatttatgtatatattgtggattggatttgcgggcgaatacaggttagacccagatacagtcacatgtaaaaggtcacccagacccgctcgttcatagtgaccgggttcaacccaaacacccctttctacacaggttttctttgtgaatatgtgtcgagtccaaacaggttggttggatccaggttaaacccgactcaaatgttcagcctttcttatagctacctagatacaagatatatatagtttaattcaaaaacgtaaaatattttatatatataattattcattgtatttatattataagtctatttacaaatttttaataaattttagataatttatagtgtttaaatcattgtttaaataattatcttagaatttgataaggtgcatgaggttccatctaaaaatcagttgactatgagaggagtagcacatgcatccatatggtgttatatttctacaccttgaccttagtaatgtgggactataacatccccctcaagatggtggctaattttttctcatcaatcttggacgactagatcacaagtggcaatattggctcataagtgatcacaaacgactcttttattagcttatttttttagactgacgacactttgggttcacctcttttatggctcgtcttttttgaccagtggtacttttgactcactatcccctaatcacaagcgactcttttgactcatctttttggactaacgacattttagactcacaacaaatcacaagaggctcttttggctcgtctttttggacgattattgggtttggatcatatattcattagagtttagtttggttttaataccatgttagaatttgataaggtgtatggggttccatcttaaaatcaattggctatgagaggagtagttcatgcatcttatatataatgttatattttcataccttagtaatgtggaactctaacaagttatatgtgtgattagttttttcatttgtgtggaaagtttacactaatttagatattatatattttcgaaaaaatttaaatttttcaaacactttactataactataatgagcacattcatttaaaaaaaaaaaaaatctttcaatttcattatatctcactataattttttttgccagtcccttattttgtaatttagggaaaaattgtagtactttttttgaaagaatatttcagtataactcctctttatttcggtatttaaaaaatattttagtttatttttctaatagttgtccatgttgaagtttcttagaattactcataaatttttagaaaattttaagtaatttatagtattaaaaataaggttgaaataattttttactatgcatataaagaattaacagtcatactataataaaatatttaaattttatttataatattgtaaataattttttaaaaaaatttaaagtaaccctaaataactataaattataccaaaaatcagagtagagaataccaaactactgatctaaagagtgtactatgttacactgatcctgtaaaatcctataaataagaaaaggatatatttgtaattggacagagtttcctaaacttgacgtaaatgacgaaagacagaggtgaactaaagaaggaaaccctaaactcagatataaaaaaaacacacacacacaagcatgccgtca

SEQ ID NO: 295746 - DNA, 20784 bp, Cannabis indica
tttttttttttgaaaggtaaatggaatgtctattggacatagtccattacatgcacatatttcttatcaagcaaaatcaacaataataggttaacaattacaataaataggaaaaaatattctaacatcatcttcaactaaatgactaataagtctccatctgtgaagcatcacaagaatttgaagaaaattaaatttttatcttgaatgaatatgtgacagatcattcttatcaatgacaattaaccaaagatcttccaataaaaatttgctagagacaccctaattttcaaactagaataaaggagaataacaaaactaaccaaactaagaacaaacatattgaaagatcattccatagaacaagggattaataacaatctaagaatcttccctatagcagagaaacctcactcggaataaaaacaacgatacccattaaaagcataagacaataaaataaataattgctgaaaaataaaacaggaaaggaaaatcaccaaagaagaataatgggatcaccaaacaccaacacatcaaaaattggggcgccgccacaaccacgcagatcaaccctgcaactaatagaagaagcacccagtatctctaccgtgaagctcaaccccgacgaatcaccaacttccaagcaaaaaccccaaaatccaacaccaaaaaatatcgatccaccctcaaataactctttccttcaaatgtacaatcaaacacccgccaaccatagccactaccaaacccacaaacaggttggcaagccaaggccagaaaggagaaaagaaatctcaattggtgacaaactctcaatttcagagagaaccctagactttcttaatgattatttttattaaaaacaattcatccatatatattaaacatatatatatttatatatataaaaacatatatttgaatttttggaatgaaaaaaacaaaatgtttctccataattataagaaaaaccagcgacatactataatgtgtatgtatagcaaatctttaaaccaaaaacatgtttctaagacagggaagaaaaaactacattttacgtggacacgaaaattttaaatggtaatatggtattccaacgaatttaacattttctaatttattattgcagctctttgcattattatctcttggttgaaagttaaaactactagaaagaaacaaggtagaattctgaaataattttacaagggcattcaactttgaatcatactttttttttttaagtttaacataaattccaattgtatttaatgttcttaaaagatttcaaatgaactagtacaagactccatcttcttttctttaacaaggagaattttatgtatcgaggtatattgtaactataagaaaaaaaaactacaaaactcaacagttcaaacgccagtcgtaaggttgatatgtcaccttcagctgagagttagcaagaggctctactagagcttccgacacagccgggtccaagtagttcgaaacaaacttgagtacttctatctcattcttaccgaaatctacactaaacctgagaatcccatgatgaaggagataatattaggcaatatgtaagaaagactgcatgatcaaacaaaatgggaaaaacaaaagaaaagtataaaacacatgttatcattggttacacatagtaacaaacttaccatttcagcatcttgctaagtgatgctactttggcttcaaaatcaatgataactccacccctccttagaaaattacaggctgattccatcaactctttgtcaatgttttcgggcgagtagcatctaagagcaggcccagattggttaccagaaacaagcgcaaagtgaacaagaggttctggatgaggaagagccacctaaaattacaaagacaataaaaaggatgagtgtctatataaataaagtgactgagaatactatttatctttaaagagtttattttgctggccctggtggtctacaagttcaagagttatgacagtgaagaaatggactgggaaaagccatagtgaaaaagctatttaatgaattattgactcaaacgacacaattaataaaagctatacacaacgacatatgcataaaatgacaaaacataagtaaacgacattatatatacttagtaatactactctgcatcagtaaatgatagtatataggatagtataagtatatctatatcaatctgcatcacaggctacataggaagcaatatggacttgcttaatagtaattcctagaaatatacagatgaactcacaaggggccagaataacttttagtttatgacagaagcttgaaaattgatacataattttgctcaagggaaaattgtacataattacgtatctaacaatcttgtcaattagactcgtaccatgataacatatcaatacaaaagacccaaccccattaaaagaagaaaaaagaaaatgactttcatgttacttgactatgaaaaataaaatcgtaccttggaacgtttatcttttgcattaaacggcttcatgagattgtacggtggtcgctggttaccccttaaaattccattttgaatagctgaaagggaaaatgtggatccaccaataacatacctaaagtctccaaacaatcttcttctttctagggctccagttggatgaccccacaacaatatcgcatggatggccatcatattgtatagatttataaagaaagcaagtttctcttctcttgtcatttccagtaattcaactctttgaagctcctccactattctcaaatacctgtgaatcataacaaattacttaagtacagtacaataccacatatgctaacgaaaaataaagctgctattcccacagcctagaccattaaacaaaccttgcaaactcctcactgccataaatactaacataatcaacatgcattccatcttctgatgtgtaggcttcaaaaattgcataagacaaaaacctcaatcttgatgcaatttctgtaataggctttggcttcacatcagttaaaccccttggaatgttgtgacattcagaaacaataggatcatcatctaagaaccggtaaaggtggttaccatcctcaaatagattttcactggaataagcaaaaaccactgatgagaacccatataaaaatacaaagacaaacatactaatggaaaaaaaaaacattttacataatgtgaaacaaagttgtttcatttaattagctacaaatcatgattcctggagaaactgatgcccccttgattatcatcagccatttaaaataaataatttcttttttaaaaaaagaaatacatcataacaaaattgataccttattacataaacttctcctaaaaacctatagtttacatcaagaatatattaattttattttaatcttactctactctaatacttccttgtaaaagcttcttaataatacatataagtcaaccactcattcaaattgatgactcacccaagaacatgttgaaaaaagagttggtctgctagatttctcccaaactcagtagcctggctcacaatacaggagaacaagaaaaaagggaaacagataagaacaaaaataaacctgaaacacatatattagtctgctgaagaaaaacattcaattttcctactaacctcttccctttccagatactgatcttctgaaaagaaatccaccgcttccgaacccagaaaacagctagtgaacctacgcatcttataaaatcggtccttgacggccacagactctttcattttccggacaattaaagcttgttcatcaatagctccactactggacagatcatcttcaccagaaagtggaggcaaaggtgcttcaaatgatggttcttcagtaatcaaataatcaattttctcatcaagctttcctgactcctccagactctttagatcaatcaggcctccgatcaggatttcattaaagaacacctttggaacagcagaagacccagcaatcttctctagctcctgctttctaccggtgtagatatcaatattaatctcaacatatttaagcttcttcctgtgcaaaaatagcctagcctctttgcagtcttggcaccctaaccttgtgtacagtatagctcttcctttcatagctaagtgctgtggtggtccttcattgactgcattcttctcttcagagtttgttggatcaacatcacgagacaaggtaatataagtaaggggattccatgcagacttttctgctgttttctgagaagcttcttcggctccatcaactttagcagactctgaaacattcttatcttgattctcagaaacatcatgtccatcttcatcttttttaccagaaaggcgacgcaaaaaagttgacaccgcaactgcacccttctccttcacaaggttttttaatgccaccgccttatcaactaccttttgggtctcagaatcaagatctaaagatcgggtagatgtgcttctgctagcctccatctcaggaacctctgttccatcaaaaaccggctcttgctcattctcctctccaagagtctcctctgtagtttcatttgtctctttttgagattttgatgcacaatcttcatcagtagattccagagccttgctttcaactatcttctgctccaaattattatttttcccatcattgtcttcttcttgaacttgggtctcaattttcacacagtcattcctctcatcagcatagtcctcttgtttctcatcagcctctatgtccagagatttcatttctgatacaggttcatttttttcaacaacaagtgcttctccctccaacttctcagcagcaagaggacttgtgatttcttccttcattgattcttttgtttccataaagccaactagataaataatcttagttctaactcatgaaaacaaagccctatatgtgttaatacacttgtagtctgtgactcaatagagttatgtagatcctgcaataagaagaagaagaagaagaacaacaacaacaacagcaatgtcataacttgcgaaattccaaatgcatcagatatttctatcaacacatcaagtgacaaaatttcactttaatttttaaaaaaataaataaatgaatttacatacttaataagctctaaactaacaaaaatctaggaaaaaaaaaaaaaaaggtaaatcacttaacgaaaagagtgcttaagaaatagctagcataacgtcagccgggtaacaaaacggatttgtgtgcaacgattaaaccaacgccatacatgaatgcataatccaaattaaaatacaaattaacccattttgattaagcttatttgcaatcattttactttctttaaagataaactgaaatcttgattcaaaattaagatatataatacatgcctaaaacaacaaaagggtattaaataattcaacggtaggttcccaatcagctactaaatacagcatagtatcttgaaataattgttacttctccatcatgaaaataatgtaacttcaacttgaaacagtacccatctttttatgtttaacttctcacccccaatagtccctcatcattgtctaaatcaacagagaccataaaagaagtaacatttattcaaattcttcatccctaaaataaaaccacaactcaaaaccctgttctttactcaaatttttcaacttatgagatattaggtggaaaaataacaaattgatcgggtgtcaatgtccacaaattgtgatgcatgaaatgaaactcaagaacatgaaaagtaaacaatgaaacaaacaaaataaactcacccaaaagaaagaaagaaagaaagaaaagacgaaagaaagcttacagatctgaaagaagtgatgatgatttgtggttgaagattggagaatggtcccaatgcagtaacgaatatatatatatattatatataacgcattaattgtctgaaagtttcaatatttgtattaaaattggaaaccacaggagagagagagagagagaagcgggaagtccgtgggctgaaaattaacatgaaattttggtgaataatcttattcttttttgactttgttatcctaatggatttcatacacgtgtcccctcatcttcattttctctatttcacccttcattcttccaaatatttacaaaattacaatttgtttttaagaaaaaggttaattaagatttttactccatgaactttgacatgtaccaaattatgttcttttaattttttttagaagttaaaaattcttcctgaactattaaaattgttgatttaaggatttttgttcaatttcattcaattttactaattcggtgattatccatgtactaaatcatactttccgaattttgttatctaccaaattatgtccctcgaactttgacatgtgccaaatcatgctcctgaactttcatccatgttagacttttcttactaaaattagacaaaaatcctcaaatctaacaatctaaataattcaatgaggaattttaacggtcttcaaagttcacgaggtatgatttggtacatgtcaatgttcaggaggcaaaaaattctaattagcctaaaaaacacaaaaaaaatagaaaattctacaatgcacccctaaaattggtgcaacaatgtatccctatctgtttcagtattcgaaaagaacttgttagttgttagtctaattttttttcatgatcgtgtacgttgtagttatttaagacatctagtaaaatttaagaaattcgaaataatttataatatagaaagtagtgttcaaacttcaaacaatctattttacacatgtataaaataaaagaatcacaagtgcaacaaactgtttgaaccctatattcgatgttttaatttctttttttttttttgaatttttcataattttacatgatgtcttaaataactacaatattcataactatgaaaaaaatagagtaaaaattttcctaataccgaaataaataggagtgcatcggtgcactctccctaaaaaggtgcatcgtaaaatttttcaataatttgttttcaaggactggtatgtatatacattttttaatattatttataaactttgacaagttgctctttcaaatattttttgagttaatactattttagatgttatattttgtaaaaattaccgaatgaactttttatttgttttaagtgataaattggaccttatatttttaaaaatggtacaaaacaataccatgagctcgatttcgataattttatttttaatattactaatttgaaaataaattctaaaacgaacaaatatagaaaatatacatagccttatcataacacctctagatcaggttattattaaattttattttgagaaaacatctgctcaggatattattttggggacaaccagttcatgtgaaggtttcgacttgtggtaagaggcttttacaatggggtgggagttacatgtgaaggtttccttcatccacgcggaagtatttctccgctctttttgtagaaattgtctaagccatccaactctctttttaacatattttcccatagcccacctccagggtgcacccctgcggctatagtgaacttaagctcatctttggacacttttcctactttggtaacttcgatgttgaagccctgaatgtagctttataaactttcttgcccctttgcttcacattggtgatacttgtgataggcataatgttatcacatgcagcctaatgttgttagaagaattcgtttgaaagttgcttccaagatgtgatcatcctcggtcttggccatgcgaaccatttataggcggctccttttaatgtgatcatgaaatattgacaccttgccttacatgacacctttttcatcttcattagctcattaaatgcaccaagatggtactttgggtcaatggtaccatcatatggtgtcatctttagctcctcgaagttcagtggaagtggtttcatttgaatatccctcgagagaagggattcatcatcaaactactcatcatcattcaagtctcccctgcgtggcaataactatcttttgacatagctcttgcatttctgcctccaactccatcctttctcatcctctctcgggggttagcaagtggaacttgggttttttgtatggtttttactaggcattgctcttggggaggagccctaggcgaggtgccctcagtataagacctcttgggtgaagtctcttccttaggttatgggtgtttccctcagtgaaatctccttatggtggataggctcgagttattttaactggttcgttgggctcttgtctcaggataggttccttccatgttcatctcttggggtgctattagtggatggcatggaatcacctttgctagcatcggccagttgagatctcgtttcccatttggtggcttttgtgacagaaatgtgaggcttaggttttgcctttgagtatatctttcaacacttttagcataccagctacagtagtttctagcctcttgtccttttggaagaggtcgcttacttcttcttcataatagtgagctcgagagcttggactcatcgagcacacatgcttttcctttttaggtccacgctttaaagggtcagggtttgatggcacagatggtggaaggcaccataccagagatggctttctcagtagttgaatacttctatcgatggggttggccatcaatgtcgttatcaagtcacgtagtgctggagggcctctttgagtgtttgcttagtgttccacactttggttattcttcctttagccctctctgacgacaggagttgatgtcctcttacgatggtggctagctggttttcatctgagtgaactccattttcttggagacgatgggaatgtcttgacatctcgaaaaggatggtgaatggtttaggaattatcgtagctagagcttgtcgttcccacaaatgatgctagtctgttgatggaaaaaccttgtcatctaaactttagatagaaaattaaatgcaaaagggtgaagatgaaaagcttaagaggaactcaaaacattaatggagaaaaatagtgttgtattgaatctataaattcacttacaaatgattattttccaaccctttattcagtggaagagagaggtatttatagggagctctaatggctccaaaatacaagtggtcccaaaagttgggggacaaaattacttttataccatgaagatcaacacgtcagatgggtagtggtgagatagttgttgggtgtcagttgatactctgagtgagacaaatagttattgggtctccactacttgtgcttgttgtacaacctctacttcctcagaggcgtgcatgctttaacgactccatcttttgttgtacgttgcaataacgttcctctctttatagcttacgctcatgatgcatgtataacacttaagtactaatgggtctatgagaagtgagacttgttgttcaaacttaataagaacttcctcctcatccctttcggagttactccaatgtaacatatatactctaagtgttcttgctcatttgtatagatgagggtgtattaggtggtgactaaggggagtgagtgagtaagggagcaagagagagagagagtggtgactaaggggagtaagtgagtaagtgatcaagggagagagagagtggaatagagagaaagaggagtggggagagagagcggagcgggaagctcctcacgcagggagctcaacccgtgccttggcccttcctcatgttggctccccctcttgtgtggtgtcccgccatgatagttgacatcttcttttgttgtaaagtatattttggatttttcctctcactaatttatagatcttcaaaaattacacttaataatttttgggagttaacatttgtatattacttttatgttatttagatattgttttactattcttcaatgtaatttttttatgttatttctgtgttatttttataaaacactataaaaatatatataaaaaatatttaaacatataaatttttttaccaaaaatgtataaatttccaattaataattcagtttaaccaaaattaatccaatccaaaataccaaagtaatccttataattatggcatcgttgccaattgccatttggtaaaatgtaatttcatttttgtgtttgctatagggtaaataccattttgaaccatgtgttttataaaagttattaattagaccttctgttttattaaatgataaaatagaccctttattttctaaaatggtacaaataggatcatgaattgattttttgtcaaaaaaaaaattaaattataatccgatctaaaagtgctatggtaaaactgtttacatttttttgtatatgttcgtattaggaattgtcttcaagttggttatattaaaaaaattatcaaaaattaaactcaaggtactatttttaccattttagaaaatataaaatctattttatcatttaacaaaacacagatagtaacttttgtaaaacacaacgtctaaaatgttatttaccctttattatattatatttgtaagaggggagagcaaaaaacaacaaacgaagaagcaaaggaacgaaactcaaaacatgtgagtggcgtagctttataaacttatatgctttctcaagttatctcttctgttcggccaagcaaattcctaactctccttccaattactccttcatctcatgtgagtactttactctcataattgtttgttcaaattcaagatctcatcttaggttttccttttttctgagtttcatttccccttgatgagtttgaaatttgattttctcaggaaaaggcaaagaaaaaggggaatgaatgaataaaaacttaaattaaattaatcaaaataaaggattggatgagaagtacgacaatgatccggaaaaccaattgttgtgccatttgcgagaattgcaatctcgcttctatttgtgtcaattgtgtaaattataggtatgatcatcatcatcatcttcttcttctcttatacttcacaaatttatgattttttttggggagttatttattttgaatataatttgcattgaaatcaatgttgtgtcaaccagattagctgatcactacaatattttaagagcttccaagagtcgtcgcgattcgttattttctcgattggaacaagttcttctagcaaaggtttgcttcaatctttctgatataaataaataaatataattagaatcaagagctaaaatttagctcatataaaatctgtatatatatatggtgggttcaacaggggaaagcagatgatcaagtgaattggagagtgtctcaaaaagaaaaaattgcaaatttaaaggagaagctccgccgttctaaggaacaactcgtgcaaggtaacggtcggcattcacagctctactttaatacattttagttttaccgatattgtcacttcagaacaacttctatttttttatagggaaggctagggctgagaagattcgttatgatcttaaagtaaagtctggagtacttgagtcatctctttccatggtatcaaggacctttttctgtttaatgcttgtaattattgtttaatcaatctccttatgggataaagggagtaaagctaccattttttgctaagctatgtgcatcgttttcctctttgcagttggagaacaaccgcgtggaacagctggagaagttctatcctaattttatttgcactcagaccttggggcatgtaaatattctattgctaacttttatgatgttctttttcagtttttcttataaaagacaaaaaaccaaaagaagaattacctgggaaggaaggacactatatgctaatcttataggaacttttgaagcttaacttgcttgtaattttgtttgttaatatagttgttcagttcagtgttcattttgtttgaaagtcaaacttctgccacatttgtacgttggtatttgaaattcttctagtgtcctacacaaattttctattttaattttttttaatgcagatggcaattacttctgaacgtcttcataagcagtctgtggttataaaacaaatatgcaaattgtttcctcaacgccgtgtaagcacttctgatgatggatttatcttgatattagtacaagctacatttgtgtgtatacatatatccctgtgtaggactaagtttctgttttgtgtatttatttatgttcgctggaaggattatacggcttatagtttctgtgtataaatttatatatattgatgtatatatatattatttttgtttgctgggtaggagagaactattgtgattaacttgattatcatttaaatttattggaaagaaaagattatatctctcttaaaagttgaatcctttagttttcaacttatgtaggttagcttttgatagttctagccactttccttaaaataagtaatctttgttttcccctctctcttctaagacacttagctgcatggtttggtctgaactcacctgttactataaaagtgcctacactaatcgtagttatttcgaagtagagttgctattagatcttaaagactggatcgattagactggttcatggtaaaattacagaaacataggtagcatgacatgtaacattacagttttagtatgttattattttctagttcaatctatagtttggagtgcctttgcaaggctgcattagagttaagtttttacagacactgatattttctgaaatataaggttactcatttgttgtttaggtgattatgaatggagagaagataaatgagtcaagtgaacaatatgatcagatttgcaattcacggttaccgaaagggctcgatccacactctgttccatcagaagaacttgctgcctcattggggtattcctttattctctattaggctattactatattgtttgttgcctatgtctactatctgtcatccttccactagacaacttgcaatttttcgtgttttccttctgcgattccttcacttttaagttactaaataatgctattatgcactatgctagttttgttattcatgtgtctgactctatttattgctgaccacggttgggtaacagatatatggtgcaactccttaatcttgttgttcaaatcttggctgctccatctcttcataattcaggttttgcggtaagctatgctggattctccatgttttttatgaagagaaatgacaagacaataatttgatttctttagtgttgagttttaccattgatgaacttaatgtgggctttgggagtaatgatgtgattcttttgcatttgactatccataattcttggttgtgtcatgttattgttttgaatgtttggttgttgttttcgtatggaaatacatccgacatattgtatgagttcaatatatatattatgctatcgagtattgatagatactctcaattacacactcattacacactatgatgtgctattaatttcaactatacaattaaatatgatgtagtctccacttaaaaatatccatggttgagattaattgcacagcataatgaggttgatcatgtgcatatttttctgtcaatgatttccagttttgtactaactgattatatttgatacaacaagcaactatgatcttattcttgcctttcgaaaagtgttgaagaaacttaataagttactattcattgaagtctcctatcctcttaaaataatgggcccactatcatagtggttgtttttatcattacatgtaggtacttttggtgttattggtacatgtacaagttgtaactccatttttttacataacggtataatgtagctacagttgacctcctacaaatttttaggaaattccggataaataaagatatcgaaattagtattaaaacaacttgttgtgtgtgcttataaatatcggaacaagcacgcatgcaaaaagttgtgtgaatcctattttcctaacaatttgtgagaagtccctataaatacattatacaccgtcatgtaaaaaaaatgaagttgtaatttatctgagtaccaaaaatactaaaagtacctataaatagtaatttaaaaataattcctacccaaaaatgcttcttaatcttaaataattatatatagatatatatattctctctagccttcataacttgtgttggagtttaaccaataacttggtatgcataacttttagagctttttcttaaacaaacatctgaaggttcttcaatgccatcaaatattcatgtatggattttctttgtgttaaatttatatactgtttctcagggttcttgctctcggatttggcaaagagattcttattggaatgcacgtccttcttcacgaaggtatgtgattgtaattgctatatagcatggagcacttggctttctcagattgttggactaaattaacttagtgttatgcagtaatgaaattgtttcatagcatggagcacttgggtttctcagattactggactaaattaatttagtgttatgcagttatgaatatcccctatttatcccgcgtcaaaactattgcaccactactggagaaaattcatggtcagatagaagctcaagtaattttggtgtaacttcaatacaatcggagaggaaggcccgcctagattcttcaggaagctttaactattcttctgcatctccacattctgttgagactcacaaggacttgcagaagggcatagcacttctcaagaaaagcgtggcatgcttaacaacatattgctataattcattgggtctggatgtcccatcggaggcatccacttttgaggcatttggaaagttattagctacattatcttcatctaaggaactccgttctgtttgctccataaagttagcttgttcgaggtacattacacacaaatatcttaatttgaatgctgtcggaacatcatcatcatcatttgtttttttttttctcttttccatattttatttgccttctctatgcctgtatattattgtgagggagggatacacaatccttgttgctctgggtttaggcaaatttaattttgtagagaaatttccttatcctagcctctcaagtttagaattttaggtttgacccaaggatgatagctcgaacggtgagacatgtggtgtgctctcacaaagtatgaggttcaagttcctcctgagtaagctcatagaaattactaatttcttggtccccaaatattgtagggttaggcaaggagccagttccataaaaagtcttacaacgggttttgattactttttaacgttttatttccatgccatttcctagataccatcttaattttaggttgctagttaaagaattatagagagacagttgatcagattctatttttcatcttaaagcaatctttctttggaattttcaggtccaataagcaagttcaacaactaaataaatctgtatggaatgtgaattctgctttttcatctgcctcgatactggacagtgcacatgcaatgacatccacggtacagagcttgcttccatttctaatactttttttcctcttcatgtctaattctatttactttcaaattatcataatatttcattctttctatgctttgttttcctgcattgggtattctttcctctttggtagtaattttttgggtaccctcccaagaatctgatcaatgaagttttatcatgtaaaattgattgtttatcaacaaggtgatctttaaaagaacagcaaataggcctaagttactgtccaaaatctaacgaggcagtgaagtattttaagtcctctgtatcagttttgtactgtgcgcatgttcttgggtttttgagtcggatttttttgattatgaatttttacaacgttagggaaatgagaaacattacgctctactgtattttgggtgtgagaatacaaaacttgatcgtctaaaaaagaaaaaaattccatgcttgcagatcatttgtgaaaataaccttcctaatcctgccaccagctttctttatgccacggagttgtccgaggctggaaagaatgaaagcttatttgaaggatgggatctcgtagagcatgcaacttttcctcctcctccatcagattttgaggatgttgagcactggactcgagccatgttcattgacgctaataagagataatttggtatgtgtattttttttttgacacttattgcaagtaaagtaagaatgtgaattatttcattgagaactagagatgagattttctcattaacctacgaactcaccaaattgtgatttggtcccttaacctttcagctaaggattcttagtggggattggggaaccctctctcatacattgtgaatagccgaattcaaatcaaaataaaacatttatggtaccatatctatggtgtcttataccaatcttgagaatttggtaccaggttatttaggaatgtagttctatgctgcaacttaatattctagcctgtttttgtcttcttaatattcttgtgtgtttttcactttgtcatatcttcaccatctggctaccaacatatccttatgctttcctttctacagattggtaagaagaaagacaccaaactgaaaccaaggctgagtggaagactaagttatataaacttttgtggcatgtttgaagacttatttgattgtaaatagaaaacatttagatgtcttgtgtatagaaagtaacttcatattgttatatttataatatattcatattgttaaattataatatattttgtatgttcagggttacttattattcttaattcaaatcagaaaatagatgtgggctcggtgaaatgtgaaaaaaaaatgtggactataatagcaatacttattattagagatatggtaaaatacttccactttcctttcccgttcacactcgaaatgagctgatttaagatgttttggaaagttaaaaaatagctttattattttgtatttcacaatctcttggaaacaatgaaggagataagctaaaaaattagcttaaagatctgtctattacaaaatatcttttaagtataaatttgcatagtgaaaacacattaaatctaaaatataactatgataaaataaacaaatttggttatggatatcaaatataactatgataaaattaattgagcatattctttctttccttttacttctttttctcgtttctattttgtccttttccttttttttttccctaactgtgacctaagtttctataaattttttttattaattttctctcttcctctctttttctcaatcaattctattatttttaaaaaaaattctgattacactattaactctattaactattttggttggaaaatagtatcatgatgtatatttcaaggaaattattttgacatgtaataagcatattattttttatcacaaaaaataactaaaataaaaagcaaccttgtagtttcttttatactttattaagataaaagtaattaaattttaaatttaataaaaatttataaaactaaatttttgttacttatttctattagtactcttaaaaataattgttatctcaacttgagaccttacaacaaagtaaaatttcagtacaggtcccaaccttacacttttattgggtataatctctatcacaacggctataacttataagtgcctttccaaaaatgcagaatgtacattttcagggatgtactctttgatgagaatatctttctttcttctcaaaatccctcctctccaccttcctcatcttctgtatcacctccaaaaactgttgttccacctgttgtgcatattccatctcctccactggtctcaccagaccttatcccaacacaacatgttacaccacgtgtttcatcacaatctgacactgaaccaactgttaccacacatgcagatccatctattattcctatgttactaatgatttacttgcaggttctcttcctacctcatccaacagatgccacaatgatgcttttgctccaatcatcactcaaccagcttcatctacttcgactgatattgttgctagagcatctcagtgtcaatttggctctgtagctcctactacaccaacagtaacactgaacaatcaacatccaatgaaaaccagagccaagtctcgcatcaaaaaacctacggtgcttatggcagccctcagtccaccctctctcaaacatggctttgcaagatcgcaagtggtttgttgctatgcaaacagaaaacatagctctaaagaagaacaagacttggactttggttaaacttccaccaaacagaaccctaataggctgcaagtggatttatagaattaaagaaaatacaaatggtactatcactactttcaaagccagacttgttgctaagggcgtccaccaacaagctaggtttgatttcaataaaactttcagccctgtagtcaagccaataacaattagagtgattctaacttttgctgttacaaaaggatggattgttagacaacttcatgtcaacaatacctttctcaatggtgactttcaagaagaaatttatatggcccaaccttctggtttcattgattcaaatgagcctgacaaagtcaacaagcttcacaagacattatatggcctcaaacaagcttctcaagcatggtttgaaaaattatcttctaccttaacaagctttgggtttactttagctaaaacaaatcactccctgtttatcaaaatatcctctcaatcctacatctatattttagcatatgttgatgatattttaatcacagaaagtgatagctcacaagttcctgctttaatctcatctctctgtactaaatttgctttgaaagatttgggtacagtggattatttcttgagaattcaagtggttcctattgctgatggtatcattctttctcaacgaaagtacattcaagatctctgtgcaaagctgggatgcagggagtgaaaacacatcatcaccatgaacaatggccttatgctttcaaactaaggcaatgatcctgtcttagatccttctgcctacaggtctatcgttggtgctctccaatatgcaactattactagacctaacattgccttcagtgtaacaaggtttgtcagtttatgcacaacccactgcaatctcaccttgttgatgtcaaaaggatactaagatatctcacagggtctctagactacagtttacacctaaaaaaggaaattcacttcaacttggaagcttattgtgatgcagactgggccgcagatccgaatgatcagaggtccattacatgtttctgtattttttggtgtgatgataacttgatcaattggtagtcaaagaaataatacactatctctcgctcctccacttaagctaagttttgaagtcttgcctctgttgtgactgaattaagcttgcttcagtccctcttttcagaatttcacatcccagtttccactcctccggttgtcttggtgtgacaatctcaacaccataatgcttgcagccaacccaatgctccatgccagaactaaacatattgaaattgatctctattttgttacaggtaagctcaagaaagaaaactctgttcaccatgttcttgctgaccatcaattagttgattcactcacaaaaccaattttcaactccaagtttccttttttgagagacaaagttagtgtggcttgctcaaccacactaagtttgaagagggctgttgagaacacaaatccagctaagctggcaccttatagttagagttggttaggagttatgtacagttagtattttttgttaaaattagttattttgttatctttctggtttgaactcaatatagctctatatataaactatgtattcatcttctttaatcagtaagagatattcatttttttctttcctttctttaatctctacatattctaatgcaacatgaaaaaaaattaataatttttattaattttttagtgcattttaaattttatttcattccattcttatttctattcttattcttatttatattcctataatttcattcttcccaactaatctcgtgaatcttctttaatcatagatcgagaatgaaaattatttataaattaaatataaattcttgatggtgatgatgattgatatctaattttaatttgtggagattagagaattttccatatcaatagcgttggaatatgttttttttttccatggactcctaatttatttcattttgtcttctaattatacatgctttactttttcaaaaaactttgccgaaagttcttccacatgtttttttttttttttttcattttcgaaaccctcttccttaccttttgtttcttagctacagaatctttcttaaaactataaacgtggataatttgttccagttttctactgtccttatattatatataaatatataatatatatgtatttattggtgatcatataaaaaaaaacaggagagaagcttcgcaattatttatctttactgtcgtttaataaagaaaaatatatagtgacagaataaacaaattataattttttttgttaggaggagtgttaccgtcaaccttctgttataacttcttagtcaatttctacactcgaaaatatatgtcggaatatttttttttcaaattttttttcacgagggtgttcgttatgcttacaacatcatccctgtaaatttttgaaaaatttcaaatagtttaccgtgtcgaaaatacgtttgaa

SEQ ID NO: 295747 - DNA, 5042 bp, Cannabis indica
aggaaacacaacttaaatgtgtgcaagataaaaaaaaaattaaaaatcaatctctaaattgttgataattgaagataatatctatctaaaaattgtacataagaaaaataataatactcataggtgaattttaatcttcctttgtttcggcagagataatagtgtaatttttgtattttgcactttagactaatatttcaccaactgaatgagaaacttataataaaagataatatatacgacactacacataatatatacaatatgatgactccttaaaaaagagaaatatttagagtgtttttggaagtcattgtgaaataattgggcttgcaatttctaagccataattaatgaatattgaggagacaccaatcgaccatagtaaactactagttaaaaataatggtagagcggtagctcagttggagtatgcaagtgttatagggagctatatacgtttcacaatgtacaaggcccgacatatcatttacggtgagtaaacttagtaggttaatttactagtaatccaagtgtggatcagtagaagagaatagggagagttttgggttatttaataagagaactaaaaacctatgtcttcactactccaaatttctttaatactggaagcatatatggatgcaagttggatacctacctttggggataatctatctacaacgaattaggtatttgtccttggtggaaaggcaatttcttggtggtttaagaaacaaactgacatttctcattccacgatgaaagcggagttaatagctttagatgccacgggaaagactatcgatctagtggaaaagactattaaagggataggactacaactccataaagtggttgtcacaaaacacagttatatcttctacctttattttcagttcatgtgcaaacccttttagccaaattgcctcctttatagctttagtagtttccatatattctgcctctatggtagataatgcaagtaccttttgtaggttttatttccaacgcacacatccacctaatactgtaaaacaggttcctgtaaggcttttctttgtatctatgcttccagcataatctgaatctacatagcatgtcatttcacaaggtgatatgttgtctttgatgaatttcaatcctgcatctagagtcccttgaatgtatctaagaatccattttagagaaacctaatgttcattgttaggattggcaatgaacctactcactacacttatggcataggccagatttggcatagtactacacaccatggaatacatgaggcttccaacacatgatgcaaaaagtatgctactcatataccttttgtccatctctatttgtggtgattgtgcttgtgtgagtttaaaatgaggagcaatgggtagttacttgtttggctttatccatgctaaacttgtctaggaatttctgtatgtaacctttctaagacaaaatgatgtactatggccattttctgataatattaatttccaggatcttcttagctcttcccaagtctttcattttgaattcactgctaagtttcatctttaacttctctacttcagttctcaattttcctatgattagtatatcatcaacatacaacagaagatatacttgatcattgaagtagacgcatgggtaatagtttctcttgatgaaatcaatttgaatcatatattcatcaaatcttaaatccactatcttggtgcttgcttaagaccatactgtgacttcttaagtagacacaccttattgttatctaagttgtatacttcatatccttttggaagaatcatatagatctcttcattcaaactcccatggagaaaggctattttgacatccatcttatccacctcataatcaaattctgcaaccattgccatcataattttgacaaaggttgtttcactacatgtgaaagatatcattataatctatacattctttttgactgaaacctttagcaaccaacctggctttatacctaacctgacctattccattgtcacactctttctgtctaaaaatccacttgtagccaattactctctgaccttgaggtcttcttaccacaatccaagttttgttctagatcagtgagtccatctcatcattgattgccatcgaccatttctttcttgctttgctctgaatggattatgcataattggtagggtctaagctttcaatttcttcaataataacaaaggcaacagctatgctgtttgatacaaaataatctgcatagccaagtctatcaggtgcttttggttgccttctttccctgtcccttgcaagttgatagcttctcaaattctcttcagtataatgtgtttcttcatcaaattcctgctctacatctgcaatttatagcaaaggtgcttttagagtatcacttgtttgattctcactagtttcattgtgatccacctaaacatgtaccctgctactctcttgaatcattattggtttctaaattggtttcatcgccatctcatcttccttgaatactgcatccctgctgataatacacttcttatgaccctcttctagacactgtaatttgtagcctttcaaaccattgggacaaccaaggaacatgcatttcaaggcccttggttctaatttgtctggtctgatgtgcgtaggcaagacacctaaatactttcaagtggccataatttggcttgtttcctatccaaatttcttatgttgttttaaaatttaatgcaacagatgggcacctattgattaagtagcatgttgtttcatagcttcaccctagaagtgcttttgtaagccaactccttttaacatacatctgacctttttaagtatagttctatttattctttctgctagtccattatgttgtggtgtcttgaacaccattttgtgtcttttaattacaactttagcacagtagtcactgaattcatctaagcagtgttcaagtccattgtttgtcttgagtaccttcaacttccttcctatttggttttccattaatttcttacgtttgttgaaagtttctagagcttgattcttgtttttcaaaatggaaacccaaaccttcctactgaaatcatctatgatgatcatgaagtagttaggacccccaagagtttgtccttgaaagacctcataaacctgagtgggcatagttgagtggttccttagtaatatgtatattagtagggaatttcaccctacaactctttcctagtgcacattcttcaaagttctaatttaccattcaatttttctcttaacatgccttgtttctctaattctatcaagcccttttcattaaaatggtctaatctcaaattccacattctagtatagttatcactcttgtcattcaaagttgcattagatgttcccataactgcctttccattaagaacatagataccatttttgatatcccctctcataaaaactagcgaactcttagttactctaagagattcctcaatcttaatggaatatccattagcagctaattcaccaatagacaaaatattatcttaagttcagggacatacctgacattcttgatagttcccttgatgccaggatgcataacaaacaacatagatccaattttcttaatcttgcatgccttgttgtttcctaggagaatatttccaccttgtatgtccttgaattcacaaaacaaattattgtgtggcgtcatgtgaaatgagaaaccataatctagtattcattcttcatcagactctttgttggacacaactaagacatcaacatattcatatccatcctttgcaacattttgatttacctctttccatgcttttgcttctggctttcttagcttttaaggcattacattcatctctatagtttccttctttcttacagtaataataaaactttttactcttgaatttggattttgatttggtctggctaccactttggttcatgttcttgaattctctcttatcagttctatccctaacaattatgtataccccatctcctcttgattcccctttatcttctaatttcttttgtatctctttggaattaagtgcaagtttgacttttgacattgttaacaagatcgtatctacaaaatgctcaaatatcttgggcagagaacttaattgaatgatagcttgacccctttcttctattttgacaccaatattattcaaattaagcacaattctattgaattcatccaagtgcttcctcaattccttgcagtcatccattttcatggcatagagtttcttcttcaaatatagctagttggccaaatatttcttcaaataaatcgatgtcaatttgatccacaatcctgaggttgtatcttcatcaaagatttctctcaaaacttcactccaagagttaagaggattgcactataagctctcaattctgtctctcttcttgtcttttcatctatgcaccataaattgaaatcatttgtccctgtaaatttatccacttcgaactttgctgaagacatttttagattgtgttatttgaatcttgaaacaattcttgaaagctaaacctcttctccactgaattctgatgccattgctggagtggtggaaggcgatttattggaggacattataaaaatcttgataaagatttagaacaataaaaaatggaagattgatgaaagaaacatggagatgaaaagaatgcagaataaacaatacatagactaatacccaaacaaacaaataataagtaatctgaattaatcctaacagagtgggttaatcttgatcaagtcagtaataaaatagaaacatatacaaggctggaaaaatcgaaataataaagaaacctatgaagtctaatagtctatttacagcccaaaaagaaaagattaaggataaaaaggataaaactataatttttttaaaaaattataaagtattgctataatggacaaatatcgtcatacatcactacaagaaatgtaacttttaccagcacagttcgctactgcgttggtaaaagtaattttt

SEQ ID NO: 295748 - DNA, 2126 bp, Cannabis indica
agtaagttattcactctaactcagctcaaatctcaccctttcatcatcacatgtagaaatgtagtgttaaatatatataaataattaatttgaaagcaccttggtgcctcataccaatgttcaaaagtaaaagaaaagcaatctagaaatttcttgttttaattgcttctaaatagagatgtttctcaaattgtttcaggggaaagagttcatagcaacattaccagagttgctgtcatgacgtggttttttgtggttttcatcctaactgcaagttatacggcaagtctttcatcaattctgactgtgaaaaaccttgaacaagatataaatattgagtggctaaaaaaaaccaaccagaaggttggttgttatggtgattcatttgtaagaaattacctggaaaatgtgcttcaattcactccagataacataaaaaatgttccagaggaagatgattactcagagtggtttgataaaaaattaatagctgctgcctttcttgaactcccgtaccagaaagtttttatcaacaagaactgcaaaaaatacaccacctcctctatcacgtacagatttggaggattaggctttgtaagtactaagataacatagtataacattattagaaatgtatacgtgaatgcaagtagtggttgtgctgtgctattttcaaattattaacatgtgttgggacacatttcaggtattccagaaggggtctccactaaccaaagatttttcaaatgccattctaaaactatcagaagatggaaaaataacagcactagagaaagaatgtcttacaccagatgagtgctcatcaacatctatagaaactgaacgattaagccttaaaagcttttggggtatctacctaacatctggagtcacttccaccatttgcttactcatatccttggttcgcctccagcggaactaccggctccatcagcaagcaaatggtggttgtcaaagtataaaaacaaacgcttttggattggcaaaatatttctataacgggcagcacatatatagtccaggaagagtttcccctactactactactactaatgtttctaatcatgacatgcctaatctgatggtagataattcttcaagctgggattttgtgaacacatctaatgagggtttagaccatcctgacacatcttcccctgctacagttgaaatcacaactgtttagattcattattttagaattttaggtgtgtataaatctcattaaagatgtaggagcataattttaagggaaatgtagatgtataaatatatacacggttgaagatacctatttttattacctcaaattttgctgaaaattacatgtaaatagaatagtaaataattcagtcattcttcatgacaaacaaacttgcaagctcattgactaaattttaagatgagatcgatcctttaaacctaagtacaagtaatgtcatcataacattaatttatcccaaaaatatgaagttgctgttgaataatttttttttacaacttgagatttttgcttcgaagctaattatcggattcaacaagttgttatattcctttaattgaaactgtcaacatttcagcatctgaaattctgaaaaattttgtggttgttaatatcagatcccttatgtaacctaaacttcggaagcaaaatccttcggtatgtactagatgacatatttaccctcaactcattacaacttacaacagaaaagaacacaatacataaagactattgaccttaaaaagtgatcaactgacagcagagttgtatagatttgatgcttgccacgtgttacacaaataagaataaaaaataataaacacagagatttattatagaggttcggcccccttgtgatagcaggtaataacgtattccccttttggttgtattgatacctagaaataatactattcagatcgctataggtgggatctgatatagctatctataaggatacaaaatatgaatcagtaggcagatctctaatgagagagtgagattgccttagaggcgtgtgagagagatgaagagaggagagagagtcctattgggcgtgagcaagacacacacacacacacacacagagagagagagagag

SEQ ID NO: 295749 - DNA, 3433 bp, Cannabis indica
tttttgtcacagcttttttgaaaaaatagcttttagctttttcaaaagctgtgccaaactggctctaagtattggtaggagaggatgtaatctttgtttgagcactcttgtatttttgcaagtaagtaattatagaaggttccacatccaaaccagtgaacttgttatctgcagaaaggaaattatttcgcttgttacaaatagcccataaatatcaaaaaatacagctaagtcatctttgttgaactcatcataacctcttagcagaaattctttaatatcaccatatttattattgtagaaaaaagaagagaatctagactgtttccaaaacttacctgccctggaacaatgcaaaagggagtgagtgttagagtcgatttgatttaagtagatggaacaatatgagttatcaagaatttttctaaagaaaaggttaagctttgagggaagtagatgattaaaagcattccaaatgaagtgtctaatttttggggggggatgttagaagaccaaaatgacttccaccaaggcttaagagcatcaacattagaagtattgggattggggttattagggtttgcaagatggtaggcggagctgagtgtgagactgcccaaagggtcatgtctccaaatgagacagtccctattaatatgatagatgggaacattgaggacaaaactaatagtactttcatcaaagaaatggtttagcttgttaacgtcagtgtctatccgccctaataaaataagacacagtattctcaggtggataggaatcattgtgaaaagagatattccttgagtgagacaaccaattcggactagcaatttcagctgacttgccatctccgactttccaagcaagccctttagaaagaagattcctaccccaaaggagacttctccaacaaaaagattgattatgaccaatagaagctcggagtaaattattttggttgaaatatttagcttttatgagagaagcaacaagggaatcgggattagtgaagatacgccaagcttacttggcgaacatggcctgattatggtgaacaatatgatgaaaccaaagaaccccataaaattttgatttacagagttgatcccaatttatccactggagcttatgcttattgcccaaagatccctaccaaaaattagccatgaggctgctgaaatgcttacagattgagataggaagcttgtaacaagacatagcataggaggtgatagcttggatcacagatttaagcaagatctgtttcccggccttagaaaagagttttttattccaaacagataatttattgctagctttttggagaaggaaaaggaaagaggatttttttgaacaggagaggcattggggaactcctagatatttgtcaatcaacagtttattctccatattaagagaattgaggaaaaaagatctatcgaaaggggtagtgttaggggagaagagcatggaggatttagctaagttaatcgtttggccagtggccttattatagagaagaaggatgtccttaatagcttcacaattgtgagctttttcctgagtaaaaagcaaattgtcatctgcaaaaaagtaaatgggaaatagaaggagcagaacgacagatggatatacccttgaactggttgtggagggttttatgattgataatagcagaaagtccttcaacaacaagaaggaaaaggtatggtgagagagggttgccttgcctaataacatgagaaggttgaaagggagtagacaggttattgcttatacaaagtctaaaagagacggaggagtcacatctaagtataagagatatcagctgagtagggaaggctagatgatgaagaatttcacggacaaattcccattcaactttgtttaaggctttttccatatccaacttaagtgtgtccaaacccaacttaccagattttctgttggaaatagcatgaatgacttcatttgctatgataatattattaaagataatgcgattgtgaaggaaagctccttggttatgagagataagatcattcagatgtttaagcctattagcaacagtcttcgaaacaactttgtaaatggtggagcagaggctgataggccagaaatccttaactctagtggcattcttatcttagggataagaacaaggatagtctcgttgataggagcaatgttggcaccagaattaagaatatgaagaacaacattgcaaaggtccctcctaatagtggaccaattcttctggtagaagaagggatttaagccatctggcccaggggccttatccctagcattttggaagagagcccatttgaattcagaaaaatcgaaaggattggccagatagtcatactgctggtgagtgatatgcttggttacacccctaagaacaatgttaatggaagccaaatctgtaccctttaatgtaaagaggtcagaataaaattggacaaagctattggtaatgtccctaagactggtgatagaggagttgtcatctaaagtgatggccttaatgaaattatttttctttattccagaggcacgattatggaagtatttagtgttcttatcaccagccttaagacaattagccctagactgctgcttccaaaaaacttctgatttaagcaaaagcgcgtctaaagaagattgaagatgattagctttgttaacaacattcggagagattgaaggactggagtaaatactttcaatagacgattgtaaattcttgatacggttcatgaagttgtttttgtccctcccccaagaaatcatgttaatgatgcaattattttgtttattaagaaaagagtaaagaggagaggtgaactgttctgattcctatcaatagaccagctatcatgaatcagattgcaaaaatctggctccatgagccagtgattctcaaaatgaaatcaatgagcagttctgatattacgagaattattatcataatcaagcttaatggccctatggttacagccataaaagggaagatgatgaagagaagtagtggggaaaagggtaccccaggccttattattaattcccaatcaaggcgctcaagaagagtgccatgcttccaggtgaaatggctaccggtgaaaggaaaatgagatagattatgtttagacacaaaatgttaaaaattatgaatggcatgagaaggtggtaaatagttgctattgttggaattattttaccaggatctagatttactaacaagtatgtttgattaacatcctaatatgaattctaaaacaatgaaattaaacacataagagttcaagaaaccttacagtgggtgcagctgaatattatgactccttccattcagatctctaggccttgattgctttttgtagcagagcatgatcaagatctgaatctggatcttcttttctccttc

SEQ ID NO: 295750 - DNA, 5637 bp, Cannabis indica
gcgtttatatattacaaccatactcgaatccaggacctccaaaacacacacccacctatggccacttgagttaacctcaagtggttgggactacatgtcagttatagggctttatacctcaaccaatcttaatttggtcatcggtattccacctcaaaggttcccatcacacaaacaacaggactttcaacaagcttagccttcaaagggcaagctttagtgctcccaacacagagattgaagtgagtttcgaacttttgaagatgaataaagataatccctatcactatacaagacatgtttattgactaacactcttgtaaagtttaatatacacctagccactcaatataattcccactttgttttacttaataaatattggagttccgttacaaataagtgaattacaaatttgaaagagagggggcaagtgttggtgagacttggaaggaagaagagtgagcgagtgagtgagtgaatatggccacagaaacgtctgaaggagaagaagaagtgaagatcactggaggaaatcaagtgcttctcgttgacgatgatctcagagaaatgggtaaggaggctgcttggagtgtcagttcttgcaagaccggcaatggcgtctcatctctccgcgacgacaatctcgatacttattggcagttactactcttccttcctttctttcttcaatttacaaatccctattgttgcttatgctaattttttttgtttgcagatcggatggagctcagcctcacttcgtaaacattcaatttcagaagaaagtaaagcttcaagtatgtatgaatgaatgaatgaaatgaagtattaatcatctaattcatttcgttcaaaccctatttttttggtttatgatcctttttctgttttagcttgttgttatatatgtggatttcaagctagatgagagttatacgcctggtaagatatgtatacgagctggagatgggtttcacaatttgaaggtagcactagccctagcttagcattttttgtggttttatctcagtaccaaaacccttgattttgttgttaatgatcttttctataacctaattttgttttggggaaaaatgtttaggagattaagactgtggagcttgataagccaactggttgggtttatatatcattgtctgggaatgaagcaaggtaagctctaatagttttttctagttcttcttaattagaacatggtttagagtttagacacaaagagatgatatctatgttatccttatctgttaattactatcacttttgtctgatatttccttagttatagttttcccaagagaatgggttctttttcttggtggttgagacttgggtgtgatttcaagtaactgtgttttgttgtagtttgtttgtattatttcgaggattgaagtttgggtgtaaagggataaaaaaaaattctgtccattaagctagatagcacaattacagggtcaaaatttaaacatcattgtgaacttagagaagtaaagtacctagtttttttccttcttaaatgtcttgggcatttctgaattgcttgttgtagctagatttccattcaagaagattctcaaatgtaggcaagaacacattccttaaaaattggtggtctgtattaacacggtatcaccatgtaatctaaccttgaaaattattggatctctctttctccagggtactgagacgaaagtatattaacacgaagatttctttcttaagcaatttgatatagcgatttatatttccttcagtactgaatcaagttttgtacctatattgtgaacagggaaacttttgtcaacactttcatgttgcaaatttctgtgttgtctaatcaccttaatgggagggatactcatctccgccaaatcaaaatttacgggcctcgaccgtgcgttctctttgcacattcttgctcatcaaagtttcatactaattctgcaagtaatttttttcccttgaaatttctctgcaggaatcctattcctcatcagccatttcagtttacatctcgtgagttcaccacctattccattataagatgatgcagcatatggaaaatggattgagccaggagcataatctgtgaagcatataggatttagaatactgcaagattctaatacattgccaccgtgtgaaatttttgttttgtttttcacctaattccttgaatgggttttgatagaggtgtgttacacaatctatgtttatatctcagctaatagtttgacaagtgaaggaagtgttataggaattaaactttatgtttgcctagctctcccaatgaatattagtctacacaagtggttttcaaagtcaagagaatggactaaatttatgactattattagttttctccttcatatttatggacagattgacttataaagattattgagacagcacaactaaaatggctttaacaatgatgtgataaagttgaaaaggaaatctgtaacgaaagtaattatcttttattagatttgttgagcaagtgatggcaacatgagatcagattccagggttaaataacaaaattgtggtccaaatcttcaaccagatagggctgaactcggccaatttttcacccaaactgaagattttggtagtaaagagatgtaatgtaatgaacttactacattttaacagatgagcagagcacttaaaagttacaggtccagaatagtgcatgtttgaaacagtaaaagattcaattggaatcaccacattataaataaatacccttaagttacatccaaatttcagttaatacagataatgcaacatacaattcctaacatatgataaagatgcagaggtaatggatgaaaatttcattcattcaagggcaaattttgatcaaagtatgagtgagagatctctagccaacccgagctttcattcacacgccggtttagtgtcaaagctactcaaacagattgaaaaggcttggaatgcagagagtggataacgataatccattgtgaatatgtcttttccgatctttccaaattgcaggatcaccctctcttgctctgcctctgatatgttgtgtgatggattaacggctgcgactagctgaaaatttttgacagaagccacggtaacacgtcctttgaaattgaggcaccaacattgaagttgctcgtgccatcttggagccttgtttttcagaactagaggctcttcgtcaccctgaaccgacgatggcagctttgccaagctagtggagctgaactctgtggcgggctcttttccctttaagctcagtaagggagaagaaaactgctgctcgttaaaggtggtatgcgataatggtttttgtatcggtgttggggtagaagcaccctccttaatacaagagccaggaatcgagtgcataacacaatgtaatctcctcggacctcttgttcgaagaacattaagctcataagagatactcccaacactgtaattacaagccggtactcttgaagactggtgcttagaatggaaccttctactcgaatggttactcggttgaactgtaggagcagcattacacggtgactcgctgtcgtagatagtgaacttagtacccaaaaaattggacctgacaagattgataaaagggtataaacaaactaaaacatagaacaacaagagatacattaacataactaagatcacttcacttgccttaatttaccaacatatttagagctggtccgggaaaaatcatctgaaaccaaagatataacaaagtctgtgtttgttgtccttctaatctttttggcagctaacaacaacttatgcctctcgctctcagctatcaattttgataacactgtaagtcaacaccataatgaatctgataaggttgaaagttttattttttggaggggatttgatgttaagaaaactcacaaggcaccagacccaagtacagataatatgttgatgttgctctatcccttctaatgaagcattgtattggattttcacgaggaccagactacacaaaaagacagtgtaaaaatcacaagtagaaatagctaagaacacatactaatctaattaatcattacctgttttaatgagattggaaatgtgattcttccacattgctcaggagttttgacaatctcaattataatatctctccaagacctacaaacagaggcacaaaagataacaacagctctagctggccatgaagtttcactatcctcaactcttctcaaaatgtctaaaagcaattcaggtggcaaatttgcccactgagattgaggaattgaaggagttgaggatggtactgcagctgctgcttcatcaggaaaaaggcaagtttgtaaccttgttctacttctccaatgctttccttcacttactctttttgacatgttaccaatcccacctttcatctccctaagctcacgaactatgcttctaaaagacatttcccttttttgtgggtattctgcaaaatcaaaataacaaatcacactaaaccataatccttaaaattcaaatcaaaaaatgaaaaagataaagaacccatcaaagactgtgaatcagcttataaccctaaacccccttttttacccagatctcagaaaaacgaattacatcaaaatgcgtaagaaaaattgaatcttgatccaaaaagatttcttctttacactaattaaaacaacccaaatcactggaaaaagagaatcaaaaagaaaaattagaaaatcaaacctgcccaaatcaactaggtgggaaaatgccgatgataagattaaaagaaaagcagtagaaagaaaggtgtgtagattcaagaatgatgagagaaaaccataatagacatggaaaatcagtagaagaagaatattaaaacttgaggttgcttaagtgtgaaagaaaaaggtagatcaaagggctaaactggatccagacggacataaatgacctacttgctgtgtgattatggataagaaagacataaaaaatgagttgtattttttatttattaaaaaagaaaataaagaaaagatatttgttgtgaatggggaatctaattaagtattgtacgtacgtcgtcaactgagttaaataagtaattgggttaaagtagcttagcttaggtatacgtagtcaatatctcaaagtgtgtagtttttggtatacgtgtcctttattccactttacggttgtctacttaaaaatacacacaatatctactctttagtctttacatagtaataaaacaaattttcattatttgtataagacaattctctcattatattttaacttttttttatattaataatagtatcattattacaatactaatatatttattggtttttttttttattaaaatacttatataatgtatttggctaattataatttttaccccctgaactttgacatgtaccaaatcatgtccctgaacttttaagatcattgaaaatgccccctgaactattgagattgttggatttaaggacttttttctaattttagtaaaaaagtctaacatggatgaaagttcagggggcataatttagtacatgtgaaagttcgaagggcatgatttggtatatatcaaagtctggggaacatggtttaatacat

SEQ ID NO: 295751 - DNA, 6676 bp, Cannabis indica
tttttttttgttattttttgtgtgtgtttatctttttaaattatccctttaaataagatgtcacgtgaatatttaccttaattcatccttaaagtattcaacttttcgtaatatgcattaagcatcatttacaatctttttattaaatattttggaaagtttgaatccgtattacttaaattatattttcacatatacgtgaaaagatatatgcccattacccactcaccttctttgatatcaatacttcttctaaagcccccaaacataattaagtttgttttttgaaataaaaaataaaactttacttttaaatggtaaaccaaatttgttaagcaatttcaccctttcattttgttttaacacaaagtcaatctttcattctttcttgcaattccttctatctatatgtctttttctggatagactccaaacttgaacctcacaattactgaatcacatcaggaggtacactccaaccattttcacacctatgaatatgaacctagctttaacttaaagggtcagaaaccaactttgccaaaaacagctactgaatcagatgttgcaagtattaactggttctcttcatcatttccttggccgctaattcctctttcttttttttcctttaacataaaatgggaagttttgcaattggcaaataagtactgataatggaaagaaagaaaattagaatttaaaaactcctcatccaacctatcatgctcagagatgcatcaagaagcacatgtcaatatgtgggacttgaactggtccagctctgccaggacctcttcctccggtcggtatatcaaatcaatcatccgccatatctgtgcaaaaacagaacaatggacattttctagaattagaagatatactaaccacaaacaaacattccttaagcttccgtagttaaagggaagacaagtgtgttcaattgtgcttgttcatcactagaaaagaacagcttatactgtacctgtagtgtaccacctcctccagtactttcacaatcatcagacacactaacgatcgtccatggatcagatacattccagtgaaaatcaacaaccttgtccctacaacatattagaagtaatcatgacaaatgaaaaataatatgaacctttaaaacttatgcatggtcatgaacaaaccacaacttatcactcgtgtaacagcacacatacctatgtccagcgtgcctgaagaacaagcctgcaggagcatttggcaactttgatccagcagaatcttgctttttgccaatctagaacaaaaaaaaataatttgagtctttcatattcgaatcgggcccattccagagttgacaaacacgtgatctccttaaaaatgaaggctagtacatacaatgggcaacaccaatcaaatagtattagatgatacagcaatgtttagacagacattcaggtgatgggttgggatatatcagaacgatgatattgcagttaagctgaacattatcaatggttgcctacaattaaggaaagaggcatctctaaagactaccagaaacaaatacagtaaaaaccatagcatcaaaccttctcaagatcccagatatttaaaaccccatacttcggcagaacttccaaaaacagatgacttgtctggtgaccactggaaacacatacacatgggcgttatagtgaaacaacaaacaacaaacaactaacttatttctataaggcgtaaaagaaaaatcagataacatataaatacaaaagcaattacggtacctgtacacagaggacggctgcattatgaccctcaaatttatggactggtgttccaacaccaccagaagtgagattacgtcggtcaaacattcggatagagttatcagcagatctgagtttaaagaacaatgaaacattcaaaataacatcaagatctgaagcttgcatgagataaaacttcaccacacaaaaaaaaatgtagaagaagatgttcaaattgaacttgaaatttaaaatacaatatgacatcatcaacatgtagcagcttatataatccataaaatggaaaaatataaataccctgttagaatgagattgacatcatgacggttccaatcaacacaatgaagatcagcatcatgagctttttcaacctgcccaaattttttttggaagagaaaaaaacatacaagcaacatgattaacagcaatgccaagaagcaccaggaaggagaagtgtgtgctaaatatcatccattcatacaaaacactaaagtactgaaaaacaagacaaacataaaaggctatttgagaaaaagggataaacataaatatctatttcagcaatgcttcatgtcatatagaacagtttttttcaaaatagttatgtgattttaaatatatatatcaaaaatccaaaatataaagtcactgttcgtaaagaaaaaaaaaacatgcctggaataagttatgacctgactggacttgtataaaattgcaatggaaatgactagtaaaattacatgagtttcacgtttagctatggtgtcatgcacattcaatgtgaaaatacaacactaacattttgcattctactgtttcaaataaaacttttgcaattcacccaagaggatagctcaaatgctcagacaagtactttgcccccacaagatctgaagttcgagtccctctgggtacctacataacaattgttatagtttcttggtccccaaatattatagggttagtggggatcctaattttttttgaaaaaaaagtgcaattgcaactgcaattccaaatctaaaatcttgaataattttgttctaaaattagaagtcgcccaagtatgctacccttccattttcactttcattatcatttattctattactttgaagaaaaacaaaaaacaaaagcaaagtagtgcagactaaatgctatttattgtcatcagacaaatagatttataaatagccagtaaaaagccaactaatcaaagaaaagaatccataccttcacagcgggactagagccagatctagaatcccatagtatgaggcaggaatcatcacccacgctacagaactcctgagcacttcaatgcaataaacaaacaaatatatcacatttaataattttaaaggcgtgttaatgtttattaatgcaccctgtttaggtgaaaatctaaaatgaggatacttcttgtaaaaagtggagaatgagagggagaagaaaaagcatcatcattattgaaatattaatcactgggaggacttcgaatttcagcttattctatgtgcagaaacagttgaagttgtgtgtactaccaaggggaaatagctaccttgatgggcaaaactgcacatcctctacagtatcatcgtgccctagatagacacctcgtggcccaatagaagggctgtctgtaggtttagaattactcccgccagatttagacccatgtttagaattggttccaccagatgatggagatttagtggctgctaagtctgacgaccctaaagttgaaatatgatcatgaatgctccataaaactaccgacttgtccttgcctgtcaaaaattacttccaataagaatcgcatttgagaagaaggaaatagatatgtagtttaaagttttagtagtcaggcacaataaactaacatttccagtcatttgtagaattgaatttttgtttaaatataacagtatttatcaaaaagccgtaacacttaatacttactcaagacttcatatcctaacaaaagggagagaacaccagcaacatgactaagtagaaccctatttaacagtcccataatgaagaatcgacaaagatagacagcataccaaatatacttcacttacaactttaccaaacattatttgtttgtgaccatatcagggattaaattacgaagtacattacaccaagaaactctaacctccagagagtacaaaaggttcagttgggcacatggcaagtgcaaattcagcattatcttgatgcccagttagtagctgcaaaatagcaaaacttaaatcaataaacacctacctgagaaaagggtagcatatatgtgaatgaataatatagctacttatatgaaaggacactgactaatataatatagctatctgaatcagtagataaattaatatatgtacacataagaaaatagaattggaaaagatagtcaccaaatcaggacgggaatttgtagctcccagtactgcatggcgattaggctgcgcttccacgtcccaaatgaatacctgttttacaaattaaaaataaaacccacattgagtttctataaataataaagttcaaactgtctaagacagccaattcctatacttgaatggaactcataacattaaaaataaaacccacattgagtttctataaataataaagttcaaattatataagacagccaattcctatacttgaatggaactcataacattagttcttacatcaggactgtcagtatgcgtagccactattttactgttctgcgggagctccctgattctgttcacctacaaatcataattacatattatcttttgtcaaaataggtagtaccattattatgattgataacatgacaacaaaagtcattgtctagacaaactacatgctaaactaatccataaaacgcaatataaataatgtgaccgacacgagtaacagctcaaatcccttatgaaaaatttaaaattattcacaaaattaaaactaatgctttaagtttccaatcagaaaaaataaataaattagtacttccaaaattgctaaatttcctttattgttacgaggcaatttacgttacccacttcgcaaatgatgattgtgaaaatttaaagatctaaaaggatataaatgtaatcaactacaggaaaacagtctttattaaaaatccctaaataatccataaaaataacttgatatgaatgaaagattaaagaaaagatggaaaggtattaaaagataccatacctcgcctggatgaataatggttttatacttcttcacaaagggcgaacgtgcttcttcattgaactgtaacaaaacaattaacaaaaccataaacaaagcagttaataaacaggttagaacttcaaactacagtgatacaaagatggcaaaaaaaaaaagaggcatactattttttcatcatggcatcacctgagatatgtgttctgcagcagcaaccctaggtttgacaacttcacagttcgctataaccagtgtatttgggacactgccatcagtctgtgtgaagaaacaatcatataaataacaaaaagagaccaaaataaagcaaagtgacaataaaattcactcttgaaaaattgcaagcagccattcctattagtcttatgtactatttaagctttaaaaatttaaccccacgaataatacatgaaactctcagctccaaatacctataagctacaatctttccttaaatcgcaaaaagaacaattcatttcccatccacgaaactaacaatacaaccctaagagattgataaaaccaataaaagttacttattactaaaaagtcaataaaagtgtatccaaatcagtccaaaaataacatatcaaaataaataaataaataaataaaactgggtaagggtggaaggtcatctttttacctgttcagaaagatagagacgctggcggttcttgtaagtagcttgctctagttgcggaccccatctatcaacatcaaaaaccaaaagacaattttcaagtttgaaccaatgtctacaagataatctaaactaaatgcaaaagaaaaagaaaaaacaataaacaactttttgaattgacagtaaaccaaacagcttgaaccttaacaagagcaacgagtaaaaaccctaaaacacaaagaataccataacggcatcaacaacaacaaggcttataatccacattccatcgtttatttctcaacaacatcttccattatccacatgttcctgacttccaaacagactacattgcaatcttgagttaaaaaataaaataaaaataaatatatagatggatggagaggacgaaccggcaagagagagaaggccaaacgagattgtgattggcgagccagtcgtagagaactgggaccaaagatttccactgggtgtacctctcctcgacggaagcctcagttcctttccctttctctctcatctccgtggagttacaaaatgagtgagtcggatcaagcgagttggtttggtattggttggcgtgtgggctgtgctgtgcctgtggggtttctcttcttcgagttttcccgccactttagagtgaagaagacctcgtgggttttcgtgtgtcccgggtcctcacactgaagccctgactctgtctgtactatttatttactctcactcctctgattctgactaccttgtcaaacggggtaagttgaaaaatacatcttactagatggttaacttactagatcaatcatttccttcaaaaattggtattttcacgaatataaacaaatattgaccttgttaatccctatttatgaacattttgagaattgaaccccagcccatcccatacaattatgggttgtgccgaaagtcaggcccagtccaacccataaacccattgagcacgaggccatgccatattttaaggaccggtttt

SEQ ID NO: 295752 - DNA, 683 bp, Cannabis indica
accaaataacacattaaatgagtaatgaaaataatttttttttattgataaatgaatataaaagattacattgaaatagagttttatttaggcacaaagcccaacacaaacatgttctgactcgaggcccagagattttgtgtttgctagaatgagccccaatgtaagagtacatctttgagctggcttaaaccaaaaaagaaatgctcgcgacgagtacgtcccaccctaaaatactcaatcaacaggacagaacatgccgaatttggccaacgccgagggagtatcccttgtcaacccactggccgggttggccaggcaaaggttgacgagacaaaatctggctggacaagggcaagtcgaagttgatcctgcagtgcaagcacaattggaccaactcaagaacatgatacaagacctgtctgaaccaaagctgtcagacttagagcaatacaataatacatatcagatatttaaaaaaatttacaaaagtcaatgtataatatatatggcatatgccaagacaatataaaaatcagagaattaaactacaaatggaagaaaataattaatttaattggtaatcaaacaatatgcactgaataaaatatgtatataccaaatatatactaaaattatcggaatttttagaaaatattgaattttgggtgaaggtttacatt

SEQ ID NO: 295753 - DNA, 1495 bp, Cannabis indica
aacccatttttttttgtgagaaggataaatatgagggatcaaattacaattagatggaattaagggatcactttacaaatttgttaagactttttcacttttgtactcgtatgtatgtatttgtatcaattaaatcggtgtgtgaattttagtgtcaccccacagacacacaaagcttcactgaagatggcacttggaaatttgagcaggaaaaccctagcggaccttggtacaaatggaggacggttagggtttgttcgtggattgaagaccttcacattgccggacttgccttatgattacggtgaccttgagccggccataagcgccgagattatgatgctccatcaccagaaacaccatcagacctacataacaaactacaacaaagccctcgagcagctcgatcaagccatggccaagggagatgcttccaccgtcgttaaattgcagagtgccatcaaattcaacggcggaggtattcattttttttattttcttgttgtgaattaactaaattcttactcttacccaacattgaactattgaaggtcatataaaccactctatattctggaacaatctcgcccctgttcaagtaagccattttccttttgggatgatcttaaagtgtttgttttgattattattaatcgaatgagtaattacagaaaggtggtggtgagcctccaaagaaatcactgggatgggccattgacatgcagtttggctcactagagtctctaattcagaaaattaactctgaaggtgctgctttgcaaggttctgggtgggtggtaagtaagctgttgcttcatttcgttctgtattaattaacatctggtttcaaaaacatgcctgctaatttttaattttattgcccactttgaattgtttactttgcagtggcttgctcttgataaagagttgaagaagattactgttgaaaccacagcaaaccaggtccgtttaccattgctttcagctttgctattattggagctatttatatcataatttgtttgatttttctcaacctgccaattgttttggttgcttttatgcttaatgatgtcttggctgatttgggagttttttttatctctgattgggttcgcttattatccattttcttttcttttttcggaattaggatcctcgcccaatcctacattatttggggaccaagattctataacaattgctatgtaggtaaccattaaccaggagggactcgaacctcggaccttttggggcaaaccgcatgccttaaccccatttgagctatccctcttgggtagaaggaaactatccattgaacatggcttaatgtgtttagttgcttctttttagtttgaatttgtgtgcatttgctgatgatattatactttttcataggatccacttgttactaaaggatcgactttagtccctctgctcggagtagatgtgtgggagcatgcgtactacttacaggtgaatttactgtatatgt

SEQ ID NO: 295754 - DNA, 2098 bp, Cannabis indica
gcatttcatatattcaatttcatttttgacattttggcatagacaatttccaattatctcatgagtaggactagatcataaaaaattgcatccgtatgaaaatttctcatttttgccagttttttcctaaaatccaatggaagattaaaggtcagcaaaaacacgagaaaatgaactccagattaagccattaatctgcagttatgttataaacttattttaatctagatgcataaacttcatgcttattgagcagtttcagcgaattccctatgattaaacaacgcaggcatgtgaattcaaatactgatgcatttcaagttgtgagattagcatcaggtccaaaattatctactttcaagtgcatatgttaacaaaaactagcttgatatatggaaggtgacttcacaaattcatacagttttggaaagccaagctacagcaataaaaagaaatcttctgccaaactatatgaatgcttctattaccaagtatataaagttaacgttcttgagatcgattagcaaagaccattaacttacaaccttaaccataaaagtgacacaatgtacatacagtatcactcttaccttgagaatccaattaatagcgatagcaccaggagtagccctatttctggagacaccaactgaatttaaaagagtttgagttgtgaaaacacccattgctcccccaaagaagtgctgaaacacatataggcagaatgacaaaaatgtatcatttactggaagcagaggcagctattagcaaggtttaaaagaactggactttaaaattatctagttgcatagttagactttttacataccttcaaagctctccatgtcatataggggacgtaggatggggttacactatcagggaaaccctctggaacaacataggatctaacaaatgctaccaaaccctgcactcaaatatccatatattattaaatcatagcagaaaaattctcttcaaaaccgaaaactgggaccacatttctcaaatgcaatataaattagagactaaattttacaacaataccttatgaatccaaactcgtatatctaattataaaataatagtaataagaaacagcaagaatcgcagaatgaaataatcacaagaaactaacgtccaacgggagttgcggagtttgcaagctgagggctcggaaggatcctttcttaaagcttagaccggagggatcactctcagcgacgtactgccatcggcggccatcgagttcctcgcagcaaatcaatctcaagctggaggctatgaactcgtcctcgaccaggccgagcttgcgattagtctggcggtggccggcaaccgaaggcagagaggatggcgacacatcgggcggagcagaggccaaaccggcgctaattcgaagagtctcgcgaacaagaaggcgagcatcctggccagtagtggcggtcaaggtttgggcagcggaggaggaagattgcttgagattaaggggcggaggaggaggaggagccattggagaaagaagaagaagagaatgagaggagttggagttgaaattgagaagagaaaatgtgaagagaggttgttattgttgttcagctttggaagtaacgaaagaagcattggggaaatatatgagagaaatggcggtgtgagtgtgaggctgaggcaggtggcctaccatgtttcctttaatgccatcggcgtcggagctcctgagattccaataaaaagagctttccaattccaaactcaacatctcatctctctaatctccaccgtccattcttttggccgtttcctattcttctcctcatttttcactatgcaattctacatctctccattttttttatttttttatttatttgtaatcgactctcttttcctatcatctcataagaaaaattcactacatctgtcaatctattttttttaacgaacaaacattttattgaaaatccataaatgaatatgaaagaaacaaaattggaaaaatcatctaaattaatttactttccattctgggtccacgcacgactaattcataaataccaacttgaattaaaaatacttaaaaaatattattaagtaaatt

SEQ ID NO: 295755 - DNA, 2762 bp, Cannabis indica
tcagttaatgggacacgttcaaatactcaccccacgattcagaaaacgttatttttctatgattattcaatctatttgcatatataatgcgattgaactgatgggaagaacacatctctctcgtattagaaaaaatacagttttcatagtactaaaattccatctgcgatataaaaattctctgggtgtattcggcgatgctctacagtgcagtggagttccgatacagtgcgacgactaaactgttttatcctagggacgaccagcaaatttcgactgcttgtacactcttgggcaatgccgcgaacgtcttaaagagagcgacttagtctgcgattcatcccagaatttttcattcagtaatatggttcttcttttattttgctagcattttattcaacaatattatatgggcacacttctctatgcataaactaatttagtactacggcttaagcgttaatattgactgatcccaactgaccatattaataaatttaatgtattaactgaactcaaattttcaaaaatattgtcccacctaagcaccaacttagttgactttttcgtatccattgacgatcgatcattctacttgcttgaataataaggtaaaaacaaagaaattaaagctaatacacaacagcattttttgtttgccttcatagtccaaattagttccacgtggcgtaaaactagaatcaatcgaagcaatacgtgtcaatagtggcgtattccatttccaacaatatatatatatatataattatcattaaataaattaaaaataaaaagatatcacgtttgacatatcgtccgcatgaaaaggtctacgaacgatacaaaaataatgtaacgtgatattaacaatacacgcataatgatttggtactaatctttttattttttaagatatgaaaagttgagaaactggtacaagtgtcttatcatatgtatctatcatttgataagtatcaataatttttctaactattcacactaattgataataatttagcatagttaataattagttgataatctggtcgatcgatataattaatcaccaccacttttgttatttcaaaggcccacacccacagtatatatatttattataaataaacaattttatatatatattataattgtttaaattatattacaatataatatgtctcattatatctgggtccagttgcaatatggtcggccatcatacatgaacatgagaacatgagaaattttctcctaatttgatcgatcatcaatacggcttatcttaattatttgaataaaaatagaaatttattctttgtataattaatatgttcaaactatttatttgtaataaggattttttttttaaaaaaaaaaagttgttaataaggacaaacttaaatgtgtatgcacgtgaaacatatttgtaataagttagaagttaagtaaacatatatttagctagatatgtgttcacatttttattatatatatgctgtctttataagggtgtattaatagttaattaattagtttaccaattacaaagctcaaaattaaaatattttatataaaagtaattgtattaaaagaaaatcagttaatacaaatggtaaaaaataatgccatattactatggttggacgatatctgggtcgagtactagtcgttcaggagaaactttttccaatgcttttttgttatttataaaaagtgtgaaacaattaaatcatgcttataactacttctccatgagatactaatacagcttatatcttaattattaagtaaaaatgcaaatttattcttggtataataattatgtctacacttactatttatttgtaataagcttacgaaaacttaagggctcgtttggaacgccgtattagcttattgtatttattttatacaatatttttatgtaaaactatatgtgatattaacttttatggacaccttataaatatataatattttagtataaattaaagtttaacatagtattatataaaaatataatatataattcaattcaatataatacaatacaatacgatacgacctaatacagcgttccaaacgagcccaatgtattattatgtgtggaataatgtattgcttgtccaccaaattgttcctttaattttttagtgaataataaaccatttctttttttctttaattggtaaatattataaccaaatactactacaattttggcctttaattagatgtgatttcttggagcttataatgttaattttggtaaaattcgttaccgaacattgttctgaacaatgctaaaggggtacgaaataattgtcaccataaagaccctattgcgtcaattattttaaaataactgatgtcataagcccctatagcgacgcttattattaaataatcgatgacataagaacttcctatgttttttttttttattttagcattttgtggtttaacataattttcttaatttttattaaaaatctaattttttttcatatatattattttattattaataaaattaaattaactgtgaattatatataataagtataaataaaaattaaattggaaagttaaataaatacacattaatattattttacgtctttgtatattagctatttttttattaatattttatattttttataatatatatgtgtaaactttataatatatgggttaatatttttctaatatattagtatcatttttataattttttaagttatattttgtataataat

SEQ ID NO: 295756 - DNA, 2300 bp, Cannabis indica
tacaaattgatcttggggtttatattaatttttctaacagaaaacacacgaaaaagaaattgtaaaaagctcactaattatcattaatgaccactgtatttataaatagagcattaagctcataacagaaagtttaactatcttaactaactaaacacatttaattaacctaagctaacaacaaactaactaaaattagctaatggtgttaacagtgtactctaattttcccaattcaaaagattacacactttataagataaatttagagtatataaaaataagaaaattttgcacctcccttgacggtcctgtccatcactgattttatcattttcgattccaaattttttgtaacacatcaatcaacaatataattagaaaacgatcttccaatagcaaaattaaacaaaagttaacatatgacaacataagctacgagtgttaatgtgggtgcaaccgttagcaatttccctaggcaaaaaaaatcatgtcctcttagccaatgaagctgccatactcattgaagtcgggaaaggacacagtcaagaaaaaatccactctaacagtatctagagatagctttggattactaggactcctaacaatatcatctgcactattgatatatgttttcatgggatattcgagagtatatagacctaaaaaatgactattgaatccttattggtccctccgagacatgtggtagaggctaggggtaagaaatacacggaagggcctattacctcttctgaaagtgttggctcacaaagcacctttgtctgggtatgttgtagcaaacctttctatgatctcctcctcttcggtcaacaggttggggtggcggagtgcccaatccgcattcaggagcatgtcttccttaacagcctcagtcattattttggtgatgtccaaggaaattttttccttcaccttctttgaagcttggctctggcccctaccactcacgttatcaatgctctgaaagtcagcgatcaacccgtgctcatggagtacctttatggtaaccaagccttcaatttatagctccttaacggagaagggcttgtattggccggctacgttcttcttcaattcctccgtgtcaagacttcgaggaacaaattttgccagaaataagaggataaaatcctagttaacacccatactcaagaagtttgcaaacaaaggacaaaaacagtaataaaaatgtttacctgggatttggaagctcaaaggaagggtatcactcgctttactagaaaactaatggaaaagagccaatactcccgaagatctaggaagcttaaggtatagctggtggggcagtatgcatttgagtacctcttaagcttgtaaacacaatctttttacaattggcacgcataggttggggcttcatgccattaaagtacaagatctccgctaggttgggcacttcaaacttttggatcttacaaaagatatattgtccgactaaaagcttgtaagccagaggtatcagttggaaaagagctatccctatcctcacacagagttctataaagtatgtccttaggggaatgtgccccactcactatgtgggcccagctctaagcgctaaacccatttgtactcatggaggctgattcatctgctacagatagcctattgcacataaaccccaaaatgttgcgcactccgacttcgttggcataaagctccatcatgtcgtatgacctgaagctatttattttttgatccatttctcagatggaatcattgtagatgaaaggcgtaggagatacaaccttcgctttcctttttgccttggatttagactctactgcctccctagatggagcagcttctgtagcaaggccttgttgaaagtcctccacgagagtcgtagctaaaaattcctcaacagttgcctccttcgggagagtcaccactgttgtttccttaatctatactaccttgaggctaaattccttgtttagatccatcactggaaaaaaaaaaacagaaagaaagaaccaagtaattatatacccaacatccaaacctcccctaaaatttcttggagaggtccccgctggacccatcacttacaaagacctaccttcaccagacaacagttctaaacgataagtcgagaacccaatagacaattaccagagcatattcaataaatccctaaaatcaaactcctttggagtcctagcaactccaaataggcatgtagcagataaataaacctaattctcatttagaggttcattctacctagttcaagctgttgggttttgtgccct

SEQ ID NO: 295757 - DNA, 5098 bp, Cannabis indica
catgattttttcaaatgttatctttgaacttcaagagataagatttatgtactcttaaggtcatgaaagtcctttttttgtcggggggcatgttaatattatgtgtgagatatgtagatcattgtgatacttattatttatggtcatctggaacaaaatattctgtcaattatgaatataaacaaccctttcttccattttgctataaattttgcatccaccatctttctttatctaccagatatttggtggggttggtattgcatctctaccacttggacttattttctccttcattcggcgtccaaaggctgttattactcggtcacaatatataaaggtactacatctttctcttgtgcataagcagaaatttgaatgacagctcatatttttagcttcttgtgaatacttttttatgtttggtccacattctaggaagcaactgagctagctaagaaagcaaaagaattgaagaaagcagctgatgcccttcatcaagaagaaagaagtggatctaagggtagaaaatggcgtaaaaatgtgaaggctgtagagaaggtatgcataagtttgtaattatacttaacattcaggcataagcttttctttgtgcaccaatgcaccgtttgtgattgcttgctgtgaattttgacttttgagggatgcttttgtcctgtgtgaatattgaaaactaattgatacttgcgtaatttgacaggaattacttcagttggaagaagatgtaaatcttctggaggaaatgtacccacaaggagagaaggtaatatactgtcagacttgtggctagagttcccgcctttttctttctcttcatttgctgattttcttcttcaaattcaggctgagacttcttgggctctgactgttcttggttacttggcaaaacttgtcttgggaattttggggtaagtgcttattttgtatttgaagtttagaatggttctactgtttttggctctccttttatatttttcagggatacttttcatacttttttaagtattttaccaaaggcaacgatatatgttcatgtaaagcatattacttcatatttcatattaacatcatatgaaaaattttagttttgttttatacatccggagaggcggatttgaagttgagacctcctctttgtgaggagtggagtagtaccaaataataccaataggctataccacataagagcttttagtttgaagcttatagttgatagtatttattgagttttggaatttagctgacagtcatagtaacataattaaaggagaaagaaaacagaaggggtgggggatgaagtgaaaactcattgtagaagagggacagaaggagggaaggaattttttttgttctgaacttttgtttataaggattgtagagatttaataattatgtgggaaagtactattgtaattatagcagacaatatgatgttgaagcagcattgctacaagcttgcatatgtgtgcctttcaacattaacaataaaaagggaaaaaatatttttctattttgcagtacaagtactctacattgtggccaatttctttctctgttgaagcagccctatgattaatcttttgttgttacttgtcaggttgattgtttctattgcttggattgctcacataatcatctatttgttgattgaccctccactttccgctttcctgaatgaggttttcatcaagctggatgatgtttggggtacataatataaatcctaatcttaaatttattttgttgctcatttattgagtttatttatccttatacctgatgatactttttaaccaggtcttttgggaactgcggcatttgcatttttctgcttctatctcttgctagctgttattgctggagcaatgatgcttggccttagattggttttcattacaattcatcccatgaagtaactaaattttctgttcttttctaatttaatttttatttaccatagtttattcaaatttgtttgctaataattctggttacttatttttctcaggtggggagctacacttatgaactcatttttattcaatgtggcactaattctcctgtgctcaatcaggttggcatgttagtctatttttactttcattcatgttagttaggctctgttgacgtattatcatatagactggacttggtagtcatgctctaaacttttgctctaagtcaactacaataggacacgtatgagtatgaaggctcctttgctacttgaggttagctcaagataataataataatgtctaatatgctgtttaattagtaatattcagggaagtcatgagtttcatattgccagttataactatctcaggatacctttcacttattaaacggaaggcatgtttttatattatgcagggtatctgattgtatgtcatggttttagcatatataattagggggtttagagtgttaatttgatggagtggatggaggcagttgctcttcagtcactacaaagctattttcttaccagaagtatggttgcttatctttttgtctcttcttttcagtgtgatccagttctgctctaccgcctttgcttactatgctcaagcaactgcggctcaggaaatatttggtcatactttgcaatctcttcgtggaattaaatatttgtacaagtgagttgcagttaccctgatgcactattaaccatctctgtttatcaggtttatatgatttgctgatttgaatggacatttttgttaaattcacaggtacaatgtatttcaaattgcatttatcatcctcgcgggattgacctttgtgtattatgctgccttcgtaagtctttaacattttcttctttcatatgcattcaatatgcttccctagtttttagttaatggcctcttgttactctttgtatttaattctcgatgaatatgcagggatggagaagaagaaaacctagtggcaggttccaactttcctcttaagctatgtttttggctagaaaaccatgcacccatatgatggacccatcagaattctcagttttaacatatcttttggagtggtttgcattttcggatggcatcgtctagttttgttctttgttgagagatttagcgaaatgggcggatatcatctgattctgagtcgggttagtgcagtgggaatggcatttgataccactgttttttcttctccttttttcatatgctttactctttttctttgtatctattattcctttgtttgatctgtgtttaaaaactggctttttggtcatgtaatttagatatcctcttcacacatgcaaattgggttttattggaaatatccttgatgtaatataacaaccatgaagaacaaatagttgtactttgcattagtttcatgtagctgtaaccattattttatccaagtttaatttgtttgttcaaatatcagacttttgttcttacttcaaacatccccatctgggcttccatagcttattacattgattaagtatcttgagttttgaatgatcatctttctcaaattttaaacagaaactttgagagtactctagcaaactatacccttaattctcatcatcatcgtcgtataattttagccattcgatgattttgtcactacgttcacacacgttgagagttgtctttccatcaggcatgacattatcatagggcgaatcttctccgaattcagttggcaataaactaaagtgtaaacttggttcccagtctgcctctttgatcaccttcaatatctccttcagtataatcttactagcctttggagtgaagtgtattccatctctgaacaagcatccaaatatacaaaggtatattattacacaccctaaccaaaatagcacatagcattggcattgaattattattcaaactttaactcacaagaagcaagtagttttccaattcttgtttttctgaattgaagtccacatatcaacgaccttgatattcatctctttacatagctctaaacaagcgtctgagtactctcgacactgctcatttgttctacccatatctccattttcactatatacatttttttagttataacaaaaagaaaaaagttattaagactgattgtaataataatactaagacaaaacaaaaacccaataattataagaacctatagaattcatgaatttgttcctcatttacaggaggagcagtgagaaagattatgtgagttttttctgaaaggtcctataaatttggaagtaaaacaagtgttagacaatgaattcaatgatcattggtgataaaatataataaatgacaaaagttttaaaagaaagagattgaaaaccttgagatgggtagcaattttcctcatattttgaacatattcatgaagtgggacatgagggcctaatccagaaggatgtggacgcaatgagtcattacctccaaagtagactatcaccaaagaaggttgaattgctgcatccttaaaatgtgtaattttgacatactattattactctaaagatgaatctattatgtcactgttctgtttttatacataatttttagaataatagatagttcatttattaatacctttggaaaaacttgatccaaaatttggacagcacgccttgagttccaaccacagtaacctcgtagtatgatgtctgcctatatatgatatttttttttgaataaaaatcataagatttattaattaataaattcgttcaaaacaatagaacgcacttcagaggaacagtcttccagttgaagcacacgacctgtagagaaacaagagtctcttgccaagcaatgagccaacttatttgcaaatcgttttacaaaacacaaatcaacaaaagataaagccaaaagcaaatttcgaacatcttgaacaataagaccaaattgtgaaggcataaaaataccgctctgaatcgcttggacacacaccaagctatctgtttccaacatgactctatcccacgaatgagttgcaatccaactcaaagcttctttaatgcctattatctcagcaatttcgggttgaacacaaccaatcttccccttcttgaatgcttctaccatagcaccat

SEQ ID NO: 295758 - DNA, 3529 bp, Cannabis indica
  modified_base (796)..(796): a, c, t, g, unknown or other
aacaatatttttctttattttttaaaaaatttataaatcgttttctaactttataaaattttaacattattttttttgatacatcttggtaatatttcatgtctaatttgcttctcttaaaactttatatagcattttcatttaattttctttttaaaataattttatgtttttagtattgcttatttaataacatttataaattaaaatacaactaattatataactaaaatacaaattatgtaaaaaataattaaatatataactaagtatacgtacattgtacgaaacatttatctagtaattaatatatacatccatatgtaaaataaattacaagttatagaacaatttcacaaaatcactatttatccaaaaaaaaaaaaaaaatacataggtacgtcaaaaaaaaaataacattgtttgcaaaaaaaaaaaataaataaaaaatacacaaaatacattaaataacacgcgcacgtacagctatggttcactaaacaaatcaacataacatacacgtgtcccttacgaaacgatgacatgaaatgaaaagagagaaaaaaggtaagccaaaaactacgtaccattattctctcattattattaagaaatgttagatttgggaataggagccatgacagatattatatagatcatattgttaaatagacaaccaaaagaccaaaagactcgagaaaggtaccgacacaacttagctcattcattgacttgatgagtagtttctggttagcagatatatagttggaggaaacgatttgtttctcttctaccntataaatattatttttttttaataaaaaaaaaggttcaaacctagcttaacatataactgtatataatatgtatgacattaattgtatgaggctaaaatattaattgatcaatcaagtaaggataatgggtcataaaacacgtattgcaatagtcatgacctatagacatacgtatgctgtatatataaatatgtaaacaattcggtaggggaattgtttttatattctctcgattaagggtatctcaattgatgtacttgtaattataatagacaatagacatattattgtttaaaaaattaattccgaataatagctaagagatgataaacttaattaaagtattaatatatatgtttcatgcacgtagattatgtttggatagattagaataattccaatttttttatatatagttctgttctgttcaattgtttaaaatcactcatagagataaactaattaattttacaacttaaattttttagcagtaccaaaaattatttgacttcctttttctttttctttttttttttaaaaaaaaataaataaatctcacgatatgtattatagggtgattctacaatgcacccccttaaaagggacctactgatgcaatttctacttgtttcggcatctaaaaaaaattttgtctaattttttctcatatccatgtacgttatagctatttaagatatcctacaaaattttgagaaatttggaataatttacagtatagaaaataatattcaaacagtctattttacacgcgtataaaataaaatattcacgcgtgtaacacactgcttgaacacaatttttaacgtgttaaactttttcaaatttcttaaaattttacaagatgtcttaaataaccataatttacatgaccatgaaaaaaaaaatttgattacaaaattatttcggatactaaaacagatagaaatgtatcgatatatctcttttaatggagtgcattatagaatttccctatactatatatgtgtatattccgtattgaaaaaataatgaaaaattagagtgtatatatattcttacaaaaaaaaaatagagacttttatatggcaataaaaacatacatgcccatactatttttttttcttttttgaaaaaccgtgttcaatattgaatactataaaaacatacatggccatactacataatactaataagtaataagaaagttggctggattgattccaactagagtttttcaactttttaaggttgaaatacgtgatcggggtgacgaattaggaagtcaaagtatccctacaatgtacatggtctattattactctttagcttgcttattggacaacatttttttgtccacttaattagttgtttgtcaaattaggttgaaacttgagacaaagaattttgtataaaataaaattaattaataaatatatatatatatataattctaggaaattataagtaaatataaactgtaaattgtattaacgtaagaaattaatcaattacttttaaaaaatagttttggacaaatcaatatcacatactaaaaacatatttataactcatataaatgacacttaatgatttataaacaacgtgaggcatttagttctaatatatttaaaaaatatcacgtgcataattttgtttgtgtggttatttttctaacaaattaagaatctcgcaaaattttagaaatagaataaaaagaactaaggtgtcacctagacttgttttgggcatatttaaataaatcctcatatacactgtccaaatcaacactaatacagttacatacaaataaaataaaagtacaacaaacaaactttggccttaacaaactcttacgctgaaccaaagttagttgcaaagttagttaacttttgcaactaactttcagctcgctttcttgagtcctagatctacaaatgcaagaaaaagataaaccaggaaacaaagatcaaagaggagaaggaagagacttacggagctaagtcttagagcctaagggtttgggctcagaggtccgttttccatgagagaagagaagaaaaatagtaagaaatagagagataaacactaagagaaatacatgtaaaagaaaaggattaccaatcaattatctgtgatttggaatccattattgtactgtgctgatcattgaagatctggtagtggaaatgagccatttttgaggtgagctcgaaagaggatgtacccagcaacatttggagaacctctataaatttggtgttctctattctttatttgtctttaccatcgtatagttatatgtgtatatatgtgtttgtcgattaatctttgatttggggagggtgagaaggtttgtttcaagactgatgagaactttgagtttttggagaagacactcaaatctagggtttcaatttgataagggtgtgtgtgaaagtgattagggttcgagagtgttctgtgaggattttgtttacgatcacaacagtacattttttatattagagttaaaagtcgtttgactcggagagaaaatgtctaaattaaccttggatacttgattcatttatttttgtggggtatagggtaaagttgacattccttacagtggaatcagaaccattcttggaaagaaacatacaacagaagcagggacattgaataaggggaagaaaaaaatatgaaaaccaaaaacattaagaacatattgcatacttttagaaattaatacg

SEQ ID NO: 295759 - DNA, 5547 bp, Cannabis indica
ccacctagttatggagacaaaaaaaaagactgagaaaggcaaggctcaagctaatcaagcctcggtcaatacctctacagatcataatgtaggcccatttatcacaccagatctttcatcacaatgccaccaacttatttctcttctcagccaacagctaagtcaggctactcctcgagttgaacctgtcacaaaccctgctgcttctaacatggctgataacatcttctctcacccttttttaattgggttcttgacagtagtgccacacactacatgtgttccaattcatcttactttgcttcattttacaacacatcattccccaagcatgtcatgttacctaatggtcaaaaggttacagtttcaaacataggtacagtctgcataaattcatctctcaccttgtataatgtattatatgtccccaatttcaaaataacctcctatcaattactgaacttgttgataatacaccatacattgttttcttcaaaactaactcgtgtattatcaaggattcttctcggagtgtggtgattgggatagctaaacaagatggcaagttatacttcattcctcaagacaatccacttgctacaactagtcaatcttgtttagctttcaataaaccaaatgtagatcaatggcacaatcgccttggtcacccatcaatgtacatttcaaaggtttttaataaaaagattgatccttccttttatgtcaattctaatacccattgtcatgtatgtcatttagcaaaacaaaagaaacttccatttgtttctaacaacaattttgcaatgaacatctttgacctaatttacatggacatatggagaccttttcccatcataagcatagaaggttataggtattttttaacaattgttgatgacaaatctctgtttacatggacttacatgctgaaaacaaaatttgaggttcaaacaatcataccatattttttcaccatgatatgtacacatctctcattccatcaagaatatccgttctaacaatgtcaaagaactaaatctcacttccttttatgaatccaaaggtatcatacactaccattcatgtgttgaaagaccacaacaaaattcagtggtcgaaaggaagccaacacattctaaatgtggctcgagcattgggttttcaatcccacttgccactggtttactggccttatctggtttcaacagccacttatttactaaatcacacaccttttgccctactcaaaggtagcactcctttgaattacttcacaacaaaactcccaactatgatcatcttagatcatttggatgcttggcatatggttcaacactagactccaaacgacataaattttccccaaggagttgtgcttctattttcattggttaccccttgggaatgaaagcatatacccttcttgacattgaatctaaacaaatatacatatctcgtgatgtcatatttcatgaaaacatcttcccacttacctttactacatcaccatcaaagatacactagtttttttctcaagctattctccccagtcaaaaaccagtcacccaagcatccaacacccaagaacaaatacctccaacaaaggataaacatactgctttgctcaccagccctcagaccaccaaaactagtcgtatagtgaccaaaccagctcatctaaaagattatgtaactgcacaccccatagagcctttcctatcctacatcaaattgcatccccaatttagagttgttgtcctagtagcatacactcatagtgagcctaaaaactatgctaaagcttcacaatttcaacattggcttaaagccatgcacagtgaaacacaagaattagaaaaaataagacttggattatcaccaagctactccctggccacaaagcaattggctggaaatgagtatacaaagtcaaatataatgaagctggagaagttgatcgattcaaggcacgattgatggccaaaggctacaaccaaaaaccaggaatcgatttctcccaaacttatgcaccagttgcaaaattcaacaccttaaaaactttcttgccttggcagccatcaacaattggacaattcaccaattagacattaataatgctttcttcatggggatctccatgaagaagtatacatgaaaatacatcctggatacaatgctccccctaacacaatatgcaaattaaataaaagcatatatggcttaaaacaagcctcacgataatggtacgccaaacttagtaacactttactcaaggatggcttcactcaatccttatcagataactcacttttcatcaagcataccccatcaatttttttggttgttcttgtctacgttgatgacatgattgttgccaacaacaatgaatcaactatatccaacttcaaacaacaattagacatcaaatttaaacttaaagaccttggacacctacatttttttctcggccttgaggttggcagaaccaaatagggaattttcatctcccaaagaccctttaccctttagctgctcaatgatacaggctacataggtgcaaaaccaacatctacacctatggaaataaacttgaaactaagtaaagacaaaaggcctcctttttcagatcccacagtttatcgtagtctcattggcaatctcatatatctaaccatcactagacccgatatttcctatgttgtcaaccaccttagccaatttttatcgtgtcctcgtgtcccttacttacaagcaactaatagaatttttcagtatctaaaaaatatccctagccaaggcctctttttctcttctaatgtagctccaaaattgactgcttttgttgaaaccagtctatctacagcaaatgttcagatctcttttcttgctaatgccgactggggtagctgccaagacactcgttgatctgtctcaggctactgcatttttcttggaaaatctcttgtctcctggaaataaaaaaaacaagtagtttcccgctccttcgctaaagtcgagtattgtgcaatggccaatgcaacctctgaactaacctggctcattgctctactaaaagattttggcgtctcccacagcacaccagccaacctttactgcgacaacactgctactatacatattagtaaaaatccagtataccacgaacgcatgaagcacgtgaaaattgattgcgatttcatatgcaaaaaagttcaacaaggatccatccaacttctacgtgtatcttctcaacaaaatctagcagacatcttcactaagccattacttccaactcccttctctactgttagttaattttctgttaagttgttaaataaaggttagttaagttgtcagtggttgttagctggaaactcaagttgtatcacgcctatataaggctctcttgtaccaaaaccataatttagattaatgagatattttctttctcttctcctactctattttctcatacttgataaacaattttgagataaactaccatcttaaaaatagatcacgattggttgaaatgtttactatgagaaatagtgtttttgaatatgttaatttaattctttagaaattgtaatttaaaaagtgacaataacaatctgcagtaatagattaaaatcttgttacagcagaacacagaattaccgtagtaaaacaaaaacaaaaataaattgtacaaaaataaaacttacacaaaaacattgtacgtggtatcagtgttctttcgaacagtcctagtccacgtgaccacccctagagaaagaaatcaattagtaaagtctcaaacaactacaaatacaattgacttaaataagttccttctcgtggtctctgacaagagaaacccatctctccctttatctcttccttatttgtgctgaaggtttctcgaccttaatttgaaaatatgaagagtggaaggggattcacgggtataaagtaaccaattgagctcctatgatatcccatatgctttttgttgatgatagttacctatattgcaaggaagttaagagtgatgtgcatcgagtccagcagctcctagtagtttttgagcttgtcttgggtcaaaaagtcaatttttacaaagtcttcagtgttctttattacaaatacgacaagccagactagagatcgcatttgtaatatgttgggaattgatgtcaataatattggctaacacaacaaagaactatccaatcaacccaaattaatataatcaataaagattaatataagcctaaataaaaagtctaacatctttcattgtggtgttgtggtaaaattgaggtttagtgacatgtggattcataaaatttatgcttatactttttttattgactatattattttatttcaatagtgagatttacagtcatattaattaatctatatatatttatagagttttgcgttagggtggtctactttcgctttttttttatgttcgttatgcgttaaagattttcgcaagaacaaagaaattatgatcacaataatctttcatctcgtatccaatgtggcaagattgggacttactatttcacatctttattttgcagatgaaagctcatttttcattaacactatgcttggtagggaggatgggtgatggagtggagggaaagagttgaagggggagctagatagaatccattgtgtagtaggaagaagaaagagaggagaaaaggggtggaggaagactttttccctctaaatcttaaaaattcaatctaaaatgaaggatttgaaaaaaagaaaaaaaaacaaaataaatatcctaaattccaaaatcatttttttaaaacaataacatatatttatactaaaaatgatatatggtaaatttaataacgaacttccttttcatcattccacctttactcttaataccaaacaacatataataataataataaaataataataataataatcctctatgttcttcctataaattttccatccatcttgctctccttcattcttaccaaacatagcctaaagcatcttcaacaacttgtagaagattaaaggagattcttgagtggtatagtgaagctttaggctaattgctcattttgtaagtcactttgttagttttgtaaaaaaaatgtttgtaagattgccttcgcatgacctctattatcggcgttgttaaggtgggttgtcatacttttgtttggctttaatggcataaaaataacatggtgtttggtttttagaatttgttacttttaatgaaacacttttggcttaagaagcttggtgtattgatcaaaattatcctaatttatacccttttgttctttcctcgaggctaagatttcttcaaaagcctcttatctttggaaaattaagtgtgttgtggggtaaggaattactattagaatatttttatttatggaaattattttctaattaaggaaatgattttctatttaaggaaataaataaataattgattttctgataaataaatattttatattcattgaatctgaacaaaatcaattatgtaatattctatat

SEQ ID NO: 295760 - DNA, 4789 bp, Cannabis indica
ttccctttacggatcacgggactactgactgtcacaaaatctctctctctctaacccaataaatacaaatatttggggttctagaatataactaattggaacattgctgctattggaaaatatgtttggactgttgttcgaaaaaagaaataaagaaaccttatgggtaataggtccacaatgtgtgtattaaagaagatgattggtgggcatatgttgtctttgcgcacagtagcatggtattggagggaaatcgtcgctgttaaagaataattcaaatctttcattgatccacaacaacttgttagagaggaatatactataaagaaaggctatttggatttgtgttttcctcaagcttatgttccttggagtaataaggtatgggagtgttttaatctttcaaaacataaaattatcctatggctagcaatattgtatagattaaaaataaaacaatgtctatttaaacatagtattgtgcatgacaaaaaatacatgatgtgttgtcatgatgaggaacatattgagcatctattttttgactgcccatttagttccatatgtctttgtaaggttaagaacaggcttggttggcgagttgaatcacactccttaaatggttgtcctttgctccattgagtagcagtagaagattgatattgacacctagtgttgatgccttagtgtataaaatttggaagactagaaacaaatatgtatggtttcattaagttagacgagtagagctggaagtttagaacatattctatgatgtcaagagcataactaggtgtttcaagcctaaaaacatgaattattaattggtttgaatttttgtgaatcttatttgtaaatataaagaatataggtataattgtgatgtatgcccaagcctttattaaggtgatgtgctattgtaagtgtaacaccctattaacttaggcatgttattgtattttattaattattgtgctaacttttactaatcaaaggatatagtataaaatcttatttaattaatactttataataataaaatacttttatacataaacatcgtagatataaactgtttacaaaacttaggatcccaaaattaattttttaaatgtgaacaaaatacaataacaaaagtatcgcccaatgactaacaaaactgagcccatattgtcccgaaaatttgaacactataggtctaaccatccagatatgtacaattttcactgagctccaattagggatgcacatatccttcatggggataggccccatgggcacccatccctaatgaggcagggatcccctgtctaaatggtgaacggggcggggacggagattattttttgtccctgaatgttaaatggggcgggacggggataacactccctgcccaatggaaacccgtttagtattttattttaaatttctaacaataatttataatttatgtttatatttttagtatattagtatcatttttatgaattttaagttgtgttttagataataattagtttaatgaataataactaatgagtgatattttaatttttatgtagtttgatatttaatatgtttaaaattttattataaactttatttaatttattaggggatttcctgccccaattacaggatttcccgtcccatctcccgatggggaataagcagggatggggattaaaattcttaacggggatggggacggggggagcactccctgccaattccctgccccatgtgcatccctagctctaacactcactattgttcatccctgtcatttacctatgcatgaaagtatatatgtgtgtcgacagactcagtaagaaaagcataaaatataaacatataacctgacttgcaattgaacataataccacacctaattacaaatcctaactcgtgtccaacgcgtatgagtctcgaacgttcttaactatagtacgattgaacataataccagatgcaattggcatcccaaaattactagttttggtagcatcaatccatattatatgtaaaactagccataataccacatgcactcagtaccccgaaagtactagtggtagtagcactagttcgtactccctgaaagcacaaccaaccataatacacaagcactcagcacctcgaaagtactagtgttggtagcattggttggtacttcctgaaatgcctaacatatatatgttggtatctcagtaaaattctatgtagaccttaccaaaaccctgatatgttaatctgatagaaattgaaacatgaatgctaaacaagtacatatgtgcatcatttatactaattttacctcaatttcataatcgggtgtgctggtcaaattgagtggaaaaactactcgacgatcagaggccataaatcacgttaacgtaacagtggtaagtgtctcgctaaaatactttcgaggatttaaactcaaaattagaagtttcactattgataaatagcatgacattattataaatatcgagaaaacatgaaaattggagaacccaaaaaacaccccaaccaattacctaaatccccatacagttgaccgtttattagggttatgcctgagtaaatggttcaccgtttcttgtagaaattgtggacctttttagtgaataaattcaagacctttctaaaacaccttaatatatcatgttttaaagatatttcaacactcaaagcatcaaaaaccccctgaataaaaatccaccactaaagactaagctttgagtttccaaaactcaaacctttgttctaactacaacagttgctccaagcgtctaaaatcaatcttaatcaatcgtaaaatcagtttaaaaaaagtttatatcatcatcaaattcgtacaaaactaatttcacaaaaacacccatgtgaaccaagcttttcccttcaaaaacaaagagaagaaagacttagggcttaccttggtcttaagattcaatttcacttcaaaatctatctgaaatccttattgaatcttaaagaaattagcctgaaatctgtttggtaaaaatctatctgaaatccttgttgaaaaatttgtttgttgtttggttattctagggccgaaagagggagagaatatggagaaagaatgtgactttggtttgaagtctatctattcattttgattaatctttacattaccgtaattttctaataattaatattcaagatacaactctttttattctataaaaattcatctaaaaaatagataaaaataatataactgaagtggcaaatgtctaaaatgtcctttatttcactactatttatcttccataactaggggtaaagtggtcataactaagtaccctgcataatcctgatattctaactatccataaatctagctccactaattctaagatactaaattgtatttagtgacactattggctcaaacgtgaggtttctgttattatcgggcataaaacatgaaaatccaaaattatatataatatgtatgacacacgtagaattcaataaaaattttgtaatcgagaaattatatcactaatacatttttctaaaacagaacttgttttttttttactataaataataaataaatcattaataatttaataattttttatatctaattatactgttattataataatattttatttggaatctaataatatttacaaaaaataaatacatacacatattatgctaaaaaatggaaaataaatttaactaacgccgttgaagtctcatcgaccagagtagaacaacaacattaacaaccatcaccactgcaatacacaacaaattaaatgatggtcacattacatatgttattagttggtaattatttaagtattgaaaatatttgagatataagctaaataaattataatggtatcctatatataataagtattaatattaactagtccccaagatatagtcttacatatataatatagatttttaatgtattacgtgtgcattgagaatgatcaggttgtgtatggtaatgtctggtacgtagagcctgtgctgtggctgcacgcattagattcacacacttggaatggaaggtatgggagagactatatatatatgtattaattcccaccccattaattgctactacatttatgataacttatattatgataagctcattcatatcacttcttctcacgcccaatacatgagccagctttaaagccaagtaaaagaaaaagacagtgctgctgctatgtgtatatatatttagctcctctaaccaacttaccttacatatttataatctctatatatcccttatctttagctttatctttttctttctttctttcttccacacataatatatatataaatatctaagccctttttttttttttactttccattacttccataatatatgtttgtacccaccacactatcttctctttctccttttgatcttattttttggattgtttttatgtcaagcaatatttttctgtttggtttaggtttcgtttgtggaccatttacagtttcacacaattaatataaagttattattatgtacttaattcatctacctaaaagtatgcttcattaaggaaaaataatcgatgtttaattgattgagggcttgtttgaaatgtcgtatgaagtcatattgtattatattatattatattaaattgtattttgtataatatttttatgtaaaactatatgtgttattattttttatgaacacctaaatatataatattttagtataaattaaaatttaacatagtattat

SEQ ID NO: 295761 - DNA, 3903 bp, Cannabis indica
tttttttttctctaaagtctctgagtttcaaaatggataaaagagagaaatgaaatccaaaacccttcttgtaggtttttgagagggtattttggtatttcaacaattcaaatttttttattttctcccaaaaaaggtgcaatcagtacacattaggttgtcgaactttaaacacacgactcaaggcacatcttttgagatgaaacattaaatacttaaaaacatgaagggacaactctatttacctacctcgtacttcgagtacttatcaccccattcacctagtacgagggtctagcaagttcacataccaacagaaagttcccacgcaggcttgggaggcaaatattatcccaaattttacacagggtgatgtggcatttgtctaggtgacacgtggagaattttgagactttgacgggggatacaattttcggcatgccatccatggtagattattccttaaaaagaacttgtttaaagaataagctggaacatccgaatagggtaaatgacaccatccgaccagtgtcaatctcgcaacaagcccacatacactagtcaggataaatgcagctgaaacatctttagagatactttccttatttagtttatcaatcaaattcctattttaatgggatttccacacattattatggtaaaataggaaaatttcataatttccctttttatttctcattttttttttttggaaaacttaattgatgtatttcttccctataaataattgagttattccattatttagggagccaaattcgattcttcaagagagctcttatgttgtaaaattgtaagttttttagagagattaaggaactcaattgcttctcttctcgcaagtaatacaacaaaaagagaagtaggctattaccataatcatggggttgaagctctataaatctctatgttcttattgcttaattttatataattattattcactattatctattattctcaccgctttaattgatgcagcgtcgttgactaaaaatgaggtcaacacatattttatagcagtcttcacttctctaaatgattctggcagagaatttaagattattatagcttggttctcatcactcagtgcttcattctctccagaattagccagctcaaaatgattgtgatctagagtcctggagtggctcatcttgtacctaaaattcctttcttttagaaaaatcttgttcgtaaaagagttcggttggaattgctctttcaacttcttttagatccttgtcggggtctcttccttatctaccaatctaattattgcatcagatatattaaagattaagatccttattgtaatttcaaggtactcttcttactatatcttcaaagtacccccattcaattggttcttcaataacccttagaaacttctgatgtgccaacagtgatctaatcttccttctccaaatcttgtaatcacctacaccatcaaacttctctatattagttttaatgttactcattttattttaatcaatacatgaatttgaaatagaaatgctagatttagggttaggaatctcaggttgatttttaatagaatcgttcataggaacatccacaagtccttcaagttaaagacttgttcttgaagatcttgcacctcttgctcttgaggatcttcttcctccagagttgttgatttctatttcttaattgtgttgaatttgaacttgatatgctctgataccactgctgaaagttagctatctttcaaccctgaatcaagaaaacacaatttgtaatatttaggctaattcatatatgaaaactttgtattattctaaaccctgttactcatgtgtccatgagtccaagatagaataaaacccaacctaaataacaaagcccaaaacccttgattcaatacaaccctaacactatcagtcaaagctcagtccctagggttcaaacaacttcgagaacctttgagacactttgtacatgctagggttagaaattcacacacaatccacacacaatccacacataagagaaacacaacgctttttctcaaggtttactccaaaaatatgggcgtccttatcgagctcgccattgagatactcaatgttttactatcaaatcaagtatgtttacatcttcttcttctggatttcaagtcacaaaagtctactgataatcaaagtttgaagctttgaatctctttctgttacttttattaatttcttttacaaagatttctcaaacactcttttgttcttctcttcaaacaaacaccaatgtagctcaaagactctcaatcatctctctttcgggatttgaattttctagctctggtaatgaatctttggacttgatctggtttaaatagaagtagtagaatttgtttgtaaggacgtgagtacaaattgggctaagttgcagttgtagctgattctgttaagttgttagagtttttattttccttctgatgtaaacttgagcctctgggcaatcgtaacttttttttaatgtaatgcttgagcttaataagataatttattcttacagttattaactctaaataacttaataatctagattgacaagaaggtaaatttcatgtttggctaaaaaggcttgattagaaaaattaaaattaagattctcaaaatcaatccttcgtagtatttatataacacatatatatagtgcattttctttttagattcactacctttctccactaaaatctcacactttatatgaatgtctttcaaagcttgaaaagattcttgaataaatatggatagattataaaaaacagctttaagcaacacttctcaaccacttgataataatataatttggatgtccaactaggtagttcattccaaatttgtatcaaattgacactttgaccaaataagcaacagatacctaaaaaaaattgtgacacgccacctcatgaacatccaaatgagagctaaaacataactatagttttcaaagttaacaagttgtatttggattgtgacaaaagcctcaaaacatagcttaattaacttaattaagaacaatcaaaataggtaaaaatagtaatcaaggtctctgcaaccacaaccgatcctatatgtgttaatgagaattgggattaattaacacttctaaaataataaaatcacattcccatataataaagtaacaaatcatgcaataagtaaattattatttaagtatatagaacatactttttttatattataggttaattaataataaggacatcagatcaaattaaaaaggcagttcttgtggtttatgtatttatttatccgttgcctaagtccccaccattatttaatttattttttatttttacaataacattattaattttttaattatatgtatgggatatatgtataatggaactatatatgaataacatctcataatttaataacatctcataattttttttaaaaaaaaaataactaaataatttaaaatactgaaatcgaacaacatcttttatagctcataccttactttgtctccaatacgattgactactgaaatttctttgcaacatctctatatttctattgataattaatattatagaaacttataattaacaaacaagagccactcattatttttattccatttattgaagttctttttatttttaaataattcaagaatgatcagcttggacttattaagctactacggatagctatatatatatatatatatatgtatgttgatcacttgttaagccgtatatcattgttctacaatgatggagatggctataggagtgttcataaagtatccgatccaatccaatccgcacgatccaatccaatccaatccgtaaaatgcggatatccgcacttgtgcggattg

SEQ ID NO: 295762 - DNA, 2572 bp, Cannabis indica
agagagagagagagagtttgtggaatgaaggggggacactatgtgagagttagggttattagggttttaagtgtattggctgaagcccataattggttttatttttttttcataaatgcattgtttgcgtcggttgagcactgacgcaagttagtgtcagcacacaaccgacgcaaattagtgcaaaatctgacacaaactcatcgtctgttctcaatcgacgcaaattttgcccattaattttttgtgtcaatttgtaattttaatgacatcaaaaccgacagaaaaaacgtatttttgtagtattgattcctacattaattgttaactttatcaagtaagactttacaatcagattcaacactaaaaattgatagtttaactacatcacaccatgttaaagcttcatgaaaagtgagagcttcaacaagaagagggaataatacactctgccttgaggagtaacacccaactactaatcttccatctgagttgctaacaagtgtcccaaatctaattctcttagatatatgatcaacaaaggcatccacattcaatttgaaagttcctaacttgggtaaaatagttgtatcaatgacaacctcatttgttgagcttctggtatgaacatcttcaccatcatgtgttagaacagtggaagactttgaaagagcattgaaataatcatgaaaataagaagagacccaacattctacaacatgacagttaagcttgtcagaattattaatcaagataaaatttctcctcttccatatcatccaaataattccaaaaaacaaacgaagatctttcttatcatatttatcaaacccttgtaataacaagaaatctttaatgtcaagatacttatttgcattatgaaaatggtaaaacttgtgcatttttaaacccttttagcttcagaacactcaatgagtgcatgagaaactgtctcaattcctttacagcacaccgatcacataggatcagacaatactttcttattaaagagatttaaaccaacaagattgatatgaaaatagactttccaaatgaaatgcgtgattttgggaggcattcaaagggaccaaacgactttccaccaagatttaatataagcaggataagaggaaaaagaaacgaaagaagaagattttgtaaaatgataggccaagttaacagtagatgatccataagagtaatatcctcgaatgagacaatcttgaaccaaaatatcaaaagtgtaacgaccacatacttaaaatattgattagtagggtaattagcattaattacttttattttatgattatatatatgaatatatgtgttgtggggcttatttttagaaaaataggcattagagttataatttctcaattttggagattttaataaactctaggtgtattttatgtcatatgtgaaatttgtctttttattattttatttggtaacgatagaaaatgcgacagatggttgttagagtcacatttgtagtttagaaccttttatctagtgggatttatatatgtggatatttggaatattgggttcacgcggagtatgttatttgaccattttatcccttagccgcaaggttacttaagcattaagtaaaaagggcattattggaattttttggatttttgcctatgttagttcaattattttggtagaatttagtagattgatatactttaagttgattatttgaattagaattaaattaataaaaacctatctttatcctccactaagctagaaaacaaaagacaaaaataacaactcacctcttcatcctctctctttctttcctttggcagaagtaaaccaggggagagtcaagggttttgctcatcaaatctcatttgtttagcaagtttctaagggaagttggaagctagaaatcaaaggcaagctttatcactcatttcacttgagttttggaagttttggttaggattgaacatcaatatatggtgattaggttctgctcaaattaattgagcttggcattagttttttgggtaggtattgagttgtttgtagcttatttgagttggactcggtggtgagtttagttattcaacaagtttgtgtttaagaattcaaacctgactcaacaatggcattttatgttcctgtgtacttgagctgctattatttcttggaatatgcttatggatgttgaattaggtattctagaaggttaggctaagttttgggatgttttaagcaagtttcaaagctcttgggttttttttgcaaaaaacggttaatcgttttcccaggcagaaccctagtaaaaggtttaccgtttttgaaatccagtttaccagcgttagtagttttaggagccttagtatttgtgtttcaaaaaaaatattaaggttattgccatgctatctatcaataggaaaacttctacttttgagtttaggtcctcgagaaggttttagcaaattgtttacctatttacgtgattgtgacatagggccttcattcagcgtgtgaatttccattcaagacaatcaacacacatgaatgtggaaactgttggaaattattt

SEQ ID NO: 295763 - DNA, 821 bp, Cannabis indica
caaatagtatttataatacttattcgacaaaacgttggtggggttggctgatgttcttatccaaagtcagataatgattaagcgatgagggaaggagagagatctcaccgcttgagaaaatgttatatattttttgtattctgtgggtatagtatatatactagtattagaatcttaggatttatctttgcttttagaatggttcaagaatgtgaacttttttaatgagaaaaatttcaagttggggagccatctcttaccaaatatttgattttatattaaaaaatgacagaaaataagtagtagtaggtaaggtagcattcttaatatttgaactttattcagtccattccttaagcttaacacagcactaattaattatctttcataaagtttcagaaataacagcctttgtctcttcccaggataatatttgccaagctggtcttaaataaaaatcaccacagataattcagaatgcgaaatccagtatttttagtaaaacgttcgaaaactgcaatgctgggttaacaaatgatcaccttattattatgggagtaagatttcaaaagaacgttttttttattttcgacacttagaaattatagactttaatttattattttctgaaaaataaagtcccaaataatcaagtgcacatatatatataaaataaaaacaggcacacgtgttattctttacttaaattttatttgcatagtaaattatttaaatctatgtcacacctttcaattttaagaatgggctatttttaaaaatataaaaaaattattaaggttatgataaatatgacataaaaa

SEQ ID NO: 295764 - DNA, 6351 bp, Cannabis indica
tgtgtttagatattcactgacctattgatcggttttagatagaagctggtatcaacaagttctcgcagatctcattattgatattttgtgtgcagcatttggaccgttgatctggcatacctattgcagaagttttctgttagtttttcctactacacagtaacatttggagcaaacccaaattattctgttgaaacattttacaaggtgattcactcattatcgctactcttttttagtggctgtgtcgtggtttagtaaaatactcttgtaagaagctttaagagctatgtcaaagatacattacctagcaagagcataatcagatggcctgaattttttctccttaaatcttgtttttcttctacatcacaagtctataaaaccatggagtgtatcatcattattataatattatgccatgtagtcatggttaaagtctcaaagtcatcaacatcatgcgactccataggcacatgttatactcttttctcatctagactatgtattctttgattgcttgactatcatgttataaccgtgaatttccctcagtgcataactatgtgtgctcaaaacactactttagaattcactctaacacttcctctcctttgtatccctatcgacactacaaaaatctatacctttagtcatgtaaagttctaaacattggctaaatcatgatatctgtcaccagctttgctgtaatatccataacttggttctaatgccaattggggaaaatgagccctccctctatatactgcatcaagcataacacacacacgcacaataggcacgcactattttacacaatttagcaaaattacatactacatccacaggagattttacaaaatacaaactagaactcttatacccaacaagacgccattagtacaaattggtaattacccagaccattgtaaactcctattatatttatccaaatatagacctattaattaagaagttaatttgggtacccaactctcatagctaacattttctttctcaaatacatgtatcttctggctccaccgacttactgcatacatttaactcagtagaaccttggtttctatgcattagatacctatttcattttgtttcgtgttcagccttggttgttaatttggtatgaattgtatgaattttattttcttaattcttgtgttaatatacttgatgtacttattagattttctcatcttcataatactcaaaaattcagtttgaatatggtgtaggagcaattacctaatgatctgatacgagtggatatgttatttaaaaaatcactggaagctggaattaacatacaagtatgtaccatatatttgtagtaagaaatatgaacagacctagtatttttcataaattttgtcgtattttttgcctacatataatattctcttccattggggaataaattttttctctcacagtgcaggtcactcagcatagaagaaatttctcttctgatattgtctggggaatatatcgccattgctttagttgaccaatacaaattgaggtctaattttcttataatatcctcttatctttttattttcggtattgggcgactgtaaaatctccaatatttctaataataatgtatatatactggcaagttctgattatagcttcaaaattttgtgctctagtcggtcttggctgaaggatgtatttatctcagacatcagtgacatcaattctggatacactggttagcaacatttcttgttttcgtttatagatgtactgtaacatgccttattgagactgagggtactgaaattgtactgctgtaccatttgattgcaattgctgacttgtactttttgaagtgatattttcttgaccttgcactttatgatatctaattgtctgaatgttaatttgcctttgagactccacatttggctaattttgtaattagtgtgctttgtgctgattgttcaaaagatcagtttggcttatccaatgacgggtagctcaaacagcagacctgtgattttctcccattaggcctgtggcttgagtttcctacaaatattatagggtttaggcagagagccccattttagaacttgggtccattatcttgggaatctagtaatttttattctatgattctcagctatttctgtcacatttcatttatttgccatttttcaatcttcaccgtatagtaatgggaatgggaccttcccttttctttgatcttattctttgattaggacctgctgtatttttagttcatcactgtttttttcttaactatatgtaatttgtctttgattgtttccttcaattaggcttgagtcatgataaatgatactcatcagaaattctcttttcttttataggccactatgtgattatatgtggctacgacaccgaaacagatgagtttgagattagagatcctgccagttctaggtaatatctcatgtatttcatggttgcatcctttctattaatccaaaatctacttggaatggtaaaatgttctgaagaatttaagtatctggttgttgacttttaaaaacaaaaacccttcagttgttcatgcataaacttttcgaacattcttaattgttctttataatttattctgcttattttttttagtgacgaattctaatggtgcaggaaacatattaagatctcttcagattgccttgaggaagcccggaaatccttcggtactgatgaggatcttctcttggtaattgataattcaacttatattcccaacttttaaattttttctgatcttttaagttcaaagtgaaagtggtgattgataatacaaatatatatgtttggtaaatggtgtcttagaatctccaacttctccgagcaataatgtattctaactttctgaaattcaatcacccaaattcaaactaattgcagcagcaggtagatcatgttaaaagtacattaataattcaccataatgcttcatgttaaaagtactaataattcaccataatacttccaatatttttctgaagtaaagaaagcttgtaaagtggcatgtggtaattctttttattgataatcacttttaactcgtatggtatattcatgtagatttcattggacgagattgatcgtaagagaataaggatcagcccatctctacaactttctccccatgtaaaagtcggttcattctgccagatttgaggtgtcatgactactcatgacctacatactgtgtataatattgatattacaaactgatagagtgtagttttgtacattaaggaataatatcttttcccagcatcaaccatgcatagcattcatttggttttgtgcttgaaagagagttatagataactatactatatagatgctctgtatattctttcaataatgtaatctatcaaattctgctgttcttgtaacattttattcttcttaataaaattaagatttgttttaggtcatggttgtgtttcccaacttttctagcattttcctgtaaatgggtggtatgggttgctttaatacacaaggcatgaaacatgtaattgaagttgaagcagtagcgcagccattatttatcctcatctttgtgtttgtgtgagtctcaaagttgaatttatttagttcatgaaacccttgtcaaaaatcttgaatgtgagttgagtgaccccacggttgtttaataatcttaatcatatttcatggagacttcgtgtgactagtccctattttaagccttattaattattagagtgtacatacattacatacaagcattccttactgtcctaccttgcacgtgtacttgtgatctggcaattctaccaagagagagtgggagcattgcgtccttgttttaaggttactctttactagacagtcatgccattctaataagcacagaattcaaccatgtaacacgaattcgtggaggtgaacaatgcattaatttaagattaatgaagtctaaacaaatcataaacacattattttaaattataagtggcatgtagtagttgtcggaagttgggttttggttaatataactattgtttatttatcatcttatttttttggggaaagtagagccacccatccatggccttggaaaactgagttgtggtgagttggaagtggaaactggtttttgagttccaagaatttacattccacaacaacaaagatcccgacaccacaaactcttttcccatagaacaaggggaaaatgtctttcttcccttaacactctaaaagaggagatattaaatagctggttagcattaataatcatctcagttttttattttctcatttgtctgtcaactgtgtttctataaatagtcctatttttattttatccacactagcaattatcacaattcccaaataaatatctttgtcagtgtaagtaagacaagtgctattaattttcagctatttaaaacttgtgtggcaaacacactgcaaattatcatggccttaacaaaaaaatatatatatttatactgcgatctgctagctggcttatagatacttgcattgcatttttaggattgttttgttttggatgtacgtacatattactcgtgttaattattgattatattttagggactaattaatgaagtcacgaagaataatgagggtgcagtggtattggtagaagtagtagtagaagcccataaagaccatgactaagccacaatctcacaaattattaaagtaattataaatacatatatttatttatgtatacaaagtcacaacgtggaagcacataagacgacgtcatcttctgcaccgattaagatcaagacatgagatagctatcttctttctgtgtcaggttccaatcttaattaccaccttatgtatccaatacaaattaaaactttacctacaattatatgtatatatatttatatatatgaggtctagattcaatgcgattagtcccccatatccctattattcatcgaaattttcattttaattttttaattcaacaaaaaagaaaaagaatcattttaattgtttatttaagttttgtttcatgaatttcctatattataagacaataagatgacccaattttgaatatggatgaagttaaaattaatttattccttcatttgtatatttgtagcatggatgacaatgttcgaatctgccaaatatttctgacaaaccccatattcattagatcaaattcaaatatttaaagtgtttataattttgaatacacaacaaagagacatagcacactttagctagaattgtatgctacctgctaagttctagttcatattttttgtacactagttatataatatgattacatttgtttcatttaaattatccttgatttttttttacaaaagaaaaattaacttcacatgactttttgaaaatataataaagagaaaaatgttattggagctaatggtgagtcatcatgttacggtagatggcaataaatgcaagaatgtctgcatgtgagttgttccttatgtagcacgatgcaacttattatgattgtaatgcttaagaatctttcatgctttataaatttctatttgattagattattttaaagaaaaagaaaatttacttatagatgaagacacactttaaaagcaaaacctaaaaaagacatgcatgcatggacgcatgattgagggggtaacatgttaggagataatttgtacacaattgttaattaggtatagatttattgaatgttagcatatatattaatatcattgtagtaaataccgaccaattacaactctatatatggcattggcaacaacttcaacaaaaaaattaggtgttgaatatattttttgcagcttaaaaaaactaccaaaaatttaaacaaataattaatagcaagctaccgaagatacatatttgaataaatggaagtccttgcttaattcgttgtcatctctctctctatatttattctatattaagtgtgcctatataattgaattcttaatttatgagaaattgatgggtgtgattttttatttatatttaataaaataataaaatagtatttatatataataaaataataaaataaaaataaaacaaatcacatttaaactgatatttgatatttgaattgatattatttatatatatatatacaatattatatattgttctcatgtgatattatttaaaatagtagtttttataaacagagggtaccaattcatcattattcaaaacataaggtactaagtatgtattttaacaaaacacaaggtaccaaataagtatttaccctaaaatatatgtacgtatattttttctattttttttaat

SEQ ID NO: 295765 - DNA, 2509 bp, Cannabis indica
aaatatttaagatatttagaatattagagttaggcgggattataattttggacttactttatttctctaaaaattccactaagtggaaaaataaatgaaaacttaaggctaaattttccaaaatgtccattacttccttcataaacaaccttattgattagaggtaaaatagtcaaaatacattacctcacataatttcgacatacgaaatgctcataagtcgtttctcgctaattctaactttctaagacactaaactatatctaagtgactttaatggtcaaatcgtcaagttccactgttatcgggcataataaaacataaaaatattaaaatttataattaacatgcatgacacaactaaaatacaataaaatttccataattgaaaaattatttctcaaatgcctattttttacaataaattttattttgtactaaatgtacgtatataacataaatagtatttaaatcactaataaactactaattttcgtatctaaatatgcggtaattgtacaagattttggtaaagttctatttgttaaaagaaaaatgctatcggacactttaaggtgccaaacaatacaagacatactattgatgtaaattaatataatgagtctcacatattttaatttaataaataatataaaaaattactaattactcaaaatgtgacacatcaacataatgttaggtaccttgctcttattaaaacacttctctttcttttggctagtttgtaatttgtgagtttctgatcaatcaattattgtctcggataagaagtattttgttagaatcctctttgatttcgatgttataataagaaaaaatatatatacataaatagtgaaattatctggatttagattttaattaaaacatttgatggagatgggcagtcaccggccgcttcgaaaaactattctttttgccgactttatttatagtatttcattttccttaataaacataaaatatccattcattttcttatttttaaataaaaaaaaaagtgacgacttaggacgacgaggcactaaatggattgacaaaaataaaaataaagatgaagctttttatgtttgaaatctgtcttaaatatcaactcaaatccacctaaaataccaacaagaaggccccagcaaccatgatattttcactcatttgttatcggaattatactattttctattgttaatttatttgctttcaaattaatatatttatatctatgtgatatttgtcaaattattattaaaatatttctttatataaaatttgttttaaatatgattaaattatttatctatcaaatacataatatatttcatgcactaaaaaaataaaaaatatttaactaattctaaagtttttttaaattaatatttaatttcttgaaaagctaaagaacaaagaaaagaaatgaaaccattagttttctaacttttatatttttaaatattaaaaaaatagatttcaattattagaaatttattaatttaaatttgttattaatatataatatcttacctaattgttattttataataactgaaaatgtatttcattaaatatttattttcagtatgtttgtaattaacataatattttgacattaattaatgagaactagtattaaaaacaaataataaagtaagcactttgtcattatttaattagagtttataatatttttcaaaacaagtaactattcaacacttttaaaagcgtcactcttatttgttgtttttaaattctataactaataatcaataaagtgcttatatattattcattagttatgccaataagatatttgtgtattttactttttaagttgtgagatttgtgtgattttttacttatctgttgagatttgttccgtttaacttttaataaaattttatctttaatatcaatatatactctaaactaatcattcatttagtagttatattttcatgagacacaattgtacttgcaataaattgttttaatgtagaggtaattgacaaactatattgtaatattctataattggttaacaatccctatattattcactaaattaaagtatgaaaaatttaatattgaaatgcaccaatattactatactattttgtgatgattgacaccttaaagtgctatatgctaatgtgtgattttatttttgaggaatgctaatgtgtgaactttatttcaaatgttatttaattagccctaccaataagatatttgtccactttgctattttttaagttgtgatattttgttatcaaaatgttgagtcgacactcttatggctattagattgtgaaatttttagtagagttttgatattgtaattgagttaaattgactgtattttaatatgacttccacaagtaactcttaatttttgtttacaacaaaaaataaacattaaagcacttctaatagatgagctaaaatagttcaatctttaaattataaagaaaaaattataaaattgagcttccaa

SEQ ID NO: 295766 - DNA, 2982 bp, Cannabis indica
aaaatatatattttttttatgtttcatttacaattttacaaataaaaatacgattttttaggttttaaaattatacaaatattattttctcagcaaatatgaaagcaactcaaaaataatgagatatcaatcacacaataactataaataaattataatataatataatataatatctgcaatttggtcacaagcaggtgtgtgaagaacataaagttgcttgttgacgaccctttctcgaacaaagtagagatccaattcgatatgtttggtacgggcatgaagaatgggatttgctgccatgagcatggtgttttgattatcacaccaaatagtgggtggcttgggaattggaactccaatttcagcttacagtgcctgtatccagatgacttctgctgttgtttgagctaagctgcggtactcagcttctgtgctggaccgtgagacagtcctttgtttatttgaagaccaggaaacaacattggagccaaggtagacacacaaaccagatgtggaacgcctatcgccaaggtctgaggcccaatcggcatcacaaaatccaatcacagtgagtgatgcagacgttttaagaagcaaaccaaagtctaaggtgccattaagatatcgtagaatcttcttgacagtcttccaatgggcctcgagaggtgtttgcatgaactgagacactctgtttacagcataagaaatttctggtcttgttatattagcatatttcaaggcacctacgatgcttctgtagtaggtggggtcagcaaatggatcactaccagtagctgagagcttttgacctcctgtcataggtgtaggtaaggggttcgcactatccatttttgccttaacaagtaagtccattatgtatttcttttgggacatatggagccgttctttggtgtgagtaacttgtatgcccaaaaaatagttgacaagacccaaatctttcaaagcaaacttgttattgagattggaaatgagttctgttacaactgtggtggaactcccagtgaccaagatgtcatccacataaacaagaagaaaagtagaatgagaagttgtgtgtctgtaaaagagagaggtaccagctttggcacaacagaagccaaatgatacatgagcaattttgagtttgttgaaccaagtccttggtgcttgtctcagtccataaatggctttggtcaacttgcatacgaagtggggagcttatggattaatgaaaccaggaggttgtgtcataaacacctcttcttgtagcaccccatttaaaaatgcattattcacatccaattgtcttatggaccagttgtaagacaaagcagttgtgagtacaatcttgattgtagctgtcttgacaactggactattaagtctctatgaaatcaaagacatattgctgaaggaatccttttgctaccaacctggccttacattggttgacagtaccatttgatttttgcttctctttgtaaacccatttacagcctatagcctttctaccaggtggaagaggaacctttacccaagttttattttgagtgagggctttgatttcagtttgcatagctaccagccactttggatctttgagggcagcaataagagtgactggctcttttgatgtcaagtagacctttttcttagacaatcctgccttggcctttgttaccatagaatgttgatttataggagggtgaggtgcaggtgcagaactctctgcaggagttggggactcaggaacaattgcaggggaaccaacacttaaagtggtacttggagatgagtggaaagaatcagtggttggggaagtagtgggtgatatggaaggattttttgggaagagagtgacagaaatagtagcagatggagtagaatggggaacatggacatgggtactggtattaggaaacagggtactgtaaggaaattgatgttcattgaaaatgacatctgttgaaacatacacacggcctgttgaggaaagacatttgtatcctttatactttaggctatacccaagaaagacacattggacagacctaaattcaagcttgtgcttgttgtacggtcttgtgtttgggtaacaagtacacccaaaaacttttagttgattgtaattaggatctttgtggaacaagaccctatatggagtggagttttgtatgaatggggaagggagtctattaataatgaaggcagaagctatgacagcctcatcccaaaaagagaggggcatggatgactgagctaaaatggttaatgcagactctattaaatgtctgtgtttcctctcaacaacaccattctgttggtatgttgtaggacacgagactttatggttaatgccacaagtcaagagataaggttcaagtgcttggtattcaccaccccagtcggattggaaggctttgataggacaatcaaactatttttccactaaagttctgatgttaatgaatgttggtagggccttagatttgtttttaagcaaaaacacccatgtatatcgactatatgcatcaataaagtggacataatatctatagccttgtgataagagttttggggaaggaccccagagatcactatggattagttcaagtggcttagtgtaaacagtttgggagttagagaaaggaaacctatggatttttcctttgaaacaagcatcacaaaagtcattaacagttttattagaattaggaatgttacacaaggacattacatgtttgacaattctagcagatggatgggccaatctgttgagccatgaagagaaatttaacacctgatccttattacaagtgatcttttaagcatgattaacagaaaatgaaacactgggatggaaagaatggctcgagggactgtcttgaatatgcatctgagaggaaggaatgacatagagaccatttttaagatgtctgtaaagcccgcttagttaatttggaaattagcagttgttta

SEQ ID NO: 295767 - DNA, 2843 bp, Cannabis indica
gatcagttagagagatgcaggtgcaacggtgctggtgttcagcgagggtgggtctcgacggggcggaggagggtaggctatcgggtcaacgtggtggaggtctggccgtggggtcgtggtagtggaggtctggccgtggggtcgtgggggctatcgggttgggtctcgaagaagaaaacgaagaagacgaagaagaaaagaaagaaaaagaaaaaaaaaagtaaaaaaaaaaagaaaaaaagtaatttttttttaaaattatttatttttatttttatttttttaaattaaaataataatacccccaataatatttcgacacgtggcatttgaattgggtttaacagatctgttaacttggagaccaacggacaaataaaaagtgtgaccttgaggactattgccgttactttcggaccttggggactaatcagcatcaacgtgaactttttagggacttttgccgcaaatttccccttttagaacaccattcattctaattcagaccgatataacgttttcctttgcacaattttcactaatggaaaagatcaagacaagctcaataacaaaatttactaaatgaattgtatatcattattgagaacaaacattacatgtcttaacttttacatataaaaataaataaataaaagtaaaagcaattaaacatcacaggagagtatatcacccacaagtcaccaccgccaagtccaacctgtaattcgggcactttcgggcagaaaaaaaaaatctaaaaccgcattttgattccctgcccgaacgatcctaaagttgcccgctgagctgtcttccaccgattatattcaccaataatacatcattataaccaaagaaaaaataaaataaaataaaatcagaagtccaaaacatcttccatagtcgtgcttcagttttaacttgaccttcagtcatatgtgcaatgattcttgagttggattgcaacattgagctttttgggatcataagttacattgcactgaatatgcttgttgaacctgggcttaaccaattttcccaaaacgtaagctctggatcgaactacgaaatccaattttaatttcactggtagagtagtcgtcccagttgagctgctcagactagctccactaccatacaatggtattttggtacccattataggaatactcagagatctttggcttttcctcgattgataaaacttttttatctgaaaaatgaaagagacgcccaaattagagtgaggaataatataaagatataactgttaatgagtaaaggctgaatatttaatgacttacagttccagatgctactgtgatctcggaataagaaagatctaatggtgttgatgtgacatgaactccaaaaaatgtaccggtattacggaaagtgagctttaagcttgcgttcattgagatcatatcagtagccacgcccgtaaagtcagagcccgcctggatcttgaattggtcaaacttaatgctctgcaagaagaaaaaacccaaatgagtaactgaataagatcccacttcaaaattcacgccgaataaccaaatcaacatagcagagaaaaaataaaatagaaagaactcagaccttgactgtgatcttcggtttcatgggcttactcgcaccccacaaaatcagagagaagaaggagaagagaacaaagaagccaaggacgaaagcgagaacataacaccgacgaggaagacccttctggcgatcttccgcctctaaaagcccttcttcctcaatcacggcacactccttccatggcttttgacctttggtgctgcccccacgagcggcgtcgttgggcgagatcttgcgcgatccgggtttcagagatccggagaatctagtagaggaggattctcgggaatggcggcccacggaggagtgtgagtgcggcggcgatcccatcggactaagcaccggcgtggactgaaacgacgttgttgtcttctccccatcgtgggagtcccttgatgggctttgcacgtagtagacatggcgacgcggagatctcgtcggagaagaagctgcgaggctggtcacctctgagtctgtcttggcgtgcattgcagctaattaatgactccgaactctctgaattgttcagcttcgaaaccgattgtcggtcgaagtctctctctcgatctcgatctcaatctcaatctcaatctcgacagtgaaagtttttagattggttttggttcgagtgggagactgcgagttggctttattaaaaggaaaattgggttcaggaggtggaagcttaccgtaacaagtagactaaaatattttaagccattatcgctaaacgaaggtcggtgtacagttttcctttgatcgagaaggacaaaaatgcccacacagcagtaggtattaatgtctttgaaaatagaaaataatttcttcattataattataagttattaatcgacagccacgttacagttggcatcactacccacccttttaaattctactttgaaatgctgaaagagttttatatttaataaaacataaaacacattgacaaaaatggcaaataacgtgggcttgatgattgatttatataaacctttcaaataatcttgaataaggatcaaaaggaaagtttaacttggaataagacgagttagaattctaacacacataaaacatgtaagcatttacatttcacagtaagggtgtatttagaagtaattgtgtaattactagataggataattactaaggtggtaattacctagtttagtaattacactatattttaaaatgcaatgtgtatttggatgttaggtgttaattacatatgaattcctaat

SEQ ID NO: 295768 - DNA, 2201 bp, Cannabis indica
atattttagatgttattaattaaaaggtttcttcttcccagttagagcttttacaaaggaggaaataaaatatggtatgaatgctcatttttatataaaaaaaactagtctattattaataataattcttgtgatgctgtgttagctattttgaataatgagtctgatattgctaaaattaatgaaactcttattgtattgattcttaaaaataatgatggaactaagattactgattataggtctattagcacgtgttctattatttataaggtggttttcaagattttagctaataggattataagctggtattgaatgatcttttttctcctaatgaaagtattttcttgtctgatagagttattattgataatatgtatattgctaatgaaattattcatgctattgtttatagaaaaattgttaagattggttggggtggtcttaaattagacatggaaaaactttcgatagggttgagttggcttttgttgaagctattttatacctttattttaaataatataactatcctatttgacttgatctttgttctttgtaacatacggttgtcgagacatttaattattttgatgtaaggttcttgagaaattcgtgaacctttagatgcatgtcttaggtacatattcctcggattacatactgattgcaattttgaggtgattaataggagcaaccttaaacaaattaagcctctcatctttaatgtcaacaccaggaatattcttaaatgccttgacaagcttagtacccataagaatatgttgattgtcttcacatttaatgttataattatcagtttactctgagaagaacatgcacgagcttcatattgcgaggaggctatttatacctcgactcttaaattcaccgagttaatttatttcttttgttgtacacatgtcatgcagccagacccattatttactactcgaaatatgggtataacactgctcaatcctgttatcatatttaaaatattcttagtttatataataaggctattggcgccctcgagcttgagtccttttgggctcttgattgaaggtactttcccttttcaagctctccatgctcggtgtttgcctagtgcctgctcgattactaggtgtagtggtggtgttccgagcattcatgatttttccttggacactagttcccacgtgactagcttgtcgacagggtgtctctctcaccaactcagaaatacctcttccggaagtagttccgtgattaaagcaataagcctctctaatttgttgagacaggttagctctctactgtttctactcaacgcattggcttttgatgttcttccaattttccacgaactagtgttgaaaccattcgtgttgcttattgagagagacttgcacctgttgttgcaagtcagccatagtttggctgagctaagctacctgaggatcgacctcctcagggtcttctgtctccacacgtggatccccaggtgggatcaggtcattgatgtcagtcccgagagctgctagtggtggtctttgaggatgagttgatgagctggttctgagacatgctcttggtgcttggggcacaagagtagtccctggaccagctccatcaactggcgtgctcccagttgattggccagttgctagagtctgtctgtcaacacttatagaacgtgttgcaaccatccttcttagtgactttcttgagctgtggctctcaatgaaagtactaaaatattgactcaaaaatctagacaagacttctaagccacacccgctcactagattggcaagaatatgaaaagttgtaaagtagttaatgagagacacgacaatttatagtagttcatcccctatgttgagatagtaatggggctacgtctacttcaaatgtttattctcatgagatggtgattacaaaaactatttaataatgagaaacttcaaattctaaagagagaagctttgaccttatctgtagtttttctgaatgtgaaaaatgaactaaaggagctctccttttataagtaaaggagacccacaaaaataggagatatattacaaataaagtatttaccacatgtactattttttttaacttttttttttcaaatttatgatttgggtttctaaagtggttgcaactatagttgcaatagagatttctatgtagaatttcataaaaataca

SEQ ID NO: 295769 - DNA, 2377 bp, Cannabis indica
aggacaaaatataggtttttttttgacacacataaaaagaggaacaagacaaataaaaatataggtatacttaatattattgtattgtaaatacatttgctatcaattaaatcagttgcaacatttctataaataaaatgcaaatcacgtccctggatgcaatttttttcatattcaaagcatgttcctgtggagttgacttgtcccttttgccatattgaagaggaatctatttctcatgtgttgttgcattggcatttcagtaagtcatgttcgaataggtctggtttggataagtgtgtcttcacaaaatagtagtgtctttcattagtttcaatagttggttgataggaaaaggcccgagcttatggaggaggctatcatgatttgttggtcaatatggaaatctcgaaatgatattatttgaaactgaaaagtttgttttgcagctgatgttttgcttactgcgaggttagttttggctcaatggaaacaagcttactcaagaaaatttgagtcaataccagtacccctggaattttcaatagccgcgagcattagacaaaacctactactcataaactcaagattaatgtcaacagtgttgtatttgaggctgcaaatgcgtacagttctggtgttgttattaggatgagggtggtttcttggttgaagctttctcggtgtatactccagggggtgttcaacccgagcttgcgaagattgttagcatcaaagaggccttaagttggatcaagagaaaggttgtttaagacattattattgaaacagactatcttttagcccttcaagctttggatagctctgttcgtataccttcttttattggtttattttattaagcaatctgctaatagttgcgcactgtcagctccgactgttcttcaaacattgattagtgccgatttggctgattaatggattgtgaccattttcaaaaaaaaaatataactgttacactacattacaatgcttggtgtacaagatttattttgttcattaaaaaaaataaaaaagttcttcacaataccaacttttttataattggaaaatcaacataactaattactatatagtctactttttcttaaatcataaatccgcagaaaaatcaggatcctcaggcttaaataactttttaggcatagcatcaggcttaagattagacgtcactcctttatgagaaatattagcagtttttctagtatttgcagcaaacttagaagccaaaacagtagccccaagttgttgcctctgatgggtagtatcatcatccatcgttgaacagctctgatcatgatcatgatcatgattattatcaccacaatattcttggtccgaataatagtactgatacaactcttcttgtcttgtcaactcatgcgccatcttcctcttccaccaccttctccaagccacttgtacataacaagccgcccaagtcctccactgctgggagtagtatcgaaacgcctgctgcagcctcttgctatgcagcctcctaaactgactagccacaaacttgaggtcctcggcccggagagcaaaagcctcaacttctgttatagaccgaacagttcgagtggagcaaggaaggttgaggctagaagtaggcatgagagcccaagtcaaaagctcctcgccacaaaagtcgcccgacctgagtgctatggagttgaagaaaccagagcgtccaccatcagtggtggagctctctaggtgacctctgataatgaagagcatctcgttcacagggtcaccctctctgactatgtacgtgtcttttgtgttcaaggatgacactagtctctcacatattgcatctaggagttggtcatccatttgggcaaagaatggaacctaacaaaaaaaaatccttctccattttagtaattaatatttgtgagtagtgttaatatttcttagtcgtgtggttcccaagtgtgacatttatataagttagagtagatttgttacttacacgacgaacaagagcaagacagagatgtctttggatttgacgcctgagatccaaaggaagatcgtataaaatggattcttcatcgactcctctcgtggcaatccacttgtattgtacgaaacgacgaactctatcttgtagttctagaggcagttgacggtgtctcatccactcctctgtatctcttcttctcaccctccattcttccagtctagccgttgttgattgcaaatatgacttcataaacagtataatacatattaatccaatatcatcatatttatgtacatgcatttgagggatagatagatggtttagaataatgaactaaggtgccgtttggtaacacttttgttttttaattttttaatcaca

SEQ ID NO: 295770 - DNA, 16269 bp, Cannabis indica
agagataagtagaatacaaggagagaaacgagttttattttaatttgtatgtcccctcaagaaaatttaggttagcaccgaatacaattatgcatgtcactagaatggaagaggctgttgatgatatcttatcaattaatgcacatattaattaagatattttagaaaacttctacaatatgcacactttaaaaatttgatacttgagagaatttgttaatttaatttttttatagttatcgacaatatataattatttaaaactgggtcctacatttctctagtgttttatttttatttcaactttttgttctttcatgctttcattcatgagtcttattttttatagttggaattttattttgacaaatcattaataatgttcatcaataaaaaaatggttcactcagttaaaatacatggaatatttaactatcatgaaagaatttttaatatcaaacactcaaacatgaaacaacacctcacagctttcaaattccttagagatggcattttataattgaaattgtagatttcagcactttaactgttttattatttgaggagtaatttcatcatttattctaagtcggttggaatttaaaagcacaataattggtaaataacaattaataaaagtgggtagggtagagacttgttgatatgatatcataaaactttaggctaattctaatttctatacctaagtaggtgataggatttatttgtaacaagtttttttttcctaataatacttttatctactccattgttatattgaattttagtacctacattaaaaaaagaaaaaaaaactagtgaatttatgaatcattgagtatatgaatatatattagtattataattgttattttaggtcttgattttcataatcaaaaacatttttaatttattttaaaagcattaataattagttgttctattttattttttttcaaaaataaactataaaataagttgtaacatcctatttttcttaaaagaaatatcactaaaaatttttttttattataattatattaaattattattagatcatgtggtacagatattgaatcttgtctcaatatagctgaaaattgacaataatgtaaatattgatttagcttatagattaaatgaagtcatgcgacattcatatactattatgagatgacatacatatagcaatgatacatgttttgtaatattttataaaattcgacatgatagtggctttgacgtttaaattttaaaaacatatcatgaaaaaaaaacataaaaaatattagttagcaacaaaaaaaaaaaaagaaaaaaaaaatattacgataccatctcattacgctatcaatgttacatatgatatttaactctatattttatgatatatggattggtttcaaatatatattgaccatgttttagttgactaaaacaagtatatttaaaactaccaaaaatgtctgatctcacaaaataaaagaaaaaccaaaaatgtcatggctgacatatatttatccaaaaaaattgtcaaacttatgtaaaaattcaaaaattacccgatttgtttaagctaaatagtgtaattattattagtcctatttttcaattttatttgcttaaaaaaaaaattagattacctaagcaaaagatagcatggtagatacacattggaatctttttgttttaacttcctcaactaaaacttcacaatacgaaataaaagtcactgacatccagccaagtgattgacaatccgttatatttgagtagtttttcttcttacaaaacaaaaggtaaattattttgacacgccgcaaaaattatccgtaacccgttttattttgtgtttttttttttaaatgggttttattttgtattcaaataggataagtataattgtaaaaaataaaaaggataatatactaatagttttgttaataatacgagttctgacagtattttcgaaggtatagaatgtggcctagtgtttgcagtggaataaaaacaacaaataacttaataatcagtagttgaccgaatattttgcattattaaactaaaattaactccctttcaaacaaacataataataaataaaattaacatgtactgtatgcccaatgagtcagtctcctctcctcatcagctcaaaatattatatttactaaataagatcacaaaagaattggattagtttttggataatattcattattaagatgggaatttacaatgccccagattgtttgtccctgaagtgacaatgtcttcatttgttaaattgaagtcaaatgaaggaaattcaagggaaaacaaataaagaaaagtctttattttgttaaataccacgcatagacaaaaatgtcattctgtatcttccaagccaagcttctctcccaaaaaatattcctattcttaaagaaaacaaaccccaacatttattttacttttaactttaattaacttgctgtttatatgaaacaatcaaatcattctcaaaacaaaattgtttgactatgaactcaaggccgctaagcaaactaattaaattcctcaatttcattcacattttcactctcatgggttctttctcatttcaacaagattgaagatttcacaaacttagtgcagacctgtacttcgtcttctgtatggctctaacgtgtgtatgccgtgccacattatggttctgtatggctcttcttggacaaattaagctcttgatgatccattccatctgtacagcttccactgaaacaagtttctaattctattttctagccggatcttcttttccataactttggtgttcagaaccttctggggccaccttatctgcaaaaatttcaccctcttactagtacaagtttatgaagccacaaacactgcaaattatgtatatagatttagcatcaaaaataaattacatcatatatatttaaagttatatgactactaaagtttgtcagtagattgtttcaagccgttaaatatgtattcataagtcacacgaggataagaggtcattaatcagatcagattattgtatttttgagcaagaacgatttgtgattattatcatataatatttgtacgtacactgaagccttagaatccactaatgagttatatatcatactatgctattctacaaatctgtagtaagaagaggacaggcatcattgtcttggaacagagacaatataagaaggaaaaagataataagatgaaacagagaggtttaaacactgtttattcctagtaaaaggaggcaaattatttaatgtcagttactcaatgcactacagcaagaatgggattaaagtctgccataatttagataaaaaaaatatatataagtaacaagttaacaactgctacgaaggtttctcaagggaagctgataacttttattaaaaaagacccacttcagcaaatgaaatttagcatgaaagaataaagatactgcacaagggacatccaaagaagttatatcatgtttggggagaaaaataataccgtgcaatgtgctcacagacagcatccggtccatgttatcaactcttctttgtatggacttgagaactaaattcattgatgaaactctctttctaacagtagatatcttggcagcatattgcatgataaatggcagtggagcatcttctaatagtttgtcaagttctgcaaaacttcacaatttagttttttccctaaaaactacaaagacaaaggaatcacaagtacaccgcacaaagttgcagtatctttggcgacagcagaaaacaagccttgcagaaattttggacaaacgtttaccaatgatgggtctaccaaaagcaggccaaagtgactgcaacgatagtatgcttccctttcctagtgtaaaagtgcttgtctactttgagataactaagctacaattcaatcaattcaatgaccactcagatacatggtgacaaacggtactcatgctcaacaaattcaacccaattaatcagtaaaatgaccaataatgtatctgagcactttagtctttagtaagaaggagaagtggaaggtgcaataagggtatcaatacaattggacggatttgtgagtgtttgaggggagaaaattaaataaatggattacaaatactcaattttaatcaagcgacaaagtataattctactagtaaaatctcctcattctttccccttctttctcctatcaaccaagaaaatgtttctagtctgctctccaaatgtccttataaaacaccagaaaaatgagtcttccatcttctttctccttacatatatcattggtttgactcatatttgagataagaatgtgaaaaatgaatctcggacttacagttacacatgaagattataggagtttttataaactacaaacagtagctacagtacttgtgaacacaacaacatggttaagcatagaatagccaagttgagcttctaattcctgtggctaaatctaatttctacaaaaaatagatcatttcgcaccatttatatattcaaagaatttatattgccccttattccattgattttcaaaaaagaatcccttaataacaagagagagtacctccggttagacgatcgatggaggaagagaggtggtgctggctcgtgagagtatcctgggctttggaatcgaaatcggagatggtggtggagagaatcgatgagaggcctctggccaaagcttcatgtgctgggggagattgtaaatttccattagaatcgtgtgaactgacaaaaccaccgccgaattcggggcctgtgactgtagaaatactgttatcgttctctggaatctccatggaaaccagtggaagaaacaaaaaggtccaaattaagaagagatcatccagtacgatcttacattgttcaaaactaaagggccgctagtgaagttttgggccggcccatttctggcccagctctgctcctcgtcagtattttaaggcccggcccagtccttagagtatccgtttttacagttttcggctgttatttccttggctcttggtactggacatcggcattctgagattggttcttcttctaacacagttactcagtgaaatctctaagtacgtttcgttaagattaatgtttactgttttattactagtaaagagtaactcttttggttccttgtttcgggctctgtaacaaagtatctcgttatcttttggcacatgatgatgccgaccacgtgtttgacgaaattcccacaagaaaaacttaaagcaaagcaaatgcattcctcccttccttctttgaattttagtttttaaattggatcatacattctatgtacaagcatacgtttacgtatttatgtatgcataattaacttataatgttttcctgcattgcagtaagcggctctgtttaacttatctctgatccatgaatggcgacctgtagtgttgggcttcaacgtttgtctgtgttatcctgtacaaatgtggtttttttaagaagacccaacaagtcgttatctacagcagttacctttgcgaatgggtttgcagccattaagtcaaaccagataataagaagctgctcctctaccaccaatgcatttgtggttgctgatgatgaaaagtacggcaataaacagattattagtattactcctcgcctttatgattacatcctcaccaacgttcgagaaccagaggtgataatgaaataacacttccttttttttttttctgtaatggaagtatacaaaagtttctttctgtggatatgtgcttcattttgtttgtttttctgtatatttttctgtcattgtttaattgttcaacagagactgcatttcagattttaaggcaacttcgggaagagacagcatcaatgcgtggtagtcaaatgcaggtacggttattgatttgtggcttccttttataatttaaacaaggcataagtatgtgtataagatgtcatacatgcataaatgaaaaatcaacaaaataagagaacaggtaagcgctggttatttgttggccaagattgcaatacaatctcatttcaaaattatttggaacacgcataattcttttgtagatgtctcttacattattatttagctctttatgttctttaatttttaacattgaccttctagtcaatttacagcttattatctctaatttccagacagtaaggcttgctaaaaaagtaaagaagcattatatttatatttgtatatcatcaatgtttgtgcccaaaatttgtatgtattttattaaattaatgttgtatgctatttctgcgtctgacaatcttggagtttctcctttattttggtagaaagattaaagttggcatgtcttgttacttttgctaggtgtccccagaccaggcacaactacttgcaatgctggtgcagattcttggcgcagaacggtgtattgaacttggtgtttacactgtatgcatcctgctttactaaacttcaaccacattattggcctgaccaatctccttcttcttttccttaaaatggacttatgctaagttgctaacaagtgatagtaattaggttttgcattttgcaaggatgaaattgtagtttcaaatgattatagttggaattttaagttgttaactgcaaggatatttggtgcttgttgcattcatttgctcttctatgtgtgtatctcactgcaaaactagtttgacataataaattttgcatgattgttttgttgaaagatcctcattctctaggtttgtctgcctcgttacttctgtgtttatatcccagcagttattttactttagatagtaccttctctattagtaggctgtaaactgctgatgttagccatgcctgaacttgtttttgttcgaaaaggtttgtcacattgcatcattgtatactaatgaaaatacctttcatattttcagcaaataaaaaaaaaaatacttttcatatttatttcttgttaaaagatgatactgctggtagattgatctgtaagtagtaaagcagtgcctaagcaattacatagttgattatgtcagggttattcgtcattggccgtagcattagccttacctgactcaggtctcttagttgcttgtgaaagggatgctagatgtcttgaagtagcaaaaaagtattatgatcgagccaaagtttcacataaggtataactctttctcctttatggtacctgatcatttaaaatacagtttcttgttgctgtttatatctgtgtgctgatggggttgaaaagcctgtctgtcctttcaaaagaaaaagggggaagtctggatttctccaaatgcatgatatgtatagtctttgcctctgtctgacttattttgattgtgaagaactaacatgcttatatgggaaaaaaaattgtgctgctgtctctccagctaatatgtaactgacttcaacacaaatgtttcgtaataggtgaaagtgaaacacggacttgcagcagatatcctaaaatccttgattttaaatggtgaagcatgcaggtattgctataaaactacattgagcatatgttacattttctgctatagcttttactatctttttcctactaaccataaaaccaacttcttgtattaaaatgctgccatgttttcaagcggacaaagttgaagttttaaataattcatcaatcatgttttcacattatgtatggatctaatatgctcattgactacattcctttgcaaataatctctatttttttttactaaattcttttcttctcccctttacatgagtttatatttgtataatactatttcactttccatctctcatgtcatttgtagagattgttgatgcatctttataatctacaaggcacgagagctgcagactaaggctgacatgctttctcctttttgcagttatgattttgcatttgttgatgctgaaaaaagaatgaatcaggaatactacgaattattattgcaactggtaagaccaaaataaattcatgatcgtaacatatgtattcctattccaatgtgttttatgtaaagatacaatattagtgtttggttctatttacgttttttatataccaacacacctccttccttttcttttaatgtcatccttgtttttcattgatttagtaattttaccatagctcatcatctttattgcttccttctgctctttctttgttgggtgtttctatgatttgttgataaggtgagagttggcggcgtcattgtgattgacaacgtcctttggcatggaaaggttgccgatccattggtaaatgactatgtattgcgtgtaaacttctcctgttgagataaaccatggttacacttgaataacttactataaatgacatgtatatgggcaggtgaatgatgccaagactgccagcattaggagtttcaataagagcctcgtggaggaccagcgtgtaagcatcagtatggtgagttcactacaattatcttcattttgaatactcttctgatttgattcatgactttaaacatctgaattttaaatctcaggtacctattggagacgggattacgatatgcagaaaaagataaccgcatagtagttgatgataggttactaagcagtcaatccagaacatatgctgtgatacaaaaccaaggattcatacatcagatgtggctagatgtggggagtgaaatcagatggggaaagattcaaaggatttgctttaattgtttggcagaaaatttacataatggatcaagctcgtacaagtgtcttgttcagcatttctggaaaagcttgagtaagtttttgtgtttgaatttgaaaaaccactgggattcatgcatatgtaattaatgtatgtgcatagagagagggtacatttctgagcaagttattgtgcaaatttatattctacagagttgaactactataaccgaagtaattggaaaaatacatattctgaaagcttaaattgatgtagtaaaaaaatcaatattacttttatttcagaaagatgtaaggacagaaggcaaaaaataactattctttttctgttaaagtaagatacacctacaaaataatggtgtattaaataaatattcaaccgggtgtaccaaattgtaagtttaaatactatttcaaattcataatgggaaatgttcagccaccattagctaagactaaactgaatcataaagaaatggtggcttaaaaaataattattttattgcttaaaaaaaacacctcttgtgtgaaaatacaaaaaagaaagggaatagtgaaaagaatgaccatcaatcttcataaatttttaatatctgcaacatttatcatccacaattagtcttcttttaaagtgtgtcttagccatgtggtcactagaaatattaaaagatattcatggtttttagcatactcttaaatgtcatatcatctctattagtacaattaagtataaagtcttatacaatttaatatactttcaagaaatatcgttaattaatcgtaagatgccgttttagaaagtgttacgcactacgagtacttaataacaatattataataaaaaaaaaaaaaaaaaaaactttaagacactagtattcaataataatattctataaatgaaagtgcaatcttttaaactcattcatatatttcatgaatatttaatgtgattcatatcactttgtaaaaagcaaaaaagaatcatcactaacagttaacacaattaattttattgacatttttttaactatatcatatattttctcattcatcatcgatcattttcacaaatatttagattattttactatgtatgattctctttaactatttataacgttcagattcaatgaattcagttgtctacacttgaaatgcttttactatgtcatatctaaagcaatgaattttgttagtttcgtacaaaatctggtctttaatttcatcaaaacatattaaaataataataataataatataaaatatactacttccaatcctacctagccactgtctcataatattatttggaaaataataatttttagattttaaaactttttattaaaatttattttcaaagattgttatgataaaaaaataaatttagatctttaagacattttatgaagatttatttccaaaaattgtaatggtaaaagataataagttttagattttaagactatttatgaagatctatttccgaaaattcttatggtgaataagtgttggatttttttaacaaataagttttagattttaaggcttttaatgaagatctaaattgttatggtgagtgaattagttttagatttttttttaacaaataagttttagattttattaagatttattatttacaaaaaaaaaaaaaaagcagaaggtaaataaaatgaaagaggttgggaatgacacccataaagccgtgcttaaacatttgtcaacgagtttaggacctaatactgtactagagttctccgactcatttttctatgcccattttacccctactttgccgttgaggctacgccttgtcctgagaagaccacagtagaaaaagtagcttgacttagctaacatacgctttatgccgtacatatcaccaccgactatactacccttctccttccttgaattctcaaattccctccaatggcggatcaactgcggacctatgcctatcttctcctctatatcggcctctccagtggtcaaatctttttcaacaaggtactcaccactttttctttctctcttagttagatctacactcttgccatttcgttttttcttaaaccgttgggatttgattttgtctgtttgttcacgaaatggcctcgaatttctgttctattcactaatttttgtgtctttgagtttcttgtctttgcacttttggaaagttgagaggagaagaatcttaatgtgagagtcgtttttgaagtgttgttttgactttttatcttccatatgcttagcaagagccaattaatagggatgaaagggtttttgctgttgaaggcatactgcattgggtgatgaccacaagcccacttgtggctcatatgagtacagtgttgctgattaatttgattttcaatgaaaacaattattggctttacttgggagctttcaataagtgttcaaaactgaatggaaaaattaagcacaaaaagttgaatcttcataatgcaattcctgctgttagatagagtaccttaaaatttagatatatgttttgtaccaaaatatgaaaattctacacgtatgttgtcttgcatcaagaaccattttgcaaatctccccctccccttgtgttgtgatagtagaaagaatagaaatatttttgtttttcctactgtttgttttattttcacctttcattgctagaggaaaccttcaccctatgaaattttctattgttggaatttctacactgaaattggagtagtatgagaatttgaagtgtagtatgcatcttaaattcttaatcttgggatatattaagtgtattctaggggtaagactgcaataaagtaacaacctcatcttgttagcatttggacagtactacactgccatccgtttaatttttgagttatgactaattcattatcgttgttatcgatgattttatttccatctcgttttatttgttttcgtaatcacaggcctgatatagttcccttttcatcatttaattttgaaatgcagtgggttttatcttctaaggaaataaactttccgtatcctcttgggttgactcttcttcacatggttttctcttcagtcttatgttttatagtcaccaaagtttttaaggtattcagttgagttaatttgttatattcatctatgagtcaaatctttacaatgcaactgttaatcttcatctaccatacctcacagattataaagattgaagaaggaatgactccggaagtgtaagtgatggggagatagctttcctcttatctattattttatttgttgtccttgtccatttatgggttttctttttctttttttctttcttaatggtatttggctatactgtagtgaaacattaaaaaaaaaaaagatgagctcatagtgagtattagtcaggaaaatttagttggtattgctcaagaaaaattatcgatgattcacgattacttttatgacaaatgttcattatgctttgacctagcaagagatttggtgtccgcaaattaaatgatttaattagtacttacgagacttcttcagtaaattaggcatactaatatgtggatctgtagaaattttaaattattggttcctagcaagtcatatgtaaactatcctacttcattctattgcacatcactctttaggaagtagaattacctttataaataaaagttataataagaatgaaaaacgaattgtgttacctcaacgtatagggaaacaagtttcttgcaaaagaagactaaaaattcttcaaattttctcatgagcaatagaaggtgttttttgggggcttaaatttgcttacaaatacttaaacattttccactgctactgttattttaataattgtgttggctggtgaagaaatagtcattttaatatattttatttttctgtagtttttgttatcattgatgaaatcaagcatgccaatgtttaacttatttcttgataatatttattagcattcaattcctgaccaaagtttttatgtatagctatgcaacatcagttgtgccaattggtgcaatgtttgcaatgactctttggcttgggaacactgcatacctttatatttctgttgcttttgcacaaatgctgaaggcaatcagtaagttttgatattctttttagcagaaattaaaagttctgaataatgtttgtcaaaagtaaaagctctgaatatagtactatttgttatatttataacaagatatatgacatatttatctctatccagtgccagtagctgtatttattcttggagtagcggcaggacttgaggtgatgagctgcagaatgctattgatcatgtcagtgataagtcttggtgttctagtggcttcaattggtgaaatacatattaactgggtgggagtagtttaccagatgggaggagttgttggagaagctttaaggcttattttcatggagatttttgttaaaagaaagggacttaagttaaaccccgtatctgtcatgtactatgtcagtcctttcaggtaatatcattttgttcttctgcttgtatctaatcacatttctggatgatttactttctacctgtaaatacatatgcctgttgtggactaaattgttctgctatgtagtgctctttgcctattcattccttggatttttcttgaaaaaccaaagatggatgctagcggcacatggaattttccacccttggtgttagcactcaattctctgtgtacttttgccctcaacttatcagttttcctagtgattacgcatacaagtgctttgaccattcgagtggctggagttgtcaaggattgggttgttgtcttattgtctgcccttttatttgctgatacaaagctgacattgataaatctcttgggttatgccattggtacgtaaatgacaactcattctttctatcttttgttacttgaatcacgccattgaatcctatgaaaagcctttgaaagaatattgaattcaggtctattttagtatgtttatctgctcaccattattggcctaaatctcttgtttttcttctttttttggttgcctttctttctcgggaaaattggataaacttggattacaagtaagacttgactgtaattatgtcctgcaccaactaacagggtgacctctcaagatccacctagtttcaattgtttattttagatagttttattctcatctattgcttaaccagttaagttggcttacaacaggaacaactagaagagttatatctattttccttcaacccttctctaatgcccacattattttcaaacacgcacattctcatatgtctaaattgttttctgattttgaagaaatgaagcattagattcttcagtagcttgacaatttttttcacttatatttccttcccttgtcccctccagccttttctgatcttgttcatcaatccttagaaataagcttatagacaattatatgctttgtcaaaagaaactctagtgatatcattgctttgttagataaaaatttgactttatcttagttaggttgctttgttagtgatatcattttattgtgtagtgattttgttgatatctctttccaacactgtcctataatttctaatggttctgcacatctgttggcaaaactagcagtctccttagagttagagggtaaatatgtttggcggtttgactaccttgactgtattttgaactcaattcaggcagatgcagttgatccatgatattttgaaaccaagattgatgtgtgctagaatggtactgtaacaagatattcattattgatattcttaatgcagccatagcaggcgtagcagcatataacaacagcaagctaaaaaaagaagctactggacgtggcactgaagctactggacgcacaactgatgatacagaaaatgctgctgagtctgtaccactgaccacatacttggatcccaacaagtagcactacattaggagcagtctttcaagtttaggtatgtctaacaaaatccattctcacaaagtacatgtttttattctattaagatctgtttccatccaaataactccaggcatcgtagaacaatccaatgaacttttgctatatctgcttttatgttacaaagttaaaggggtagctcaaatagtcaggatatatgacatgtgatgtgattttgccgtacaagtctcaacttcgagttctctactatgcattacaaaaaacaaacgacatattttgtttacattttcatctgataatatgtgggtacagggtgctgttaaaatttaatttagtgagcatttatgtctttcaattgatggttgcagtctgctcttaccatgggccgttgttgctgtggcaaggatcagaaacagatcgaagtgtaaagatatgaagttttttaatttgacacaaaaattaattttcataagccaatgcacttccattcattgataatttatttgtaaaggaatatatcggatcacagtcatcatgtactaattactttgtcagaaaattttgaatcaataaatttttttaagctttttcccagaacttgttggtaacttgtatattgagagttgtaaggtctgaacttcaacttagtcggcagccatgtcacaaataaattgatcatttttagcaaattactattgtaaagtgtgactgtgtagcacatgtgattcattttaatgttctgacaaaataagaattttgaaattctttttcattgttttatagtctctaaatattataaagtcctcttttaaagttagactcagaattgataataaatcaaaatgcttgacgtgtcagcaatttaagaataacgatcctagccaatccatttgttgtgtcatttccattttttttgttatgtttaagctgcaacttgtcgtacatagtagtgtaaagtgacagttacacttacaatgaaaatattatcaggaatattgcccagaataccattcatgggattgatagtactatgtggagttgccacacattgatcaagactaaacatagccaacagtaccactttcttacaacttccggtaccaaactagatcatttggcattttcccaacggccaaataaagcctctcaacctcagttacaaaatataattaactgttttcctttgaaagagtaaataactattttttagtattgacccactcaactatggttatttgtacggctatatcatctttaaataagtagttatgttggaaggacagataagttgttagtgaacaaattatctagaattgagtaatgatttgacttaatgggggacacaacatttaagtagccactttgattttatgagagtaacatcaaagattgtttttttatatatatatataaatctatattttctatttattatttcttcaaatttaaaattttagagatttttttgtactaaaaattacaaaagaataagagcttgtttggctgcgttttcagttttcagtttttaaaattgtgtttttaaaagtgggaatagaaaacagttttttgtcattttaaaaatttaatggtgtt

SEQ ID NO: 295771 - DNA, 3908 bp, Cannabis indica
ctctccattactactattctgttagttttaattaggtgtacacgtgtaaggtccagattaaatcccatttttttaaaatatttaattaaaattaaaaacttaactttttaaactaatatatttaacttaaatttaattttcataaaaatattttaatgaattaaaataacaaaaaaattaaaaaagaaatgggaatactaaagggttgaaacaaacaaccctaaatcttatcttcttccgaactaagtttctttcaaaaaaaaaaaaaaaaaatacttatcttcttcctgctgccttcttcaaaaaaaaagaaaaaaattagcagtcaatatcggttgaaacaaacccagaaaccaaccccaaatttcattctggtgcgttcttcaaaccaaagactctgcccaaatgctgaacagaatgagatcccgaagaatctgcctaaatttttcttattttcgtgtatctaactagtgctctaaagctaaaggcttcacaattttagatgtatttgaagctttttactttgtacacttatgctaaaatttagattagacttatattgggttgtaatattttgaattaatatattagctgtttaggtgaaaaatcagtttttattcttggatttgattagatggatccaatcaattcaattaatattagattaaaaatattggatggatccgattcggtctaaaaaatattggatcaaaagtattggattcgatccaatacaggaattcatccattggatggaacccattcaatccaatgattttttagatcgattcgattgagcttacagtattggattggatcggttggagaagtccaacatctaatgtataattgtattggatctgaatgggtctaaaaacattgcatatgattcaatgaacaaccctagcctttaagggaggtcgggttacgctatgttggcggtggacgacttgcagcataaactggtatttaagagctaaagttagtaaggttgtttcccctctcaatgctaaaatggtgactattgaaatggcgctagagtgggctagatgtttgggttggcatgattttgtcattttctcttaatatcgtattaagaagagagtcttggctgattggaagctttcatttatttgtcgaattttaaacttactgacatgtttcaattttgttttgttaattttatatttagaagttctcttgcatttgttaacaattgggctataaattattatttttttaaaaaaatatatatatcttttatatatttttacaacacactttttaaaaaattatttcaaatactaaaataaatatggatatatcggtacattccttttaacgaggtccagttttaaatttttctatatttttttactaaagaaaattaaaaaaaaaaatacaaacaaaaatataaaataaaaggtatttttgttctcatgtcttctaatttggcaacatgtagtcatcgaaattgatagttgatcatctagttttgggcttttggttaaagactgtcaagtttattatctcttttatgtaatgttcaattatttttttatcaagttatctgtaaattgagtagctgctaagttgctaggggctctcaatttttttttttttctcaaattttttttttctagtacatgttggtccaatggagcttcttactcttttgtactctgaaattcttctttaatgaatatattttcatttaatgaatatattttcatttaagaaaaaaaataaaaaatatttttgtaacttaaattactcttatttcgattaagtaacgtaaacaagtcaatagatatacttatttgtgtaattttatagtgttgttccatgttattatcacaggaatctccaccattggaggctcccgccgaaacttcaaacaccaaaacgaaaaccatactaaatctccttcaaggatgcaacaccctcaaaaagcttcacaaaatccatgcttgcgttatcacagctggccttctcaatcaccccgccatttccaccaagctcctcaacttctgcgctgtctctgtctccggttccttactctatgctcgtcttctcttctatcaaattcacaacccccaaatcgatcattggaattccatcatcaggggtttttcccgcagttcatctcctatccaatccatatttttttacaaccagatggtttcaatccccactaggtctcgtccagatacgtacacgttctcgttcgtcctcagagcttgcgagcgagtgatccttcccttggccgatagcaaacggaaagaggttcacggcactgtaatccgttctgggtacgatagggattttgttgtttgcacgaatttgatgaggtcttatgctgggaatggttcgattgagaatgcgcggaaggtgtttgatgaaatgcctgcgagagatttggtgacttggaattccatgatttcttgctacgctcaagcggggtttcactatgaggcgttgaaaaacttatgatcttatgagaattgagaatgtgggtgttgatgggttcacactcgttggcttgctttcgtcttgtgcacatgttggtgctttgaatcttggaatcgaaatgcacagattggctcgtgaaagtggatttttgaatagaaatatttatgtgggaaatgctcttatagatatgtatgctaaatgtggaaatttggaagctgctctttctgtctttgatggtatgaagaagcgagatatttttacttggaactcaattgtggttggctatggcgtccatggtcgagggttggaagcaatcgagttctttaagaaaatggtaatggatggagtcaacccaaactccattacatttcttggtttgttatgtggatgtagtcaccaaggtttagttcaagagggtgtcaagtttttcaacttgatgctctcaaagtacaacatcaaacccgaaattaagcattatggctgcatggttgatctgctaggccgagctggaaaactcaaactagcgctggatataataaacagttgcccatctcagaacgatccagtcctctggcgaactttgcttggttcttgcaagattcataaaaacgttgaaataggagaaatcgccatgaggaatctagtacagcttagggcctcaaatgcaggggattgtgttcttttagctacaatctatggtgaagtgaacaatgcagatggggtttctgcaatgagaaaaatgataaaaagccaaggaataaagaccacacctggttggagctggatggaaattaatggtcaagttcataaatttgttgtaaacgacatatcacatcctgatactaatgaaatctacatgaagttaagagaagtaatccaagaagtgaccttgcttggttatgtggaagaagattcaatgtctttggtgagtttaaaaggttttagtggagaagggtactgttggggaaatggttcatatcacagtgagaaactagctattgcttttgggatctcaagaactccagttgggacatgcttgagaataacaaagaatctgagagtttgtagagattgccactcatttactaagtttgtttcaaaagcatttaatcgagaaatagtggtaagggatcgagttcgattccatcactttaaggacggagaatgttcttgtaaagattattggtgagtaaatgttaatgatatttgacattattcttttatattattttatttttaaaatgatttacaagagcatctctaaggatacacaaaattcagtgttacactattactaaatttgacatcaaaaagtattttcactcaaactacaacactaaaaattgcattaaaaaaatattctttatttctatattaatttttaataaaataaaaaaaaaatataattaatttttacttaaatcataattgaaaat

SEQ ID NO: 295772 - DNA, 1910 bp, Cannabis indica
ggcataaaacccaacagttttgatagtatctaatctcgaacaaaatggagatcaatttcaatgtatttgcatcgtgcataaaacactggattggcaacaagtgcagtggcaccttgattgtcaacccatagaacaggtggtttagactgagatacttgaagttcagaaaggagggataagatccattgaacttcagtaacaacattagtaagagctttaaactcactcgctgtgcttgatcgagcaataacatgttgcttcttggcagaccaagacaccaaattgtcacccaaaaacataagataaccaactgttgatctcctatcatcgatgcagttggcctaatctgcaacagtgtaaccttgcaaatgaaagttatcggttggtctgagccatatgccttctgtgagagtgccttttagatacagaagcagttgtttacatgcttcccagtgcttgacagtgggagccttaagtaattggcttaacttgttaatgatgtaggcaacacgaggtcgagttaagctcaagtactgtaaggccccgattgtacttctacacaaagtgatatctttgaaaggatctccatcaagtagactcaacttcgagattgaacttgtagggttaggacaactcttagctccctccatgtgaactttagtaagcaagtcagttatatatttgctttggctgaggtacatgccatttttctctgtaaacttcaattcctaagaagtaatgaattggccccagatcttttaatgaaaattcagtgttgagggcagagataaaattgttaataagagagagatttggacctgtgagtagtatatcgtccacataaaccagcaggtaaactaaggtgctgccagagccatgaataaaaagtgagctatcagattttgagtctgaaaatccctaatgaattagagtttgcttgagcttgttattccatgcccgtggagcctattttaaaccgtataaggccttgtgaaggagacatacatgatctggcttagatggatcaacaaaaccaaggggttgttgcatatagacagtttcattaagagtgccattgaggaaggcattgctgacatccaattgctcgacacaccaatttttgttgacagcaagagaaagaacaactcgaacagtcactggcttcaccacaggactaaaggtgtcttcataatcaatacaggagtttcgaggtagcctttagcaactaatcttgacttgcatttgtccagtgatccacctgaattgagcctgaccctatgaacccatttatttgtgataacctgcatatcttttggataagggaccagtgtccatgtttttttgttggtaagggctttgtactcagtgttcatagcagcaagccatttacgattgcttagggcagctttaagagactttggaagggatttagggagagggtgcttagtagcaagataggctttgggtttagtgatgccattttgaaatctaactctcattgtgtgagttctacctatgggaggaactgaggtgactgttgtattgcccagtgaagcattggaagaaatgggagcttggtcatttgatgttggaaaatgagagaattgtggaaggtgagagtggtggtctcgagatggttcactggttggtaaaactgagtcacttattgaaattggcagaggaataggtaagtcatggttttgatttgctgcaataggcatatatagatcactaggttgaggtactggtataggcataggcataggtatgtgttggaatatatattttaccaggatcttagatctagtcacaagtatgttatttaaacaccctaaatatgaactttctaaaacgattaaaacaaacacatataaagttaaaaaaaccttacattgatgcagcggaattaa

SEQ ID NO: 295773 - DNA, 6532 bp, Cannabis indica
ttgtcattcaaaattaatttaaattttacattcccattccaatcaagtctaaacctcataccaaacgtgtttaaagcaaaaacttttatagaagatttaaaccaaaaaaaaaaatggaaagaacaagtctttacaatctatagtatacatttgctgccatttcaaaagaataataaagtacatatttgctgccaaattaaaaacaacaacctaaagtacacaaggtattagtcgtaactatgaaaaatatatacttttaagagacttaaaaaaaaaatcaaaatgagtgtgaaaaaaaaaaagaatcaaatgaagaaaaacatactctttttatgttctttgtatttatttggttactaatgtagtttaaaagttttaactaatgacacattttcctgtttgaataacctttccccatttcataattgtgtaggggtgatttgataacacccatcaaagttcactatgaatctttgggtacccctttctctttgctcttctcaaaccggtacagaaattggtgccttttgtttaccacgataaatgaaagaaaaaagaaatggcctttcttttttcagtcatcttatagtagaggacttctatactaaaaaaatttagtctgtcaaattttgataatatacaggattcccctacaataatttccttatctactgaacaattacaagcagaaactaggatacggaatgcaaaaacaagtaatatccaatgtatgatgtatgatgtgtgatgtaaaatatatatttatcagaagaaaattctaagatagataagggcattataactggatttaatatgtttaataccacaatacaaggtgcagtagaggggcaataagattttgagatgcaatgaactttggaagagctaaaaataaactataaaccattccacaaccatgaaatgacatccaacaggattgagagatagtttacctcatttttggcaattgccttttccatagcttcatacaaaccatctgtatcctgaccacaacattgcaaagtaagcaacacttggactcagcacagatccctgtcatgaaagaaatataataaaaatgctccttaatataacataagattactgccctcagacaaaccgcagtttgcttactattttcaattgtgtaacatactacaaaccagcatgacattttttgttatgattgcaaattttcattatctagagccccaacttgaaaaatgcaataactagaagaagcctaacacgtccctccttatgtaatacagattaccagaagcacaaaattaatactggataaaaagtgttgatcacacaataacatagttaacaaaagacactgttgtaatatcttaagttcgaaaaatgtacaacagcagcacaactgaaggagaaggcttgtctagtagctcctaaagcaagtatttatttagtgcaatcatcaactgaaaggagcaataacatgtaaataatctcagtgtagattatcctaaaaatataaagtcaagtagtacctcaacaagccatccatccaccacaaacacgtccaaggagaagccatcggttgttgagaacacatgtgcttcacgaatgttgagtcctatattagaaagtaaagtagagagctagagaaaaatgaaagtctattagaaatcaaattttcttaggcacatatttatatataaacaaattttataatagtcataaaacattaagttcaaatctttgtttgggtagaagttcatgtaaagtaaatgattcttaagttgcccttgcatccaaaatatttgtgttcatggcactgtgttcaaaataatgttaggacatcactataaacaatattacaaggattataacaatgttatgcgatttaagaaaagatccacacagttttttgtgtgcacaactactaggggcttcattcaacactaaagatgacaaattagtgtttttaagtaaaagataactccaaagtatgatccacattaagaacaaagaaaactctgaaataggatcaatgctctagattcttttcctaattttctaggagttccaaaattgagttcaacatttttttattttcttttttgaggaggaaaatcaagttcaatttaatcaaaggaaaataaacaaacactaaagtctgaaacccagaccaaaatcattcgaatgtagatgaataggagactgagttcttggaaaaagtaatcagttgaaagaaagcaagaagaaaccagttgtaaaattcacacactacaaacttaaaacacaaactcttcagtaaacacacactactcttttgaagtgtacctggctaagaagcttaggcctatcaacggtgcagaatattacttcgtggatataaataggaaaactttcttgcctgcattatacattgcgaactggtcaacttatcttctgcatcgattgtgaagataagagcaatgtctcaataatacagccaaaggtcacttttatatgcatacataattaaaatcttgaaatacttgttctggaaatgagtaaacaaggaaaggcaagaatctccctaaatcacatgtgggttcttgaaaatgagaagaagagatcttcgaaatttagggttttatagtcatatcagcacagctgtagaagtacactacgtataaactaccacagtaaaagactattaccaacaactaaaaggcatggacacctatcccctaaagaaataccgttgccaacattaattacaacttaaaccatatgaattcactgcatctttacttaaaaaaacaaaacatgtctacttaacttcaaaaactgatatctcccaattggatgaattttctataaacaacagttaaccaaaaagttcaaaataacatttttttaaaaaaaaaaaagttaaaaataacatgaatcattcaagaaatatttacattaacatttcttctggtttcttcaagagggatgaagctgatagtgtgccaattgatttattccataagttttggttgtcagaaacaaaaatattcacatctagcttatttgtaactgcaaactggaacatttttataaatatgtaccggacacttacgtatgaaaaaaataagaaaaatcaattcacacagtgacgaaactgtgaaataagatctattgctatatttatgtcagatataaattataatgacattcatccaagttttttaccatttcaacccaaactgcataaaggaaatgaacagcaatttgttcataccatcattcaaaataaaaaagagaacccacatgaaatgcagataaaaatgctaaaactaccttctggaaagcatcttctttgcacattgttcctccgtgtccttggaattcttctctccaacatccaaatttaggtcctcgagcttggagcaaggttcaaagtcacttgtgtggttccttgttctagtttcagaaacaatacataaataaaggcatcaagaagcaataatactgacaagggtagaactctttccgtgagttatagccaatagctggcatcttaggctgtacacatggattatatcttatcttttttcatttatatgtatacaatgtgttgggtattatccaaacaaaacaaataatctttcccaatcctcagacaaacaacactaacaaaagaaagaaaaaaaaaagtaaaggaaacatggatgaaaagaaggccaggccatgtgaatacctcttatgtgacagagcttctatattagctccattaattgattgtcctggggttgtaagtatacttggaaggtcttgattgccattaacatctgtcctagaaatattctaaaaaagaaaaatgccaaataacaagcaacaaattaaaacaagcatatataatagtgtagaaagtaagaaatttatgaagatttttttgaataattatttttttattcttttactgcagggaagctccgaaagcaatatgaaacactaccatagtgctttcacgggtatagaatccctagtgaataataaagtggatctcatgagttcttaaatcttattgtgccctaagctcttattaaaaaaaacttcccatcccttgtttgtaaaaatctatatagaatagaataacctatatgtttgttgatatgataaaaaaaaggtaactttcatcacagttgatccatggaaagacatgacaaggaaaacttgggtgatcttttaacaaacaaaagaatgtttagagcttatgaaaatacaaagacatcatggaaaaaaatcttcctctgactaaaatataatatgaccaacttcttcaaaagaaaccatagatgaacctttatcatagcagaacagaagcagagtacaaaaatgccgctaggctaaatgtctcccttcatcctgagtttggacactaacaaacgttaatattttttatgaccacattagctttcactatataccagaatctggatttcataagcaaacaaaattagtcgttcttatttttttaattactcttacaattctaaacatataaaggtttgtcatttagagagtgtcatactgtattgtctgactccatgtgactacatatgcagtctaagttcacataatactctccttaagcaaaaaaatatatatacatatatatatgcgttttccatatttactatacacagagttgtttacttctgaaaaatcctatctccttcatttggttttatgataattaaataaaaagtaattcccatctagttgaacagtatttgcttgataataatttttctggttttgcatccacaagaagaccctcaacattcctaaccattaattaattattaaatcaagtataagtaatacctccaagaaacgaatgtgatatacaggccgcttctctgggtctttagctaatgcaagaagcttttgatgtaataaaacatcttccactctatctatgttaacatcaagtccataactggtacagagagaggggataaagaaaaaggtataagtttgattccactaagataagaacaacatgttttatccaatactgtttgatactttacgaagaagaaaaggttcactgaaaatagcatttctagactttgatttttttacttggaaaaaaaaaacacatttctcatagtgatcaaatagtacaagggtacaagctcaatattccaccatccatagctattttagtgcaaatataaatatattgatatattcttgaactaaaatggaagaaaaagaatttaatacaatttcgtgaagaaaaaaaaagtttagaaactactacatctacttctcagcacaaacatcttcataatagagtgttaaataatgaaatatcaattttcaatccctaattttaaaaccccaagtttctattaaatttaaaacgaaaaattaattaagacaacaataaagaagtatgactttacgatcaagcaagtaaaataatgaaaatatatatatatataaaaataaataaaacagtaaatcaataaataaagctaagctaccgacttaagaaagcaaaagtagctaaatcatgaaacaagaagataagttaatataatttaaaataatattcacaaacaataaaatgcttaatcaaacattcagaaactaaatgcatttatgtgcctatatctctgtaaaagcgatttttttactatcaaaaccgagcaaaattcaactaaaaaccaaataatgattcaaaaatagaaagtaatcaaccaaaaatctaatacaactttacctagcgggcaagcgattgaaatgagcatctaactgttcgcgaaactcaggattggtcaaagctgcgccatgaccgttctccaccaagcgattaaacacatcgttccgaacatcgtagttactgaaactcccgaagcttctgggcggcgacgagctctccccaactccttcggcaaaatccattgcttcgcggtcaaacaagttacctagctttccatgaaaatggaaaaaggagaagagaaaatcaaattgttaatagagagaaaaatcgtagttgatcatcttcttcatcagtagttggaagaggatctttgactgtgagaagtagaatctaaagccagagttggagtcttccgttatttgagaacaaaacggagggtattttcgtcctaaatttaattttagtaaaagggaaagaatgtcagattggttttttttttattttttttattttttttggttagaaaagaaagaaagagatcgtggtccagactccagagtctctagaaggcccagacaaagtattttttttaaaaaaataaaaatatttaattggagtggatagagttggaagattttggtttggggcagataagtttgccaaaatacccttgggtttcgggaaaattgcaattgagtttgggataatggtgtgaagctttctgaaaatggtagtagaaaagaaagaaacagtagaaggaatcgaatacaggttatatgaaagggaaatttgattttctatacttacatatacttaatatttttttttaaaacacataacatttaatatttg

SEQ ID NO: 295774 - DNA, 2291 bp, Cannabis indica
tcaaaaggatgagccacaaccacctatcccttccaaaaagagtgactactctcttagggtaaaaagactaaaatgcccttacttccccaaaaagttatctcgtaaccctaggggtaaaatagtccaattctgttattttattaaacctcgacattctaagatatctaataatattgtcccataaaaaacttgatcacaatttgtatccatgtgactaaaattgccattcgacccatttccattgttaccaagcataaaaatgtaaaaatatgaaaattcacatatagcatgcatatcacacctataattcaataaaatctccaaaattgagaaataataatcataacacatattttcatgaaaatatggtctaaaaagcataaaatacataaataatcacatagtcagattaattagtgctaagtgtcccactaatccaatatctaagtataacggtcattacacttctctaggacattccccttcctatacctagagaagtttactatggggaagagatcttcttaaaaagggtcttgtgtggaaagtttgtaatgggaacactattagaactttggaggatttttggattcctaataataaatttgttcgttacaagaataatcttcatcctcccttaaatacagttagttatttcattaaccacttagggaattgggatttggacaaactcaaagataactctgatgatgacaccatttctcaaattcttcaagtgccaattggtgactcctctaagcctgattgtgttatttggaaccttcatacctcgagagtgtttttttatcaaatttgcctatcattatgctaaagttgcttctcttttcccgtccccatcgaatctcccttttgtcaaaaattggtggactactatctggagtttgcacatccctcctaaaattaagcactttatatggcgtgccttttatcatgttcttcccactgcctctaatattttttctaaacatattacttctagtccaggttattcttttagtagttgtccaatggaaactgtgacacactccttgctagattgttccagagttagttaaatttggagccagtctccccttaaaagtttctacatgaataataagctttgtgatattagagactttattcttaattcttttgagtccgaataaggatgatttaggtattgtgttagggcttttatgggtaacctgggataataggaataagaatctttttggtaaatttgtctttctgcatctaacattgttgtgtggttaagttcttatcttgaagattacaggaatgctcaattgaagacccttgctgccactcaacattcttccatgggggatcaggattctattgttgtaggtcgggttctttcaaactttgtaccgatgtagcaacatattacaaaagaagcaaactagggttgggagaagttgtcaaagttgatgatgataatatcattgctgggttggccattccaattccagggttgctggattcaactcatgttgaggctttggctctcaactttgccttgagcttgtgtttagtagtgaaactctcaatttccaaggtggttttagactcaaaaattcttgtgaataaaataatgaattgtaaagatgaactctttgctctatcaaatttagtgagaaatatttgtaactccttatcaaatttccctaaagtttcggttagctttgtttctaggaataataatgttgatgctcattatattgcaagaaaagctttggggcttgataaggaattagtgtggaacggttcacttccactcatgcttgcactgtaacttgtacttttcttttattttattgaaagatacaattcttctaaaaaaagtagtgccttctttaatattttgtagtttatttggcgttgatttatgaatgatttgtatatttttataaggttgatgtcttgttatttttctattgatttgtagctatttttgtgttattttatagttgttttatagttatttttatgttgttatttaactattttatagttattttttcgttatttttatgtatttttttagtatagttgttgtgtagtttatgtccattttttatggtgcatattcttagtttatttcacacaattgttttttttttttttgtatatatgtgttttgttttgtaatttttatgttattcaactgattttcagaatatttttttattcaataattattttttagttgttcttttatttttgtgtatttttttatggtgtatatttttagtttctttctaata

SEQ ID NO: 295775 - DNA, 2133 bp, Cannabis indica
ttcctcccaaccaaacgccttagagaataatataaatctataattcattactaaagtataacacctttaaattaaaagttatttattaatgcaggccgtatcaaagtgttgagagacctaaaataaaatttaaaataaaacttttttttatataaaaatttaaaataaatattattttaattttaacacaatattaatttactattttatctccataaaacaaataatttttctcgctacataaacgaacttgataatgtaatatttaattactaataacatctctattcaaatgttctatattttagaacttttagaaagaaaaaaaaacaacaatatgttaaaaattatgagcatgttgtggacccgaccgattttaaatttatcattatactcagtttgtacgatatccgccttggtgaatacatctctatgtctcaagagcttcttccaataccaacttacatcagattttagctcaagagaccaaatgtcttgactattcagattaagaatattcatccatttcacccaaaatttcatcctatttttaagtaacttagctaaggaggccttgttccatttagggccctcttagaatcccaaccctccaagttgttttggattgcaaacaagttttcaagaagccatatgtatcttacttgtatttcctttctcccccactgaaaattcctataaatctgatctatctccttggccactttttgaggaagctaaaaaatgctcatccaataacatcttattccaattaggtcagagttaatgagaagagctctacctgaaaatgataggtgtcgacttgtccaagtgtgtaaatttatcagaattttcttgataatagtctcatagtcttcttgcctccactctgttggttgaagaagaaccccaaggtatttcaagagaaactcccgtattcaatgagatcaattgttgaatttcttatttggaagcttcactaacccttgcaaagtatatctttgacttcaagttattttcttttagccctgagcaattgctaaagtgaaagaatgctttagtaatgcacttgaccgataacatttcctttgcaaaataaaattagatcatccgcaaagcagaggttaatatgttgtagtcttttgcacatagagtgatatgcaaaagcttttttctctagccttccaattgatattcgaagatagataatccattacaagaacaaagatgagaggataatagagtccctttgccttagaccttagctccttggaattggccttgtatcttcacattcatcactaaaaaatagctagagtttcgaacacagatcataatccattctatagattgcctcagaaaatagtaggcttttagtaaatttcccaagaagtcccaatcaattttatcataagctttgattaaattaattttcatcaaacatcaaaggagtaatgtttttattttgataacccttcaccaagttttataaaatgagaacattatgtgcaagagatgggttcttaatgaatgcaccttgattgtcattcacaagctttgggagaacagaaagtcttgagcatatcacctttgagatgcacttgtacagggtgttgcaacatgctattggtctataatctacaacctgtgaagggttttccactttttggaatgagaatgagcaaggtttcattcagttttggcattatgccatcttgaaaaaattgataacaatagaggaaatttcttggctcaactcctttcatatactcttgaaaacacttgaaccaaagccacccggacctggactttttaagttttgaattgaaaatatggctttcttcacatcttgaaaagtgaagggtcgaattagtctcagttgaagatctaaggatagtcggggtccttcatttatgcattggaaaagaatgagttcagcaacgacacttaattttccatgaagcccttaaaatgagagaggaaatgatggaatgcctttgaataatcatcaataatctgaccgtgctcatcaaggaaagaggcaatccaattgttctcccttttttcttgatacaaacatggaaataggctgagttttcatcaccaaacttcaaccactccactttaccttttttt

SEQ ID NO: 295776 - DNA, 2630 bp, Cannabis indica
aaaaaaaaaaaaacgaaaaaagtgttatttctttcatgcatttccaaaataatgggttgggtacatgtcaaattatacaaattataattaaaaagcggttatttaaacgaaatactatatttgttcgatcgtcaaagtaaatatatatatttatatatattacaggtttcttattctactttcttttgagtgtttgtcaactatctcgatttatttcacactgctttttaaccaagttgggcataacgatattgatggccatctgtattttgttggtttccattatttttttctttatttggtgggtgaaatcatagttataaagtacttttattagtgcatgattgtcacgctatgccaataacatattaataaattgggagaaaatctcgctcatttttgtccaactatcttaaccaacactcaattgcggacttgttggatagtaaatgagatgatgttgattattaatgggcggttaggaaagtattgttgattttgcattttctctttcaaagtactagagtttgaattgttacgacatcaaattaacatgccaattgtacatgaaaggcacacacccaccacaaaacaagagtaaaaaaagtacagacacgaatgtatatgttgggttaagcaattcctggtaaacacgaaaacatgtgattatgtcaaaaatatatatttgtctggcataatactatcacagaaaaatgattgatttgcattaatatattgctgcctatgcagttgttcatggaacaaacgggttgccatacccaacgtcagagtttgaacattcgtcaattccggctacggttaagaagattttcaatcttccctcaccttttttaacgaagagggatgaatgggcaggaacgtttgaaggcatcgttgaaaagaggacagaaccaagaactgattgcccaggttagtcacatgacatatttgatagacaccattatagtttgatccaactgtaagagaagataatttaatttatttatttatttatggacattggtttgagcaggtatactaccaactccggtgagaataaggaagacagaggctaatgaagaagcgaaactaagtgagtttcagcaggagctgctgcagcttgcctctgttttgaatggagataacatattgacaagcttcccagaaaaaattgggaagcaaatgagtgtgaaggaagggaaagagtacatggaagaagctgtcaaacgtttctttgaggccggacgttatgccaagagaatgggagttgatgaagaacagattgtgcagatgaggccttccctcaccactagatcatcatcatccaatatccctgatgagaaaccatgacacaaaaaaaatatatatgtagtattaagattatatttatataaaaattaagaattccgatcctagaggtgagcaaaagttgtaattaaagaagctttgcaaagttgtcgattcattatgtacgcacaataaaaagatgaatgtcaacaaatcatatggataatttttatgcttctttgctctacctaatttgggatgaaagttgtgtggatcaatctaaaaaataagggatttttacaaaaatattagatttttggcaaaattttacaattttactgtgggcattttacaaaaatgctgatttttataaaacaaccgtaaaacaacaaaacagagtaataaaaataatagtggaacaactaaaaaacaatcgtagaacaactgtgaaaacttaacacagtacacagtataaaacttacaaaatatttttgaataaaacaaaacaatatttttgaaaaaaatttcgccccacaataaaaaaagtaaaaaaattgaaaatttcagtatgtgatgtaaaaactcaaaaaaaaaaaaaaaacgataatgaaaagagcatatattttataaggtactatttttccacattagtcatgtaggactttataatatttataatattaccaggactgagatgtaaaatgtacttatttgaaaactaaattataaatgttattttaaaaaaaaatttcaaaatataataaattaactaataataaaaattataaaaatatatttactacatattattttttaaaatttatatataataactaaattaaagttgtttttttttttctacttttacacttcaaaatagttttttctttttcattttttacagaattatacacaaaaacccatataacaattaatggagcaaattaaattacaacaaaaatctgtatagcaacctacatagaaattactggagaaactaccgaagcaacctaaactgtaaatttgaaaaacaaaagttaaaaaatagcatatggagtaattcccctaaattaaatttagacctttcttcgaacatggcttaactcaagaaaaatttctgacttcttgagtttagacctttcttcgaacatggctgttctttaatcagttgggtattcctggtcggcatatttgcttgttttttcccttgatactccgtccaacactcatcttgcgtgttgtcttttgtagatgaacccaggtgagtcttgggagcccgagcatcaaatcgaccaggaactgctccaacttctgcacgaagtccacccttgtcttcgtgctaa

SEQ ID NO: 295777 - DNA, 12989 bp, Cannabis indica
aatcaatgtaaggttttcttaaagccttatgtgtttattttcattgttttagagaattcatatttatgatattaattcaacatacttgttagtaaatcttgatcctggtaaaatattcccaacaattatatgattatgtgaaagtggaattagggattaaccctaattttgaatcccgagaattgtgactagaattaccggtacttattcaggagcactcgagaatttagaatctccacatacttgggacatcaggtaaaacactagttagcacgtacagttaagcacagtggcactcatgtttgatattatgattgtgactaagtgagaactaggattagggttattaccctaaagtgagcggttatatggcctaaggttattaccctagtgattaaatgattttgaatactatgccatgttatatatattgaagtgaagaattatgtgtgtaaggtataattaggttagactaggtaactagaattgagataaactattctaaggcccatgccacatagacataggcctatgccacagtaaataataccctgtagcctgtattcaaccgcttgtctaatcctttacctcaaatagtgtcatcactacccttattacctataaccagtactgatgttctaggacctagaagtgttacgtaagaaactacatggactcataaaaccaggtattagaatgtaatctccaaacctaagacatgctaggaaactaaacaccctctttcaaaatctttgctgccaactaaacctaaatctatcaaagctactcttcttgatcccaaatggtttgcttcaatgcaacaagagaataatgctctcatcaaaaataaaatatggactttggtgccttatcagcatggtatgattgttattgataacaaatgggtgtacataatcaagttaaaagttgatggtaccttggataaatataaatcgaggttagttacaaagggctatctctaaacacctagaattattatgcagaaacattaagtcttatagtgaagcctacaacaactcaaacagttcttttccctgctgttacttttaactggtaggtcaaacaactagatgttagcaatgcttttctgtgtggacaacttcaagaaacgccatatatgcatcaacatcaaagggtttgttaatcttgagaagcccacacatgtgtgtcatcttcataaagctctatatgagcttaagcaaggacccagagcttgaaatgagaagctcaacaagacgtcaattgagtggggtttcactgcctctagatcagataattctctatttctttcaggtttagattctatgcaagttattttactagtatgtgtggatgatatactaattatttgtcctaactccaaacttattatttccaaggttattcaagatttgaataattccttttctatgaaggaccttggatttgtgcatcacttccttggtggtgagatatataaagattcaaataggatgtacctatctaagagtaagtacatcattgatctacttgtcaagttacatctttagggtgccaaaagtaatatcccaccaatttttcttagaaattgtctttaactaaaggagctgcattttaggacattactctatatagaagcactttaggtgctcttcaatatttgacacttactagactggaactttctttaattgtcaataaactaagtaaatttattcatgcccaatagaggtttattgggaagcttgtaagatgcttctttgatatcttaaaggcacactttcaaatggtcttctactcaaaccagctgatattttgcagttttatgcttatttcgatgtagatttggcaagttgtgtagatgataggaaatctactagtagttatgttgttttttcttggtgggaatctcatatcttggtctgctaaaaagcaacaaaaggtagcaaggtctactattaaaagaaaattcagatctcttgtcaatactgttgctgaacttaaatggtttatttactaatagaacttcatgtttctcttctagaagctcctatcatttgggttgacaatcaaagtgtgctcgttctaagcacattaaaatcgatcttcactttgtgagagatcaaaatttagacaaaatcctctctgtcagatttgtctcttcaattgatcaagtggttgatgttctaagcaaacctctttcaacagatcgtttttctatatctcaacgacaaacttcaaattgcttcaacccttttcatttgaggcgggatgctagctaatatagaaaccagtttattggttgtttcaagttgttagaagttactattgagctatcttaagctctagttgccacttgtaattatgtatgtttataaaggctctcgcaattcatgatagataagctttctcggatattttctttactttgctctagcttgctttctttctttagcttgctttagttaagtttctacacttagaacacctacatcagtttctctattttatcttttaaaatatatcactaaaacttctcattttttttttattttatgctattttaaaagaactaaagtgagtgttcttaccgagtttttttttagtggcgtgatatatatttttatatatttttaaataaattatatgaaccaaataataataaaataataaaataaatgtatgaaatcctatataccggtaacaatttctctaccaacaaaacaacatgttacatgtgatcattggaattgaatacagagcatctctacagttgggctctggtttatagtgtggcccatctcagcccaattatgtgttaatcggtacaagatttctctcgtcattttccggtaaagattcgaagatgcacgaatgtggattggattatatgctgttttttcttttcgtaccactcagcagcattgattgtgttcatggtggtgggggagttatttttacggtaaataattattgtatacttttatttttgaaaagtgaaaattattatatgattacaatttacaaccataaaaatctcatttatcatttgatcactggtaaaaacttaacatgatgtgttttaagcaaagtttatgactaattatgcgcacttgaagcttgcaaagataataattttgtttgatacatataaatgaacttcatcaaatctgatgaacactatttaagaaaataagaattatatgtgtcgttttcttaactagtaaactaaaatttctgacaagttagttttaaacatatatttgcttcatttaatctgataatcttgttagaaaagtcaacatgtaattaacactaaatgagtcaatcatggttttactctttatatgagaaaaaggaccgcgacaatgacagtcacctgtgacttgtattctatttgcataataatgatagttaagccttagattgtgtgtctattaattacagaagcaaacaaaactattgtatggtaaaaaaattattcttaaatgaaacttgctcagcctaatacttaaaatgggccttgaggttaggccaacatatatttttctttttaaagaagaaagctgtgtaaagggctaccaccacttggggctgagtagttgagtaatgaatatggttagtgtttttacttttttttttagaaggtaaatgtagaagatagtaacaaaaatatatacataagagaggacaaggacaaaaagcagtggagcagttggtcacatcagaaggggacctctttgttgtattagttgaggctctttaatgggaaaaaaacaggttggcttacaacaacctacatgctccacgcgctattacacgccctccagaaagaccaatgttttcattaaacacaattgtaaggtactagctgcgcttagtaccactgagaggtaataccttaaaataaataacaatatttttaaaaaaatctattaaattatatcaaattcattttcactactagtaccttataataaatgatctaaaataataaattttttaacttaacatatgttttacttgtacaaataaataatactgagataacttattttaaaaattatatcatttattcatggttaaagaatgaatttaatttttagatactaaataatcggatattatgttaatgaaaataaattattatgcaactttgtttatcatttttaaatatgttaaacaaaaaattcataggtggttcgattaagccacacagctcaagaatgagtagtgggtggtaatttgaatgtgtattcgttcaattttaagctaaccaaacccttctcaaaaaatctagtccaaccctttcaactttcgactttcttttgaagtctcgattttctactttcttctctagggctttgtcacttctcttttcccgttctctcagctggggccactgccactcttgtcgcgtatcacatgccagctatttggacactcctaagtatacgggacgtgcgacacttgttggcacaccgagctagcaagtcagcctaaacgcgtctgcaggcaaacaaactcaatggttaggcacgatatatgtctcacacatgttgagtgcaaacacgaagtatgaggaagcacattataagctattacgatgatcaatctcacacaacccacaaataaaaacataggcaaatggcacataatgacccaacaaaggcaacacatagacaacatagaggtatacatagggaagtatggataaacatcgtcttactaatatatggccttgatagggcatgagagtaacttgttgcaaaattaatatgatatgcttagaagttcacaaatcgacaagtaataatagtagtcaagagaccaatactgtctcacaaagataaaaattaaaaaaattaattatagcgaataataaaacctaattttatttaagcaatcgattttgaaagatttaaagaaattgaaagaaaatagcaaataataaataataaaataatgttgagaataatcaaataaaaacaagtgttaaggtttgatttcaccctaatcattaatatgcctagtttatctcaaaatttttgagaaccttagagcaatatttctctctttaccctctctcatgtgccgcataaacaatatgtagctgaacagtagcatatatctctataccaccattaaaccctaccttcattaagtctcactctagaaataaccctaaaaattttacctctccatttgacaaattagaattatttcgattactcaagtaaatgcttatctctcaatttcacataacctatgttgatctacctgaggactgattgttcaaaagttttcctctcgagtaataaatttcacaatctaaataatagccctaattataatcacataaagcaaaacaatacataactcataatcatggcaaaaattaaacaaggtaaaatcacatgaagaatattggatgacactgaacttttcatcaaatcataaaattaaaattataattggagatccatctaaactctaagatctaagaaaattagacacacataatgtaacgccctagtaactaaggcacactacaatatttttttaattattgtactaacattttctaatcaaaggattctaacataaaaaagtgtatttaataaaaattttgtaataattaaaattttactaaatataaacacttttataaaatatttacaatcagggaacccaaaatctagttataaaacatatataatataaagtatcaaaaattcttgtctaatggcataaccaaaaaaatgtcagtggtgtctcaaagatcacaatccttcagggttagaggactagatatgtacaatattcactaagttcatcactcactgttgttcagccatagttttgtctttacctacacatagcgacatatctgtgagtcggcagatttagtaagaaaaacataaatataatacaatatatttacaattatgcgcccatatactcgattaccataagtttactaaatgcatctaatgcgtaatttgagatctaaacattcatacctatagtacgattaaccataataccaacctaatcacagtactctaattgtactggtgttggtagaattaatccatactattcaaaattgtctaacatattagatatcagtacttgttaatcctaaaaattagcactactaatccttaacattatccaactactagtcgggagattagtagggacacgctcgaagagtcactccgaatgcatagtcgtatttgctcccttaagtggtagaaatttgcttagcatgcaccaatgggtgtcactcagcaagcatgctcgaggactagtcactcggcatgcaccatgcaagtcactcgacttgtatgcttgaggactagtcacttgacatgcaccagggacatgtcactcggcatgcataaggaaagtcacttggcatgcacaaggacatgttactcggcatacacaaggacatgtcacttcgcatgcacaaagacatatcactcggcatgcacaaggacatgccactcggcatgcacaaggacatgtcactcgacatgcaagtaacttagcatgcacaagcacgcaagtcactcggcatactcaagaatgcatgcatgaaagtcatttggcatgcacaagcatgcatgtcactcggcatgcccaagcatgcgagtcactcgacatgtacaagcatgcaattcactcggcatgccgaagcatgcaaggcactcagcatgcacaaacatgcaagtcactcggcatgcccaagcatgcgagtcactcggcatgcccaagcatgcgagtcacttggcatgcccaagcatgaaagtcattcgtcatccacaagcctgcaagttaattggcatgcctaaccctgcaagtcactcgacatgctcaagcgtgcatgaaggtcatttggccaatgcaccaagttagtacatcactcggccaattaccatgcatgtcactcgactatggtacgaatacaaagacaaagcgtgcatgcaaagggagtacaaccacacctcctttaagttctgatgctagggaggaggtacaagtagcggaggcaccccacctggaagttctgacattccaaagaaggatacacacatccactacccctacaactcgggactatctgacaccagacaaaggtacaaggcgcaagaccaccagctgcaacctacaattatagctcatggatgtcgtcctatcccatgggaccacaattgtacaccaggccattagagcttataaatatcccattcttaaatgtgagaaggggttggaaaattattttgtaaacatatgacttgagaaaatacaaagaaatattttctctcaattttactcaaaacactcattgatacttccttttcatttcatcttcatcttgattctaagttttgagtttagatctggattttctccataagttagttgacaagtttctatcgttaacagaccttagtgcaactctatgtacatccatattgttatctctaatatgttaactatacgaaaatataataaattatactaaacatgtgcatatgtgcatctgaatacatttcttacctctattcctaatttaactgtgttggtcaaccttagtggaattctggatggaattgaaggccttaaatcacattagcagtaaactagtaagtgtcttgctaaaatattttgtaggactaaaatacataatttgaaatttccttatcgataaatagggtggcaacaccctaaataatctaaaaacacgaaaattgaggtacccctaggactacccaactaggtaaccagaattacaatcaggtacccaatattactggtcttaccaacggtaactcaaaaaatttcatgttctaaccttctaaaacttgcttaaatcaactacaactttccagaatagttcaaaatactaacataacatatctcacagttcataacatactttaattctatgactcaaaattttccataggagctttaagctccctaacctaaagctcaaagcttcacttataaaacttattttaggaactaatttctcctctaactattaaattctaactccaaaacaacaaggaactaacttcctactcaattaattaaaaactaacaatcataaccccaataatcatacaaaagcctaactttcccctataccaaaatcataagaattgaacaataataatattcattgatccttcctctaggtctccacttgaattaacctcaaaacttagctcagctccatacaaaattttaaagaaagattgaagaaaagaatttggttttcctccttgtgtgggttcaggtacgagagaggctaaggaaaagaaaagtgaatcaataatattttttttcaaaactattctataaggtcttttgataattatcttaagtatatggtaaattactattttttccttcaagctataacataaaaataaatacactaagggcaagaaagtcatttcaaactaacccacataaaagtataatccctaataaattttcactacctctaaaatactaaactatatcactgtaacttttcgctaatccatcgagtttccactgttgtcgatcataaatatattaatctcatatcatatatatatgacacagtcatataactccataatttttataattaattactaatttcatatttgcctattttctattaatacgtctttatttcttattgcacatatacttatataactaactatactacatattagttattaatttttcatgtctaattatgtggtcattacaattatctccccgttgaaaaagattttatcctcaaaacttagccttaaaaactctagacaatgtgtcctcatgtcagattctaactcctaggtggctttcttcaccttgttgtttctccaaagtaccttaaccaaggttatgattttgttccttagaattttatccttcctgtcgaggatctaaactagttgttcctcgtaagataaatccagttgcaactctagggtttcataactcaggacatgggttggatctgatacatatttcctcagcaatgacacatgaaatacactgtgaaatctgaataatgctggaggtaaggctaatcagtatgctacctggtcaaccctttataatatctcaaatggtccagtaaatctatctcttagtttacctttcttgctaaagagtttcgcacccttcatgagtgaaattcataggaaaatatgatctctcacttaaaactctaaattgtgacaaacttgtacagaaaataaaaacaataaggaaaaagtaagaacacgaaggtttttcacgtggttttacagttaaaattctacataatccacgagtcaatcttattagatttctgatagagttctagggtcttttctcttatgaatgttttcgttccttttttagtgtaacatgcctctatttataattacatagtcaggcagttaattacatagttgactaatatctttacaataattatcccctgaaatcgtagggtttgattacataccacataaaataaatgtcattaatacttgaaaatcacacagctgtgataggtcggcttataccgagtcaagataatactgtattaaatacgttgtaaatcgtaacgttctaggatgtctcgacgggaacatagcatcaataaccttggtagcaagctagagcttttcctgcatcttttccgagattaataatgtaagtcttattgcttctgcgcttgaagacataatgctccatctgacaaccgcaactcttggcgacaaggtgaacttcaacagccaacaccatttgaatgtcagcttttatccgagagaattgactcgacgagactatgaatctcattgaaagatgtttgaacctgattagtgaaggtaccaaaagcgtgctttcctacaacaagatgggcgcctcactattagttgtttgggttcgcccgactattatacttagtttgtatattgtgtattatacgctaagtgtcttaacaaccattatatctagcctacgtctctctatgtgtaacaaggttgatgcattgccttacatatccaaagtagtatgatttctcgttaacgcacgagacaaccgtttatatatctttatctcgtgtaaccttatagtcagcaagttgtaaatatactctgttacttttgcattaatgagtaattccattttcaaatgtaattaccgttacattcattgattcatattcttcccaatttgacacgtgtcctcctttgaaatgatggtcgaattttgggtataacaaatacataaacaataaccatggcaacaactaaacaaggtaaaatcacatgaagaatattaaatgacacagaacttttcattaaatcataaaatgaaaatcataattggagatctatctaaaccctaatatttaagaaaattagtcacatgaagtatatgaaaaattactatttttcccttcaagctataacatacaaaataaattcactaagggcaaggaggtcgtttcacactaagccacataaaagtataatttctagctatcttgataaatttccgctacctctaaattactaaactataccactgtaacattttgataagccatcgaatatctactgttgttaatcataaacatattaatctcatatcatatatatatatgatatacatataaatccataatttttataattaataattaattttatatttgcctattttctattaataggtctttatttttaattgcacatataattatataattaacaataatactaattaattattaatttttcatgtctagttatgtcgtcattacaattatcttcccattaaaaagattttatcctcaaaatttagcctaaaaaactctagacaatgtgtcctcatgtcaaattctaactcctaggtggcttcttccaccttgttgtttctctagagtaccttaaccaaggttatgattttgttcctcagaattttatccttcctgtcgaggatctaaactggttgttccttgtaagataaatctagttgcaactctagggtttcatcacttaggacatgaattggatctgataaatattttctcagcactaacacgtgaaatacactatgaaatctagataatgctagaggtaaggctaatcagtatgctacctgatcaaccctttctagtatctcaaatggtccagtaaatcaatggctcattttacctttctttccaaagcgtttcacacccttcatgagtgaaactcataggaaaatacgatctcccacttaaaactctacatttttgctctttggatctgcatatcccttttgcctactctggaaagcaagcattcaagccctaatcttctcaatagcatcattggtcctctgtacagcctctaggcccaaatacttcttttctcctatttaatctcaatgaataagagaacgacatttccttccatataacatttcatagggagccattcctattgttgcatggtaactgttgttataagagaattctattagaggtatatatttactccattaaccctcaaagttcatagccaagctcgtaatatgtcccccaacatctatattatcctctttatctggagatcggtctgaggattaaaagttgtactaaactttagctttgtaatcatggctctttggagactttcccagaacttggaggtaaacttgggatctttatcttatacaatggactttggagctccgtgaagattaacaatctcctttacatattctccatactgaccaactttgtaggttgtcttaactggcaaaaagtgcgctaatttggcgaatcgatccacaatcacccatatataatcacacaatcctacggtcctaggtaatccaaccataaaatccatggtaatattttcccctttccactcaagaagagtcaaaggctgtaataaacttgcaagtctctcatgttcagcctttatttgctgacaagtcaaatatttggatacatattccaccacatcctttttcataccaggccaccaataatagggtttcaaatcctaatacatcttggtggtatctggatgtaacgagtaaggagtagtatgagcttcatctaatatttcttttctaatttcatcactaactgtgacaaaaactcgattcttatactgaaacattccactattagaaactgaaaagtccttagccctaccagctacgactgattcacgagactttactaattctgaatcttcatttgtgcatttctaatcatttctaagaggtaagactagagtgtcaaattactaagtttgtcaaccacgaactcaataccaaccctagtcatctatattgctaaataaggagagatcaatttaaacttgtatatatgcccaggaccttttctactcaaagaatctgctactatgttagctttcctgggatggtacagaatttcacaattataatctttcaccaattctaactatctctcacaaattctaactatctctgttatctcatattcaaatctttttgagtaaaaaaatttgagactcttgtgatcatcatagatttcacatttctccccataaaggaaaatttgccaaattttagtgtgaacaccatcgtgaccaattctagatcgtttgtgttaggatttatgccctgaaaagcctgtaaagacattattgattattaaataaagagttaaacatttgatatatgtgtgtgaatgttaaattgttaatatttattattgaataatttatattaaatatcaaaaaatttcttattaatatatgaggttgtggcttgtagctgtacagagaactaagaccacttagctatgagtaaaatagtcaacaacatattaaagttatgaaatttttaatcaatggttgctaatacagttcagatgcccgttcttcggtacaagttatcttagttcggattacggatgtagtgag

SEQ ID NO: 295778 - DNA, 5054 bp, Cannabis indica
ctgaagatctgaacaaggatattatatcccactttgttctccgtcttgtgtattgcagaacgtgagttgttttttttggtgggtgttgaggggctgggtggttctgccatttattactttgaacttttttttgctctctgattattttttttatctgattcttttacttctttattaagtgaggacttgagaaaatggtttctttctatggagactgctctatttcgttaccgttttggccaggaaactcctgaagttcaggtaggatccggttatcatgtgcagtactttgttttgtactctttatatactgaagacttgaatattgtgctactcaatttttcagagggctctcatggctgaatttggcctttcatacaaggcagttagtaattcagaattcgaggtagctatttatacgtactttacattcttcacacttctatcacatgtaattatatttttgtatcaggttcaatcatgtttgtcattcttctataataaagtaaacatttctttattttaagtttcagctgcttactttagttgcactggttgttttctacagagtgtaaaagataagttggtccaagttgcacgttccataggtcagaaggatgtaccaacaggtaggtcagatgattcattgatttttattgggccattttctagataaagtgttaatttctttcccattcccatttatgatttactgcttaagttgaacaatccagtcactgaaatgtaattttatgccttgagtcagtgtagaaaaatttattgtttaaaccagtagtagagccaccatttgcttaggtttctgataacaatctagcaagaaaaccaaacgcagacttgaaattttatttactgtagagaaaaaaaaatgctgatcttgatactagcgagtagaaagatgagttgattagagaggctctcgttcccaataaaaataccaagctgtccattcagttttctgcttaaagcttatactcttcttcacctatctttatagtcaataaaatgctataaaagcccatctgactaacggaaacacagccaattaaactgcctacctacaccttatgtccaggtgttatatcagtttccctaataagttacattactattgttgatttcaacactgttttcttccgaaagttacactaaacactaattcaattttttttttcgttttttcattatacctaatttgatttcccattttctgcctgtcttttgcagctggtgcgatattctacaaggtatatttatccttttggttcaacattcatctcatgaaacaattaatgcagttagatgattctatactttgtctgccgttgcttttttgagaagcaagaatctaaaatattgcaatcataaacaaaagctgagataaattctttcctattcatcgctaggtttgcctctctagattttgtttggcttgaagataactttttccagttattagtttgctgatttatggttcaggctattaattactttttgggtgcacatctttcttaatgtttaaatggttatgctggaaaggaacttctccaccttaaagttcagtttaatctactttttcatgttggttgttcttacagttttcatcgctcttgattctctaaatgaaggtaccttttgaagaagttccagaacttgtagctagccgaagagtgttcatcctcaaggggaatgcttatatagctgccaatcaggttagcgtctatacttgctattcgcttatatatttcaatattatacacttatcttatgtgttattttcttttattgcctccttgtaggtggtttcccttgttgccacacaatttcgtagtcatttatctaaggcactcattttgacaaacaggtaattctagggcggctttatattcagatcgaagagctttgttgtttttttttttcatcagtattgcattacaacaatactgaggtcttttttataatgttagaaatactttaactttcttcatgcagaaaatggacatctacaataagagaacaagagaatgatcgcttatcacctgtaagtatatggttgttaaattttttatgtcaaagaagcagttagtgatgactagcattttcttggtgctctttagattgtggaagcgctaagcacaagttacttaggtcctgactattctcaggtacgtcatctaacaaattaacttatcaaatatcattagtcagacatgtatttaatgatgatctatcttttttatactggttttgtagccaaaagggtttagtgagatttcagtaaaagacattgaggcgttggcgaagagttcatttcctttgtgtatgaggcatctatttgacaaggtaagagcacattgtggtgctaatcgctttctgctctcatttcatttcaatttcattctttatcacctttttttgtaaccattttttttacatgcagttgaaggaggatcatcatctaaagcatggaggaaggatgcaattaggcctctttctcaaggttgtatctcgtagatgaggattttgtgctttcgttcttgtatatgatagcatttgtgtaagaataggattttaggtgcatgtggctttattgcatttcatattggacatgctgttgcagacggaatcttttggcatcattgccctatgctacaggctgggttaattttggtaccaagttatctaagggaaaactgcaattgacagcatataagggcataatttttgtcaaatgtgtttgcagaagttattaggttttcaagagttactaaatattcttacatgtacggccatatatgaaggtattgctgatggcatcatgaaattgtatatccttttactttttgcttactgtttgattgatcctccatctgcagggtgttggcttgaagctagatgatgcactttcgttttggaaaactgagttctctcaaaaggttaggcggtaccttgactacaatggactgcagacatattttcagtactatatttgattaaattaatgttattgattatttctatttttcattgaaacttgacttgaattcttttttgtttatggagcttatgatcagtcactatttagaaacacaataaaagttcccaattttgcttatttgaagaactgcacattatctcatgaatctggatattacatttgcataaaaaaatatgtagtattttttctatttgagattttgttcttattgctttatttttttgccttaggttggtgcagagaggtttgacaaagaatatgcatatggcatacgccataattatggaagagaagggaaaaggacggtatgatatcaaacttcacttctctaagagttccttcatttcattcagttttgaagagaagagcacaagtattgtcgctagagaagaccccttagaagaacttagaagaacataaagttctttttaaaaataaatatacattacttaaatatacattaagtaatgctggtgactaaaaatccggaagttgttggtttctacaccctattttttgattatgacaaaattgctgttttgaatattgcaggactatacaccttattcttgtcaaaaaatcatctcatcaactccaagtgtaggagatcatcatggttgcccttatcgacatttcaggtcattcataactcttaccctctcattcttagtctaattttggactaaaaagagatgaagacttcataaacttgctttattaggtttgattaaacttatgcatttaacaaaagctgtaatacttggacactcttctcataggctagcttttgggggtagaacgccaagttcctcaaataacttgggtatctgttcttgctcttatcaataaaatagcttttcatagttccttcaaaaactgaattgtgcacaagtttgtatcataaatagatttttaatacacaagtctccaaatctgttttaaatttgagttgttagctctttaaacaaatttacattttaagatatcatatgcttgattatagtgtaacaccagtctttaattatgatgcctgctaacgaagtggtaatattcacctgtgcatagatttgtgttgctgaactctttatctgctcgttggctttttgtggcagtgaggagaatcttagagctgctcttagtaaaatgggagtaaacagcagggctatggaagatgtaatggacaaagtgcaaaatagacactatcaggtctcaaaagatttcatgtgtatataaattgcttccaggtgttctttttccctttctaacattggattgacgcttaccaacttatttgatcagttggcatgcaccttaacgtttgaagctgttcatggtgcatcatgtgattccgggattaaccatccgaatcaatactttagtgacagccaaaagatcctgcaagcaaaggtagtcatgttctactttagtttcacttgaaatgtttagtatgcgttattgtctttcaaccaatactctggcaagaaacactacttaaaattttcttccatcatttttgttgcacgagttaccacattttgtatctgtgtatctattgtgagtttctgttttgcagaaccattctaatgctgcctagatagatgaatatggagttcaccacagttgaaaatacctgggcctacttgtaggtgcatctttctttcctattctacatttatttagctgtttttgtttcagctttttggtgtagaggcgcagctctcttttccagtatagtttatatatatgtatagcaagttgtgttgggcaagagatggactttaattttatatggtaaagcatgcgcctaacttaacccttttatttattaatccttttcatcatcttttttctctcatctgaaccctctcctttttccaatatcgaacctcctttagaaatcaaaagttaacgaaagtattcctaaggccatttctactattggaattaaagaaagggtcacctttacttttttgccccggccttaaaagttctcctcagttctatattttttttggcaattgctaagttctgttttgcc

SEQ ID NO: 295779 - DNA, 3092 bp, Cannabis indica
aaaaaacttttatctcatttaattaataaccaaagctgcgactagggctgcaactcgctcaattggccagtctttataaagatatagacaccaacagctagatgaaacccccaacatatttgtttcatataaactgcatcagctacatttattggcatgtgaaatctgaccgcctttcggcaaccacagcaaccaggaacgcctttgcaaggaccaaacttttataaatcattgtagaaaagaaatttgatcagatcaaaagtaagaagcctcattgatacaaagacttcgtaaaatcatgaggttattattactcttaccaaccagaatatcatcatcaatatagattggtaagatattgtagacagcaaccagcaaacaaattgacatctaccatctgtacaaccagtataaacagcaccaacagcaagtacatcatcttgtgattcagtcacattcgctctgctcgaacaaaactatataaggccagcatatggaccaatatgagtaaatgaagatagcattttcgactttcaagaataaaacgcacacaacttcaaacaagaaaaggaagaaaaaaaaacataggaaaatgcacagataccaaaagatctaatgatgttaaacaaaagaggaaaccggccataggcaggaattcctaacaccctagtaaaagtcactacaagtgcttaagatagtacccagtagtatcataatacaaaatctaccataaagcctaagcaaattaaaagactgtccatagaaatgtttaaccttcgaataactgcagggcagtcaaataacatttgatatggcaacaacatgcaactcaactatttctcctcaatacgggcaacgacacaataaatatgctcataacttgatatgctgctctccatcaatcctacggagcacaagacaaaatgtcaacattttacagggtaacaaacttcaaataaaaataatgcaacaaacaaatagcgcttaatattgtaaaaacttacatcaacgtctgatctacgaggagaagggcttcgagaatcaactggcctaccacgtggtgaagcatcttttgaagcaggagaacgttccttaaggtcgcgtatttcagggttttcaccttttgaaggtgtcctacgaggagatgggctcctgcgagatttaggactacgactacgactacgccgagcaggggaggcactgggaacacaaacacaattggcaatcagacaaacacaagcatttaataagaagaataatgaaactaacagtatcacacacctcccataggaatggctccgactgcgatgctcatcatcatcatatttggacctcccacgacctttgtggcgatctggactagcactgcggctcctgctacggtaacggtgttccctctcactcttatgggatctgtcccggtcatatctatccctacttcgactgcggcttctcctcctgtctctatccctatccctgtctctgtctcgattctcatcacgatgcctgaaattaatttctatcagttgctgcatatttactagcagtgctgaagactggactttgcaacttcaaagattacttggcaaaaagtatcacaaaagataataggtgttattattagtgataagcactgaataccaccacgaatataggacaggctaaaaaacattggaataaatcaatattgacagcttccatttctacataattatttgaagttgaacaataagacacttacccaaatacagttcaaaatgtgcaaagattatggtctgtccacatgccaaattgatggcagaacaaaaaaaatatacaagtgaaatacattcactcaccttggacgaggactacggcttcttgacctgcttccaagttttgattccgattcaattatcctccccttatgactgtaagttttatttttttaaggtggaatcaaaacttagaatacatgttcaatcaactaacagatacaaacaacatataaaataagcagaaaccaaagacccgccctcacaagataggaaatatattgataactataataaagatcatactaacgataagaatccacaaaaaaaaaaagctttataaataaattcaactaagaacgccattagagacttacattctttcggcattggggccatacttggcaaattgaaccataatctctctaccatctacaactcttcctaaatatacaaaataagacacaaattaaacaataagaaaaataaaaaaaaataaaaaccataaacaatttatcactacaaatagaaataaagagaagtaaatgacgaaccatcgagcttctccacggctttctgagcctcatccgcatacttgtaccgaacaaacgcgaacccgcgcgattccccagtcctacatccattgattgatataaatattatttaatttatattgaaaaaaaaaaccaaaatttcgacaacaaaggagatagttaccttcggtctctggggataaagacgtcgacgaccttcccatagcggtcgaagagcgggaaaagatcgtctgcggtggtacctatgaaaggagcatgagaaagattaggaagaagaagaagaagaataagaaggagaatagaaagagagaaatgagtgtatacggaaagtgatgttgaggacgagaagggagtaggtgtctctgatgtccggtggaccagatctcccgaagtgcgacatggatattaccagcggcggtgttagggtttttggcttatcagtgagaatggaaagattttggccgatttggaatttggatgtctcactcaagagatgctaaaaatattgcccctatcttttacatgctaaaagatcgacctttatttgcggcaaaacccccttaactatcaatttacttgcaaaaaaccatccaacctcatattttggtgggaaaaccctccaaagtactattctgtttacattttaagatgtcgtctgtccagctcataatttttcccacgtggcaatgacaagtcactaaaaaattatcctatgtggccatattttacaaaataaaaataaaattttaagagtaatttgcggcaaaactcccccaactatcaa

SEQ ID NO: 295780 - DNA, 3501 bp, Cannabis indica
atgtgatttagcgtgtcacttacccgtgttatgaacggtgtgtttaggggcctgtaattcgccgagtagttattccactcaggttttgctgacacaccagaattcagaaacaaggtaagactagtataatgttatgcatatgtttatacacgtttagcgtacatgttagttgccgtcagaataggcgaaactatagccatcaaattagcatatcagggcatcggtgaggtgtacatagagatgcactgagatgccaacagatatatgctaggctatcacatagtatgagttatctgctaccacatcagtacgactagagtactgagtataggctggattcgcggttagtcatactttgtcaagaacattcctgactcagttagggttatggttaggtgtatgggcatctgattataacaagggattttattatgttttatgttatgcttttcttactgagtctgttgactcacatttgctatttccatgtgtagggtaagggcaaggctaaggttgagcagccgtgagagcgagcagatggaggttgtacatgtcgtggcggttaggcctggagcgtactatctttgggacatcatggcttttgctatgtagtcgctaggcgacagacttttgtatatgtatagtaaacttttgtaaatgattttgtaaacgggattccggaattttatatgtttgtaactttatgttttttaattaaataagcaaaattttaattaatcacgattttcgaaaacctcgttgattatcaacgagctgcacagtacgttaaaaaatcacactaacatgcctaaaatagttagggtgttacatggcacaatcagaggcaaagatttgtcaatctcctggatcaatagagaatgaacctcgcagttcctcgcagagatgccatgtcaatttgggagaggttttatggatgcttgatgcagagggctatctctagccagttagcgtcttcaggaagcaaaaggaccacactcttccccaaacttcaagaagtcttggaacgaaaatttggctatctaacatccgggtaaggacttctatggactggtcgcggatgcggatggccacgtcagctttgtatggaaatcgacctatagaagattatacctttttctgacacaggattagatcttgtcccccgtgccaatccatggtagtccacgtacatacctcaagacatgccttttgtccaattgcttttctagagagtaattgataaaggaaaaatctttgggcaacacgtgtccctaatctagatggcagtattcactatccctgtacatcgcatgatcaagaaggttcttgaagaccgtacagtcagatttaaaattgtattctcctacccttgcaacgagttgtggtacgaaaacctataggtgggtaaagagaatggccatacccacatgtaagcctacaaatactcccacattttatttacaaagggtgaacaaaattttatactagccaaacctctgcaaaaaactcctacaagctttctttttcttcaagagaatcaaaatgagttcagagctagaatttatactataaacacattgtattatccaaagacttgctcaaagggccaatataactgactcatggactagagattattaacgtttgaaccacgtaaaaattatttgtctactatttactgtttaatttctttctaaagtcttgtttatttactttctaaaaatctcgataaataattacgaaggcaagaaaattaatttggtggctatagaaagtttgtttgtataaaattccatgctgactctttatctttgaaagttgattctttgacgtatttgagctattgctcactaaaatatggagcagttaaacatgctggagctatttggagttcaattaaaagtgaaattagtacttcagtaaaagagcctcgtgaagctgttacatatgaatcaataaatcgtcttgagtttcaggaaaatgaaattgcagctgaagctttagtgctcctaggaatagttttttatttgacaacttttacttactttttcttcttcatatgtcactatatattgaatttagtattactatggcccttgttgtatgagaaccgtacgtaactaaaatgttgttacaatcccttgcattagtgttttcattttcaacttttattagaacttatgtttgtaagatgaactattaaacggaatagataatcaatatattttgtattaactttttgtttatagttttacttaattttttatttctttaagtaaatgaataattgacttgtgacattaattaaaggctaagaacatcaaatatttctatgcaggtttggtttactaagaacatttgtctctagtagtgtcggtttataaccgacattaaaaatctttatttaagtgtcggttataaaacgatactcaatagtgttggttctaaaacgacaataaaagaaacaataaaagaaaaaatatatatatatatatatatgtatataataagtattggttgtaaaatgacaccaaaagtcaatagtgtcttacaaaactaacacaaaatatttaacttttcgtcaatgtagaaaagaaagaaccaaggctagtataaatttaaaattgacaccaaaaatgtaacttatagtattgtctgttcattggccgtactcctacttttgataagctcctccacagttggcaagttccgatgtaataagagaataatagctcatcgatctcttagagcttggttggagtacttgataggcatgtacatattttgtccttatctattcaaacaaatattattgaaatttactacgacaaaaaacaaatacaacttgaactcgttatgccttttctctcaattatatagcattcccttccttatgtgtacggcatgagtattttaatatgagttctaactggccgggttgccattgatgaactaagtataaaaggaataatcacatcggtcacaattatgtttttatttgattatatttctaagttttggatatggtgtactcgactacataatttagtaaatgtacaaaaagaaatgtattaaatacataaaaaatttgagttgatcaagattatattttgaaccataactttgtctatttgccccatctttagttcatttgatatatattttagtatgtttagtaacactgactacattatacagttgacaatgcaccctatagtttttgtattaaccaacaccaaataatttataatctataatctatctatctataatgtataatctataaagattgagattggtgatggtttttcggttttgattgttattttacttttagtagttcaaggttcttttttttcttttttatctcttcacttcaaatgtattattttgtccttttgtggggcttaagtatgttttttactctttctcttcataactaaatttatattacttcaaaaataaaaataatttgatcaaaaatagtattttgtctttttg

SEQ ID NO: 295781 - DNA, 1755 bp, Cannabis indica
aatcgtgtattatatttgactttaaaaatcatcaaattgaaactgatatatacagttgttgagtctaaagttaacgaccaaaccaaataattcactcacaaccaacaatttctaagctgagtctccgccgtttccctgaagctattcacccgaaccaagcaaaaatgggtgcaacccaacccaagtccgcaacccgacccggatccaacactactggttttgagcaaataacacgccggaggacactttggtcctttcccttgtaacacaaccccccattccctcgtcacctccttttccgactcattactcccatgcccaagctcctccacgaatatcaacccttccggcgatggcgcatctccagtctcccatttacccttcgccacagcccaatccccagccgacgccgtcttctccatcaccatctccgtctcaacgccgtcgtttcgacccttattatacacgtggactatcaacggcgcttctcgaagatacttaactatctcaaccaccgaatctctcatccactcgtctaatttctcgcaagccactgatcccatatccgaaccggaacgattccacccgttctctaaatccactggatgaatcgaacggcttttctcgattgtcatcgtcgatttcttcccggattttctcctggcgtcgttccgaatcgtcaaagaaactggtcgatcgttgccattcgaatcaaacttaaacaaaccgatgtttcggtgtagaagattgcgattgcctccgcaacgagttgccgccaacgccatgtgtgccgatggtgagatggcggagcaagaaattggaatgggtcaggtcaaaacgacgtcgtaattgaacgttttcgtgttgatttcagaattctacttcaaagcaatatataacttagaagtttggtttatataaatgttatgataatttatggttgacgaaggcttgattggctggttttcgttgacacgagaaggcacgtgggaacacgtggaaagtgtatgccaatcgaacgctgtaacttcctaaaccacagttctgcgtaaaccttcaccaatagttggtgacacatcagcattgtatggtgccacgtggaccatttaaaattgaggaattgagttgccacacctttttcgtgtgatttactatacactatttttattggaagcggacgtaataaatatctttatttaaaattttaaatcgacaacgagattgattaaataaagtgaaatataatatcgcacatttatttcgggataagcatttcgtgatctttttatctatctctcgaaataatgaacatctctcactaaaaaataataaaataaacaggttacttcgcataagagtttaaagaatattgctattcaactattattatcttttaatttaaatacattatcttataatatatttaatttaaataataaaaaataattattaatttttaatttaatttattttatacataaaataatcaaacaaaagccaaatgggttatgttttaaagtttaaaattgatttctaaattttaccacaaataaaatttattatttattttaccaatagataataattgattaattctcattcatcccttattttattaaaattaaaataaatattattttacactaaaataatattttctctctctttgatattttttcaagaataatcctatatttaactaattaatatagtttcatcaaataaaactaaatagttaaatatcactttaattat

SEQ ID NO: 295782 - DNA, 8175 bp, Cannabis indica
ctttcattctctcatttattattgaattgtttgtttttttaattatgatgttgggaaattaatgcttttgattatttgactatgttggtgttgttgagactgaaatcaactatttgattggttttgtttatgttggatcacctgattatacatgccataaatatggatttttagttgcttataagtgtttacaaggacaatgagtggaagttcaaaactaaaaagcagcttagacttgatagattcaaagattgtttacaaccacttagctagaactcactcccgaaagaccagcctaagagagaagggtgtccaagtagttataaaccattggatcctaccaataaacccccctagaggggacatcatggtggcccactcactctgggcttttccattaggtcgcctttctgtgacggtggtcgcacttgagggtatatgactctgataccatttgttacagttacttaagtagaactcactccggaaagactatcctatgaatgaaggttgcccaagtagttataaaccaccaaccaatcccaaacttagtcgatgtgttaaatagttatttaattttctcatgctttaagtatgattttcataattttgatttgaaattagtgggtgctattgaaaatatttgggaacaattctctctttgaaacaacaaattgactattgtaaacaggaagttaagttgagttgaccctacccgaacatggcccatttataaacgcgttacacaaattgtgttgtgttgtgttgtgtcaaccaatttataaacatattgtatttcaatttcaacagtttctctcctcatctttatctcgaaacctcgtgtcatttgattatattgtataataggccttagagtttcaccttaagaattcagaatgtattgaaattgatgtgtttgaacaactgcagcataaagatggaagctaatggagtggctgaacttaaagaacctctattggagtgttcggatagtgatagcgttgcaatcacaattcctgatttggatcacaagaaaaatgagaaaattagcagcattatgttcagagtaggaggtatggaatgtgcatcttgtgcagtatccatagaatctgcacttggaaagcttaatggggttcgaagtgtcatggtatcgccacttcaaggtcaggctgtgatcaaatatgtgccagagttgattaatgtaagctattatgaagtttgtgcattgttcttttctataagagagtaaatattcttgtttttagaaatcgaaaggacttatgatgaagatcttttataggtaaaaacaatcaaggaagctttggaggacacaggttttacagctgaggagtttcccgaacaagacatagcagtatgtcggttgagaattaagggaatggcgtgcacaagctgctctgaatctgttgaacgcgctctacagatgatcaatggagtcaaaaaagcagtggttggtttaacacttgaagaagcaaaggtccatttcgattcgagtgttattgatactgatcacatcattgaagcaatagaagatgctggttttggagccactctcattagctccgggaatgaaggaaacaaagtacatctaaaacttgaaggtgtgaataatcccgaagacataacaacaataaaatcctctcttgaatcaactcccggtgtggttgatgtttcttttgacatgacagaacataaggtaactattagctatgaccctgatgtaaccggtccacgatctcttataaagtgcattgaagaagcaggacatgatccaagcccttttagtgcaagcttatatgttcctccaaggcaaagaaaggaagaacagttgcatgaaattcgggtgtttaggaatcaattttttgtgagttgcttatttacagttccaatatttatgttctcaatggtactgcctatgcttcctccttatggtgattggcttgactataagattcacaacatgctctcaatcgggatgattttaagttggatcctttgcacaccggtgcagtttgttgttggccgaaggtatgatattagtattagcaactttcacatagttttctgttatcattttcggttatctttgacaatttcagcattttcatttcaggttctatgtcgggtcatatcatgcgttgaggcgaaaatctgctaacatggatgttttggttgcgctaggatctaatgctgcatatttctactcagtttatgtagtgattaagtcattgacatcagaaacatttgaaggccaagaatttttcgaaactagtgccatgttgatttcttttatcctcttaggaaaatatttggaagttgtagcgaaagggaagacatctgatgccttagaaaagctaaccgatcttgctccagattctgctcatttggtaacactagatggagatggaaatgtcacttcagagatggaaattaacactcaattgatacagaaaaacgacattattaagatcgttccaggagcaaaagttcctgttgatgggattgtcatagatggtcaaaagccatgtcaatgagagtatgattacaggagaggccattcccattgcaaagaaactcggcgataaggtataaatagcttactggagatcttatttgtaacaatgtagaattttttatttacaacaatacaaataacatcgtcgggatagatcagaaaggatacaaagattcgagttttctatgggcaatgcaaatgatttttcgatgttttgatcataggttattggagggacaatgaatgagaatggatgcttactagttaaggccacccatgttggatcagagactgctctttcccagattgttcaacttgtggaagccgctcagcttgcccgagcacctgtccaaaaactagctgatcagatatcaagaatttttgttccaacagtgagtttgatgtttaatctgcagtttttgtgtattgactattcatattgtaggaatctgaatgaattactcaattatacaaagataaaattcagaatagtttatattatagtgctgaaaacaaagttcaaagcagttgtttttacatgcgacatgtgcaataaattatttgaactctgttttcaacactgtaaattagaaattttttcgaaaactgataggaggcccactattactataataaataccgtcatgaaaaaaatttaagatccaacattgtcgagcaacctgtactgataccacacaaaaaggtgttgtaccgtagacctcccctaaatggaatgggtgatactcagattctatagagtcagagcttatagaggctgatcatagacaacactgctatctatttaaatggttttcctttttgttgctttaaactattcatatgcaattttctcttaggtggtgtttggtttgaggtaatgaattagaatggaatggaaaggaaacaacttttattccattcctttgtttggtcttattttaaagtattgaaatgtcattcttattctagctatgttccttccaaccaaacgccacctgatggggtgtttgttttgtgagtttgagttggagagagtaaacttagagggaatatgaaacccaagtattagaggggattaacattcccattcctatctggtctaaacctcatactaaacgcccccttaatgcttgttcaaggttgtgctatccattgcttttctttttcttcttctggtgagtgacataatgtttgttacatcaggttgttattgtggctatcataacctggttgggatggtttatacctggaaagcttggtatattccctaaacattggataccaaaagacatggatgaatttgagcttgcgctgcaattcggtatttcagttttggtggttgcttgcccgtgtgctctcggtctagcaacaccaacagcggtcatggttgcctcgggaaagggtgcttctcaaggtgtccttattaaaggtggtaatgcacttgaaaaggcacacaaggtaatgcagataatgcttagtgatgataattttggttaaatgatacagtttttctcgattgagttgttgtattcacggaagtggttctcaatacagatcaaaattattgtctttgacaagactggaacccttacaattggaaagcctgaagtagttagtgatgtgctcttttctaactttccaatggaggaagtgtgtgacatggccacagctgcagaggttggtgtccatgctttcatatttatcgaccaaattgttctcgaatttgaatttggaactcatataattgaagatagttatcgtattgataaaattttattgatccaatttgagttcagagtaccaaatatgtacggaaataaaatacagggtaccaaataagtacacacagtattgtttatttggttagagatttgaattactacaagaaaatctctgcagcccgaatttttggagtttcttttgtaagatgtctttttccctatgcaggcgaacagtgaacacccaattgcaaaagctgtggttgtgcacgccaagaggctgcgagaaaagttcgggtcaaatggtgaatctatagcagatgttaaagagtttgaggtgcacccaggagcaggagtgggcggaaaagttggtcatagaacggttttagtcggtaacagaagactcatgcgctcttttaatgtcccggttggtgaaaaggttgagagatatatatcagaaaacgagcacctggctcggacatgtgttttggttgcgattgatggggaagttgctggagctttcgctgtaactgatcctgtgaaaccagaggcgaagcgtgtcataacttttctgcgctcgatgggcatatctagcataatggtgactggggacaacttggccacaggttctgctgttgcaaaggagattgggattgagacagtcttcgccgagactgacccagttggaaaagccgacaagatcaaggaattacaggtacatttttttactgtaaattagattacattgtagagttgtgtcccctgaatcgatctgttttcgatagtttaattgatttaaggtcgattttcttaacacgaaaaaattcagagggcacaactctgcaatggttattatcggagaaaatttgattgaaatgaactaaatatttttactatgtttggaagttggattttggtgagaaaagaaattaaggaaaaatgtagcaaaaataagtgtcgttaaaaatcaattttttcccatgcaattctttccatactaaacatgagaaattgaatttttaacccttagggcccgtttggtacgcaggactggattggattagacaggttaatttgtccaatccagtgtttgagcatgttagaagtctggataacaaatccagctaacctcatctgtctgggattatttatcccatccagcagggtggaataaataatccaatccagtcctgcgtgccaaacagaggaatttaatcaagaattgagttgtcttaaataaatgattcctgtgttttcgaatgatgcagttgaaagggttgacagtagcaatggtgggggacggaataaatgactcgccagcattggctgcagccgacgtaggcatggccattggtgcaggaaccgacgtagcaatagaagcagccgacatagttttgatcaagagcaacttggaagatgttgtaacggccatagatctttccaaaaagactatgtctagaattcggttgaattatgtttgggccctcggctacaacatcctcgggatgccaattgcggcaggaatcttgtacccttttacaggaatccgattgccaccttggctagccggtgcttgcatggcggcttcctctcttagtgtggtttgttcttcacttttgttgcaatcttataagaagcctttggaagttcaacactattaagactccaaactcacttcaaaaactttaattttaagctaattttttttggccttattttattagcctccattgtgtacattttcattgatgcattaatgaaataaaaactagactaacttcttatgattcatgtcaaaaagaatgctttgtgacaaaaaaaaaaatatacttaccctatgtttggtatggtggaaaaattaaaggaaagaaaatttaagagagagaggagtggagagaaagtaaaaatgagtgttcggtatgggagaaaatttgatggaaatgggaaaaaaaataagtataattacataagatactattttttgttaaaaaaaaacaaaaatatatttttacgtttaaagaattttttttatatttttacggtttttcataaaaacaatacgaaaatagtaagaaaattacataattttataggtatatttttttagaatatgacgaagaagaagttttttttttttttaaaaaaagtacaatttaaaggtatatatataaaataaaaattattaaaatgaagtgtacttataattttacagggtgaaaataaaactccccaataaaaaaagtataagtaaatttattaaattacactcacaaataatattaaaatataaattatacaaacaaaatattaattttcatatgagaaaattttctcccctttttgtttaccaaacaacataaaagaaaattattttccttttttttttaccttcatatttttctttctttccaaaattttccatccctcttaatttattttcttcctcccaatcataaacatggtgttagggtgttttgttgcaaatagtcaagtgaaattatctattaaaacatattaattaatatgtagatatatttatatcaattatagattgaaaatgttaaaatatattcatgaaagaaaatagagaaatatatataaatacatttatttaaatttatagaaaattaaataaatatgaattgtagatccttatagtgattataattagtgattatagagtatggtatgtaaaatcgctatttataaataggattgcaatttttctatggggaattttcgaaaaaaaaaaatgtttaaatttttcaaacaaaaaacaagctaaaaatacgaaatttaaaataaaatataaatataaaggcaaatcataataaaaaatattttttccttcaaaagaatacttatgcagttaatatattaactaaactaatcatgaatagtgttaacaaatcaaaccatacattcaaataatcataagtaatgattgtaaacaatccatataattttaaaagtaacatgttccatcaaatctcttttaagattacttaatagttacaatttaatcctttcatacaaaaaaaaatacaatttaatatcggtttaattatttttaaataagtattttttattgatatgattttatttatattatctattttatttatattgataatactgtagtattttttttcagttttttttttaaaatcactgcgtatttataatactaagtgatataaataaaatcactatagtataatgttctaattctttttattatattatttatataaattctaaaattattttatattttctttcttctcaaccctatttatttgaaactagaaaaatattaaacatagagttgtataaattatgtatatcacaaaaatattattattataataatttttatcacaatacctaatatatacataaatactaagaatgtaatgttaatttttcaaaattcattattacatgtttttataaataatatatatgagatatcgttctttaattgatgatagttaattttaactgctatattaccagataatttattaataagcatgtataagccttgaaataatattattatatttaagaaaaataaaatatatatacaaaaaatagacaaagaaaagctttatgatccaaaagaattttttttactcaaaagaatacatatgtaggcattaatttatatactaggctaatcatgaatagttttataaattaaactacaccttaaaaataagtatatgtaattgtaagcaatattttgtactaatttaaaataacttcatgttcgttgtaaattaaataaaaatttaaaaatactcttacttatttttaatttagtctctcacatcgaaaataataacgacgtcaacttatttgtaaaaataagggtcattccactagttatcatttggttattaattataggattaaagt

SEQ ID NO: 295783 - DNA, 3189 bp, Cannabis indica
aaaatgatacttatggattttttacttttattttagtaataacatttacaccttaaattagggtgatactgatactaataaaaattcgatatgattacaatattaatattatttttattttcgaaagatttggtatatttgctactactatttttttttaatagaacaatgttaaagggatatgcttctcatcaccataccaaatgacctatcaagatggaacaattctggacttttttaacttaagacaattttgctcgccctaacctcataacaaattgaccaatatatataattatatatgtggatatattatgtttatccctaaatcggatttaccaaaaataaaatcaatatactgaggatcgagtaaagcagagttgtcaatagtatgaaagaattgacatttatccaaatttgatttgtctctaaaatttggcttatggtgctagaaagaaatgtctccagacaaacaaataaacttcacaaaagggaactaaaactagaatgaattgccgcaaaccttgtagcttttgcagcttgcggttatgagtgagagagttaaagttataaaataaaatggtggatagttaaatacaagtacatattaggcgtcaaaatcatgcctaaatttacagaccctgaatctgcatcccagacatttttttctctccctcatctcttttgcaggaacctagcataaacaaaggtcagtaagcatcataccaatctataagaacaagcttagcttatacaagacatcatagtgtacttaacagaactgtatttgtccaagattcgaacactgtaaacttactgatcatacacaagaaaaagcaagaatgctctcttaatcatcttcttctccaaggttgaaaagcaacctgaaatacaaccccgtgaaatgagtaaactatttcacttaatcagatacatgataaaagaactaacaggccaaagcatgattttatgataataccaaaataaggagaagatagaaaagaaaaatgagatatcccatcttgatgaagcgtttctttttctccacttttagttgactatagatttcagttacatctaccaaatgctgtccctgaatatatctgaatagaatcacaccatcatattagattgcagcaacatttctgaacgtggtatttaaggaagaactagtagtttctttaattatgcattaacatggtatttaaggaagaagatttgtagtttctttagttcagtcatcactgaacttacagagaaacagtaaaataaagaccttagcttctcatttgtgccagttaataattacaaaagtttgttcaagttatgactgaccaaatttcataaaaaactaacagatatgactaatgccactctaatttcagaattaattgttatcatcataatggtagcagcttaaacctcagtatcctcaggccaaatactattaggagaaaactaacatagcaaaccgaattaacatgagatagagttatctacatgaagcaattttcccagtaaatctcatcaatgatagttatcttacatgacgactagcatactttcagtctatgtgcagatcagattagattataagcattagacactactggtattttacaaatttactagaaatctagtttcaacactgtttttgcttcaggatatatgaatttaaccacaacagtaaatatagacctgttagataatctctccaaactgttctagcatttcattacagttaacccttcatcttgtaaatcagacagcaactggtacaggtatgatataatggattggagactaataggttttactctgaaatcaaggtaaagaatgcccaattgatcttttcataacaaaatctcgatagggtaagaaagaaacttactgtctcacattataatacaggtatgggagatgcaatagacacacaagccaatgtcctgtggcaagaagtactaagcatagagctccttgagtaataaactctggcaatacaacattgtttatccttgatgctgaatcataggggttgatataatcatactctaaatcaaccaagcatataagctgcaacaaacatattcaacagtaaagttagtacaaaaatcaaataattgataagtgcaccccattgtcaaacaaaatacaatctcatcttctccagttgaggttagagaaaactccatgaagttttaattggtcttctttaatttataacactactctctaataaagtgcccaaatatttttcaaggaattataaatttaggtggaaaagaaagtatcaaagttttcgtatgaagaaaagaatagaaaaaagttaaggaacagaaacattacacaaagcagatggtaacaaatgtttcgttttagaccaaaccaaatttgaattttgaatccaaacgggtaacaatcgttgatattttatttatttattttattataaaatatatatatttatatatactctgatcctgctacatgaaaatgatctataatttatttacaataaaagaagaagaaacctgaaaaccgagaagtaatagcagagctaagatgaagaagaaggagaagagccaagtccacaaggcccacatggcttccgatcccaacttggagagaagcttagtattttctcgtgggtttttcctttttgggagttaagttgcccccaattgttctttgctatgtgtttctttctgggtttggtgatttttggtatgtgaaggaacaaggaaggttgatatgtgatttgagggattcaatttcaattcaaccagagaagctctccattaataaaccttgagatgagaatggcagtactcggaaatgttaaattattattatacgattccaaccgatgtttgcaaaaagagcccttcgctattgacctcattgagtttgactaattatatattagtttatttttcttcctcaatagtgttgattaattaatagttagggtgtttgctaaaaaaaataataattaaataaatagataaggcacattatttattttttttttttgaataaaagcgtttatacataaataaaaagagttagacctcatggtcgttacaaaggatagcaatcggaatagtggatatctctaccataccgttaatatttatggcaaaagcccatttagccacattatgagccacaaaattacaatttctagta

SEQ ID NO: 295784 - DNA, 1417 bp, Cannabis indica
tcggtgccatcaaaagaacctgtatacaactcgagcttcgcattgagtaacccggaacagtatttaaatttaaagagtttaagaatgccaccagaatatttgaagtatcgaaggttgggcgtgttgcattcaaccttacacaaccgaaagcatccactcaccaccaaactcttgagattggaatgagagatttgaacagtaacaccctcattaatctgacaactctttagttttaaattctcaagaaagggaatttgagaaaggtactcaacaaatgcattccctgtactgattttggtacgctcaatctgcaaagtttttaacaatttacaattcgaaaatctaagaagtccttgagcattaaaggccttggtgtaagtgaacgattgaagatttacagaatcaataaagacattttggggtatatcatcatcacaaatagacagttccattgatttgagtttgggagatgaaacacgtagctctgtgaaatcaaagcaaaacccaactacaaattcttctaacaatgggagacaagataacagatacctaaggctactgttatctatgccaacaacactcaactcaagcttcttcacagaagagaatactggtaatgtaatcgcaagagataattgaaacgatttcaaagacaaaacgtcgagcgatttgcaatcagaaattaacgaccataaagaatcagtagacaagatcgtatgactatgataatcttcagagcagttatggagttctatgattttaacattacgattcgttgcaatggataccaattcaacaaatcgaggaaaaaatataccgtcggtgccaacgtcggagtagacggaaagcttttccatattgactctgtcatcgcagtggtcggaccaaactgccaaacagtgtcgtgcatagtcgtagaaatctgcttgtttaaaaggtaacgatttctcttcaaattcaaagaccggagatgtaatccaagccgatcgccatagcttggaggtcagagaagctcgaattgcgtattttggagaaagaagtttcaatatgctttgaatgactggctccggaaggtacgagtagggtgtgggttgatccatgatggaacgatcatatcatacgttggttgcgtctggagaaattctagggtttccaaattccattgaagaagagaacttaggcgttcttccttgttttttcgttagagaatgaatattgttgaaattatcggattattatcatgcaaatgcaaactaataataaataataaataaataattcaggaaaaaaagaaataataatttaattaagaggagtgctaccgtcaatcttttagtcaatctccacgcttaaaaataaatgctggaatattttttttcaatttttttttctacggtggtgttcgttatgcttacaa

SEQ ID NO: 295785 - DNA, 1971 bp, Cannabis indica
tatgaagccaaataacctctaagagtttttcgagttttgattttgggtgtgggggaagtgtataccagacctgcccgttagggagtgcaggttttgggtgcgggtgagtcgggcatgggtcagcacgggtccaggtggttaggattggatttcgagttaggctaggccaacaaaaatggcttttttttttaattctttttaatatcatttttcccataaaactatccaaatttcagtagcttttttctctttaatctgattttttggcattttacaatacaatatttataaattctaatctttaatccttattctcattatttctatgacatgtttactgagaatcaattgtatggaattgattcttattcatttctttactaaattttataatgagagaagctagtgagatccatttaattaaggagaaaagaataagaaaattctactcccatttataaggaatgtctttccttatcataatttactttatttatattttaattttattaattaaaaaattaaaagataaatatgcctttccaaaaactattacattttttaacaatgacaatttagtcaaattttagcattcagattattttttctagttatgtaaataaaataaaatgattttaattttttttccggacagtttagtaaacaacataacaaattattatttccgattatattatattttaaacccattcatttctcacattgattattctaatttcaaatacaatttagtaagtccttaagtagagttttaacttttaagtaacaaaacaaatgaatgctatttaatttaaaagttctaagaaaagttagtccatagtccaactttaacaaactaaagtctatagtgtgaaaaaccaatgtctataatctaaagtccaaacaaaccaaagtccacagtcctacaacaaacatataatcaaactatcaaagtttgattatcaaagtctgaaactaaacaataaatacatatctaatcaaactagattgtctaacaaaacaaagtcctctcacaaaacaaagtccactcgtaggcatcgtttgagatggtctaagtgggcttcttggttggttgccgaaatgaatagagagagggagggagggaagggtcagggatgggagaactattttagatttaggtttggataggattttttttttcatttggggtaagtaaataaattataatttttttattagttttatagtgtatccaggttttaggcgagttcgagtaaaacttgggttccagaaatgttaaattatactaacccatgaaccacccagtttgtaatcgagtttcacccgaacccacccaataaattttacaacccatttttgtcaagttttctgagctcaggtcggtcgagtttggatttttgtatacaaatattctgcccttatttctattattattgttgcccctcttcaaaaaggcaaatttaaatataataaaattaaagaaaattttaagatgtaccttaaaaataggtctaatgatgcaatgggctttagggacctctttgtgtttaataaagctcttcttgctaagccaatctggcaaatttataattttcttgagtctctagctgccaatgttttgagggatctctattttcttaactatacgtttttaaatgttgaagaaccttataaagggccaggaatcttttccttgatgatgctcggtggttaatttgtaatggtaccaagataaatttgaaattgatatttggattcctaaaaacactgcatcaatttcttattcatttcatggtcactctagtgtttcaaattttagtgacattttgttggaaaatgggaaatgaaattctattttgttgactctttgtttgatgttattgaagcttcaaagattttgactattccaagtgttgggattttgtgccctaaataaaacctattctaatataatctgatttgttatca

SEQ ID NO: 295786 - DNA, 2818 bp, Cannabis indica
attcatggtaataaataaaagatttggatatccatataattattaatatttataacaagaatgattaaaagttaaacttttaagtagtgtaattttctcatttcatttttatttgggaaggttttatgttgtttggagtgggattggcagttgtggacaggggtttgtccatgggcttaactttacacctgcctacgcgcattacagcaaccttggaattgtcgtagtctattgtcactccaagtatcaccaaaaacatctcttcttcttaagataatataattaattaattcgacatcttaaaaataaatattaataagtataatagtgaaggaaaactaacattttacacatggcttatattaattaaattcacacacattgactctgtgtagagactgtatatatcaacaccgtttttaattagttgttatattccttacaaaataaataaataaataaataattgctatattaaacggatacttaattatagttgtttaattatttaagataatataagccatgtgtaaaatgttaaatctcactcactactcacaaggttatctaattatttttattttataaaatttaaataacaaacttttttctcataaattttagttacacacttaatattttccatttaacgaaaaacctatcttgagattaggacttgatttctaactttttttcttttttccttttttttcaaaaatgtatattctaatattatagggcaccctggtcccgggcagtggtggctagtcaaagacctttggaacaaaagtatacgtgtcttccttgtactggaagcatcagtttcatttattgatgatttatttaattatgatgttgatatgtcatacatacactaatgtatggttataataataaacattgcttttattgttaataataataagattaattattatttttgttccttaaactttgacatgtactaaattatgtttcttgaacttttaaggtcgttaaaaatacctcatgtactaaatcatgctctccagactaccaaattatatttctcaaacttggacatgtactaaattatggctcctgaactttcatccatgtaagacatttttactaaaattggaaaaaaatctttaaatccaacaatctcaataattcaagggacatttttaacggccttaaaagtttaaaggacatgatttggtatatatcaaagttcagggaataaaaattctaattagcctaataatcataataataataataataataataataatttataataacaatgatgtgatatgatcactcaaaatcatgtctcattttacatgcttaacttataatatgagatgattaattttttatttataataacaattataaatatacaaaactaaaattaccaaaataattatatgcaaaaagaaagtaaaaaaaaaagtaagagagggattagttccctaatcagcatctaggttgggaggcatgtatgatttgttacgaataaatatataaattctttaaaataattttggggaattacctttttttttttttttttttcaattttacggttttaatttctaaagtggttgcaacgctagttgcaataggggtttttatataaaattacgtaaaaatacaaaagaaaaattattttaaagtgtaaaaataaaaaaaaaaaacctaaataattttttaggtaatgtttgagaaaaagtaaggaaattatagaaaaaaaaaattatatttggtatggaatgaaaaattatattgatttttctccaaataaaaaaaaaattgtattgatttcaataaaattttccacatcaaatataaaaaatgatttttttttattctccagacttttttgctgcatttttcttatttttttcatttataaattaacctaaagagacatagaattcatggctgataaactaagcaccatcaaaaagaaatcacaaatggcatctaataaataacaaaagcatgagttctaaattgatggattatattattctaaatggataacaaaacaaacaaaaatggcatcacatatccatatgatgattgctgtagctttattaatccaagatggttgtagacatagtcataggatgctattttggttgtaagggttttgctttggaatcatgaagaagagtagatagactaagacttccaactatgtaagtaggtacataaatagcatttatttcctttatcttagtatacgaccccacacaacaacacattgatatttcaaactatcaaccaatcatatttatattgttcattacttttattattaattattattattattattattattattattaaggagaaacagccagtttgatccagctgcagcacaagttgtgcaaaaaaagttagcaaatatttgtaaattataaattttaagatactaaaatattaaaatatgataatgttatagtgtaattcattataatcataaatatataaaatttatattatataaaaatttatttttaattgtatattcaataggcattctaaatctatcaactctattgtaaaatgaatgatgtaaaaaggattatatttacaagtagttaaattaggtgctttgagggggggcatgagagaaactatttgaggagtttattttgattggggatgccgcccttgtttgttgtcgtgtacacttttgttttgttggtgattaataaagctcttttttcttcataaaaaaaattgttttctatgtatttttaataattttttcaaaatataaatatatatacatttaataaaaataaattatagtatt

SEQ ID NO: 295787 - DNA, 10537 bp, Cannabis indica
  modified_base (22)..(22): a, c, t, g, unknown or other
taaaattattaaaaatataccntaaaaaatttgcaagagcaaagcttcttcttccatggaaactaaaaaaaaagctttcaacttcaaactcaacaatggagtctctcactctcagctcctccttcctctacaacaatctcttcacaccatcaccaatctcatccaaacctaaacccaaacccaaacacaaaacccccaatcccaatccactcctccatcacaccagacccatggacactcagctcaggcgacccaaccagacccaaacccaaatccaaaaaccccaaaaacccactttcagacgacaacgctcgccgcataatcaaagccaaagctaggtacttgagtcacctaaggaagaaccagggccctcaagctcaaacacccaaatggattaagagaactcctgaacagatggttcagtacttggaagatgatagaaatggtgggctttatgggaaacatgttgtggctgccattaaaaaggttaggtctttgtctcagaaggttgaaggtgaatatgatatgagattggttatgggttcttttgttgggaagcttagctttagagagatgtgtattgtgttgaaggagcaaaagggttggaagcaagttagggattttttcaattggatgaaattgcaggtttgttttttgtttttctttgtagaaattacactatttttttttttgattttttcaattgatttttttttaatcaaatatgattttttaattgatttaatttagcaaaactgtatgagtagtgtgacttaaatttatagcaaatataatatttgtctaattactaaaaattattatgagattacaccaaactcaacatttaccacctagttaccaaaagttgagttaaggtttagtagctactaagtgtaatataaactcgcatatcacacatatttacttagggactttttcgaaattgtaggtttggtttttgtttttgtttgtagaaattacttcatttttttagttcttttgagatagatttaattatattaaatataatatttatttaattattaaaatggaatgaatatgagtaatgtgaaaccatacacaagcaattttttttttaaagatttagggtgtgtttgtaagtgactgtttaattattaagtgaaatgcacataaaagaattaaactctatttaaaatacaatgtatttggataattaccgtgtaattatactaaattctcattgttggaggccatgagaattggagcataattgagaccccttaattacctctaattatatggttactggttacttggctgaacaaacacgtcgaatcttgtatttactcggaattatactcaattctaattacatagtggctttctaaacacgcccttaattatactaaacacaatatttatctaattaccaaaaccgaacaagtcaaactcacacgagtatcaaacacagtttatctaattactaaaacctcacaaattataccaaatacaatatttacataattactaaatcatggagttaaagtttggtagttgtagtgggataaaccacacaaatcacacttacacgagcaatgtaggacaaaacacaaatacagaaacacgccatttaccctattactctattatcttgagtggttggttttgtttattatgcttttggtgattttccaaatcaatggagattaatgctgtttagtgatagatttgtgcttgaacagttaagctaccggccaagtgttattgtgtacaccattgttttgaggatatatgggcaagttggtaagataaagatggctgaagatactttcttggagatgcttgaagctagatgtgagccagatgaagttgcttgtggtaccatgttatgtacatatgctagatggggtcgtcataaggctatgctttcgttttactctgctattcgcgaacggggaattgtaatgtctgttgcagtttacaatttcatgttgtcctcgttgcagagaagtcactacatcgaaatgtcattgagtttgggagcaatgatggaacaggagtggttcctaatagttttagtcatactgtagttatcggttcacttgttaaagagggttgtttagaggaagctcttacgaattttcatgagatgaggagtgttgggcttgttcccgaagaggtttcgtatagccagctaataagtttgtgtactaaacgtggtaagtgggatgaagcgcttagaatatacgatgacatgaaggatcagagattagtaccgagtcgctatacatgtgcttctctattaacactgtattacaagaatgaagattattctaaagccttgtctctcttctcggagatggaacgaaataaaattgcagcggatgaagttatttatggtttactcattaggatatatggaaagcttcgtttgtatgaagatgctcgtagagcgtttgaagagactaaacagctcggtttacttagtgatgagaaaacatatttagcaatggcgcaagttcatcttggttcaggggatttcgggaaagctttagaagttattgaactaatgaagtctagaaacatttggttatcaagatttgcttatattgttttgttgcagtgttatgttatgaagaaagatttaacttctgctgaagtagcatttcaggctctttcgaagaccggacaccctgatgctggttcttgcaatgatatgctcaatttgtattcgggattaaatttgatggaaaaggcaaagattttcattgcccagatgagaaaagataaagtacacttcgacgagcagctttgcaagacagttatcaaaatttattgcaaggagggaatgattacagatgttagacagttgatagaagagatgggtatgaatgaagtattgaagaataataaatttatccaaacagttagctctgtatgtaaacataagggagatgaacaacttgatggaaaattattggcgtttgaccaacccgacatggtagctctcggtcttgtgattgatatgtatatggcagatgggaatgttaaggatacaaaaaatgttttggcagggttggttgagaatcccgatggtgtatcgattgctaatcagcttgttggtaacttcattagagaaggcaagaagaacatgctttttcttcgagcttttatcgtgttgaaatttgttgttgtttactgatatttgatttactgcaggtgatgcatttaaagctagaacactcatttatcaatttaacgagctagactgcagaccggaagatgccacagtttgttcgttgattagtttgtatgcaaagcaacacaagttgaaacaggccgaagaagtctttcacgagtttgctgattcacctgcaacgaaaaattcattatgcaagtctatgcttgatgcatatgtcaaatgtggtaaagcagagaaggcgttctcactttacaaacaagctattaccgagacagggaattgtcttgacgcggtttctatcagcattctcgtgaattctttatcgagcaatggtatggccaatagggaaattcctaagctgaatcaaagtattgttgttgttgagaattatatttgaaaaccgtgctcacgaaaatgaatctatttgcaggcaatcatcaagaagctgagattgtcatccgccaaagtcttgaaggacacaaggagcttgataccgtggcattcaataccttcatcaaggctatgttggatgcaggttgacatgggctatttcgatttccatattcaagaattttgcttatcgaagaagtcttaaataattctattttgtattacaggtagattgcatttcgcgtcctgtattcacgagcacatgctttcgagtggggttgctccatcaattcagacattcaacacaatgatcaggtacaccttaaaaagctagacttccttgcttttctttacgttcttgcgttatcaagtgatgttaaatattgcattttgttggtgcagtgtgtatggacgagggcgaaagctggaaagagctaccgagatgttcaataccgcccgcagcatgggtctgtctttggatgagaaggcctatatgaacatgattagctgttatgggaaagctggtaccactctacccaacatcataacgaaaatatcttatctttatgaatattttcgtcgtgctagattacttttttttttgtagcaataaacaaatccattgaaaatagaaataatagtgatgagaatctcatctagctaacaatacaagttctttatctacctgaagagtatgtcgagctagttcatgtacaaccatagacaatggtcgactagtgaacatagattaaggacactcttggaaaactggacagcaaatttgctaaacttgttagattactttggttacccttctttcgatatttttttgcaggtaaaaggcgtgaagcgtccttactcttcggtgaaatgctagaaaaaggaataaaacccggactggtatgcacatacaactgacaaataatataaatttatccaaataaaatgttgttattgcttattgaaatccccttgtcatttcttgaaatgcagatcagctacaatattatgatgaatgtgtttgcgaccggaggacttcatcaagaagcagagcagcttttcaaagccatggaaagagatgattgctcacctgactccttcacatacctgtccttagttcgagcatacacggagtccttaaagtactcggtcgctgaagaaacaatcaattctatgcagaaaatcggtattgttgcttcctgttcacattttaacctcttactttctgcttttgcaaaagagggtctcatggtggaagcagaaaggatctatcgaaaactgcttggagttggtttgaaccccgatttggcatgctatcggagcatgatgagagggtatatggactatggacatgtgacagtaggcatcaaatttttcgaacatataagcgagaatgtgaatgcagacaggttcattttgagtgcagctgtgcatttttacaggtcggcgggaaatgaaataaaagctgcaagtgttttggattcgatgaggcatttgggtgttggatttctagaaaatctggaaatcggttcgaagctaaaatcttcttgattatgtcagaatgaactctatggaagtgatgagcctcctttgtagcatttgtacaaatgacagcattattgaatgattcattgggttgtaaaatgatggtctgtctgtagtgtatagttcatagatatatgaatgtgaaagttaggtgattattttcaaaggccatttaaaggctttaaaagacaagactgatgtacattcttcttgtatttttgttgtaacttgtaacctttcaaggcaaaaagaaagaaagaaaaaatctgaaataatattaaggctaattagaattttagttccttaaatttaatatgttccaaatcatgttctttgttctttgaacttttttaggtcgttaaaaattctctttgaactattgaaattgttggattgaaagatttctatccaatgttattcaattttactaacacaacaaatgaacatgtattaaatcatgcatttcgaactttgatacactatttattaaatcatgctcctcaaacattcgaatatactaaatcgtaattcctgaatttttatccacattagaattctattagtaaaattaaaaaaaattcctaaatcagcctaaaatattcagagaacatgatttagtacatgatttgatctatttaagcttccttgtgcagctctttctatacattgcatcttgtaatgtaatcatataaataagaccaaaaagtatggaaaaatttaagtaaatttgtatgcaattttttctttcaacattgaatttaatgaaacatgatatgggaattgccaaaaatcccccaagtctttgggggcaaataataataatatgataagagataacataatgcccaaaaagccaaaaggaaaaatgtggctttctcaaatgtgtaactcacttagtactaaagcttatttccagctactttctaagagagaggatgaaacttggtcaaactctttcatacattttaatcactttttatcattgcctgccaattttattctctgttgatgttcagcaactttgtaatcaaccacctctcggaaaaggctcgagtcaagcacacaattttcgctgccataaacagcggcttgaacactcgccattagttttgctatttctctcccagaaaagccttcggtcttcgatgctgcttctctcaatatgtcatctgtcaacccctttatctctatttgttgcggttgactcttgaataagctactaaacaaaccgggttttctcgagccagcttgtgctatatatttgtcaagatacaactttagtagcttaaaacgttcctcttccccgggcaatgggaattccagtacttcatcgatacgatcggctacagctgaatcaagatcaccgggacgatttgttgccaaggcaaggacaatgtctttcgactgatcaccagtgcggaaaaggagggcgttgagagcacttctttgcgcttcactcatataggttttgttccgcctgcaaatttgttcaacaaaatcagattacagttcataataacattagcgaaatttaaggtaacaagaataacttactcgcataaaaatgcatcagcttcatcgatgaaaagtaacaaacccttccgagatttcttggcccagtcaaacagctggtgtatcttggtaacagcctgtgaaccgagaggagcaacatcacctcccgtcatcaatgcatagtccaatccctgaagacaagggaaattcaaaatcagaacataacttgtagagattatagagataacaaactttgacagtaagattattgagataggatctcatacagatttctgagccagctccctggcagccatagtctttccagtacccggaggaccatagaagagcatgtttcgaaagggtgcctgatgggactttgtattggcagtcgcaccagccaactgttctatccttttctgaagagaagggtgcaaaataacatcgccgaatccatttcccttattagaagacgctttatctgaaccacgaagggtgctcatcgtacgtgaaaacaatcccgaccaaggatatttccctctggatgattcccttatcaaagatggttgtcctaatattctatcaacataactccatatcactttcgcaccttctctgcaattacgaatgttaaaaagtgaataccgatttcctatatatattctaggattatgctatcaacatcattaccttgtcgtgtaaatcccggctgctaaagcagtcacacccccaacagcaactactagtttatcttgatctgtcagaatagctttcaaaccacctgcaacaaatatcggattctattcaaaactacatgtcaaccccttagttatacaaaaacaacatagtaagacaatattctaacattctaaacctgaccatgattgaaaaagttgttttacacattagttgaagaagatacaatgacaatggaattgaaggtaagttaatcctcaaagatcaactagttattaaagcttttatgaaattcaatattttgaaaagttgatatgaaatttactacatacagctagctatttgattacataccaccgatatgttcgaaagtggtattgatggcagcaacccatttctctctttcagcatttgcacggtttactagcattcgtctattcacgtcttcagctaactttgcttcatgagctcttccttctgcttcggcaatagatctcactctgattgtttcccgttctatctcagccttctccctctctgtttgcctacgttgtgcttggatttgttcttctgttgctcgtcgagcttgctcctgtcggattgaagattcttcttgcaacttcacaagctcttgattccttgatctttgtagttcattctcggcctgcaaaaggcaaaaacaaaaatgaaatcttttccataaagtaataaaataaaatcaaaatcaaaaccacaaaaaaagtcagatgctgcttgaatacctgcatcctcttcctcgctaactcatcttcataacgagccatttgagacttcgtttgtgcttgatgttgagctagctttttctgctcatcatatatgactctttgtctctcctgaatggcaatgaagtagagtgagaaaaagaaaaaaaactaatgatacatcaattattattccaagtttcattccccacaaaacgaatagaaagactatcgaaattcaagaagaacaaaatcttacagtttctgactgagcttgcattgccttgaattctgcagccttagcagctaactcagcctgcctggtctcttcttgcttctttataacctcaaacaccttaaagtcatacaaaagaccatcagttaaagtgatttttcagaattcaaaagtgggaaaatcaaatggaaagcctattagattcaaaataatttcaaaaagacaaatagaagaactaccccaactaaattatttgagaaatactaagaggcactaatagtgcctagcactgtttaaggtatcatatcgctattaatagaattaagtaacgggtctcacatgatttaatttaataattattatagaatatcgttaactattcacaaagtgccacctcatggtggtgccaggcactggtgctattactcaatttatttaaactaagtagccactcgaatgacttaaattaagagcactgttatttggtacctaatacgaggtggtgtcttacaaatagtttgcagtgttcgatcataattattattaaactaaaatacattgaccccaatagctaaatattaccaataacaatacaacacctcacatatatgtgaggcactcttggtacacaaaaaagctattctctgcaaatgacaaattataatgaataaatgttgataaagtaagcaaacaatgaacttgtaataagaaaatgtatcccattcattgctagcactaattcctattttagtaaaacttcaacttgttctaccaacctaaggtgtttcaatcattgcaccccaaaaacaatcttcattctacaaaattaagtacaaaaaatcagataaagtaagcaagcaattatattgtaataagaaaataaacattgctattaggcaccggtagtactagccaacaaataattagcgatatacagtcaaagttattaaattaaattacttgggactcgatacttaattctaccaatatggacattacatattacaggagcacacatgtgccttttagcattactaaaaatatgtaagtcaatgctacactaattcctaatattaacattaacaaaacttcagcttgttctaacaacctaaattgtttcaatcattgcacctgaaaattaatttttatttattatacataattaagttaaaaacaaaaacaaaaaaatagagaaatgaaaaaaagacaaacctttttggcctgagaagagctagtaatatctttcaaagccttagcaccacgttccaaagcctcaggatcaaacccagctgaagtagttctaggattatcattccgaaccttaggaggaggaggaggctcagcattgtcaccaccaaccttagattgatctgaagaggaggaagaagaagcggcggcggcggcagcaacagcttgagaaacaccggaagaagcagaggaggaaggagagaaggtgaaaggagaatcggcatgagcaggttgtgaaggagataatgaagcggaggcagtagccatggctgtaatgagtccaattgcataacttttggccattttttgattaaattgatagaaaacccttgaccatagaagaataaagtaaggaactttgattggaagagaagaaaaatcagagctttttgggtcagaagaagaagaagaagaagcagagagagagaaggcggtagtagagtctggggtttttgtagggtttgtgttcaactaaagagtctatagggatattttcataattacataaaaagataaaactttgcaaaagtaccattttttttagagtaatttgttccataaatacctaaatttaacttccagttgtaaataaatacctaagtttcatttttagcagtaataatactaagttatatttctagaactctgtagttagtcattactcattatccacgtgtcatttttcattagtatatataaattattttatttaaaaaaaattaaaaattcataacttggaccaatcaaggattaccacatgataatttacttaatatttaggtacctacagaattccaaaaatataacttaagtattattgttagacttaagtatttatgctgcaaattaatttttttttttaatataataaccaattttatattgaataatttaggcataaatatttaggtggcgtttggtaatattttttttaatcatttttttagtttttaaaattaaaaaaataaaaatattttttaaaaatat

SEQ ID NO: 295788 - DNA, 3297 bp, Cannabis indica
aaaatatatccaacagcagatgccttaagcatgaaagctcaagaatagatttttagcacaagtttgatttctcctcggctggtggtcgacatggtcaaagtaggtattgagtttgtagttggcaaacttaataatgtgacaccgaaactagacttgttagaaagaattagaagtgatcatctggtggatccaaaattggtcaaaactcgataagaggtcttagctggccaagctaaggatttctcagtgacagacaatgggatgtgacttcaaaaaacttgagtttttgtttcaagtaatgttgaacttagaaaggagatttttgattaagcccataccactccccactaattacatcccggtaccaccaacatgtaccaagatttgaaattgtataactagtggtgtggtatgaagaaggatttggtagaatatgtatctagatttttgacttgttaggagattaagggtgaacatcaaagacctgtgggattgttgcaacctttgacacttcttgagtgaaaatgggaggttttcaccatggatttcatggttggattacctagaatcatgggtatgtttgattccatatgggtagtaatagatcgttttaccaagtcaatgcacttcctaccagtgaaaacaacatattcagcagatcaatttgccaagttgtatgtaaaagaaatagtatgacttcatggcttcaaagtccattatttcaaatagggatccaaagttcacctctaagtgttgggaaagcctccaacgagtcatgggtatgaagctaaagttcagtaccgcttttcaccctcagacatatggccaatctgaaagtataattcagatattggaggatatattgtgagcctatgtgatggattttgaaggctcttggagtaagtatctgccactaataaagttctcatacaacaatagttatcaaagtatgatagggatgactcgctatgagatgttgtatgacaggaaatctaaatctctaattcattgggatgagaccgaaaagagaaaatacctagatctggaatcagttcaacgaacaaatgaggcgatagaaaagatcaaggccagaatacttacttctcaaagcaggtaaaaaagttatgaagatccaaatcgtagatacatagaattttaggtaggatatcatgtcttcctacatgtatccccaatgaaaggggtaaaatgtttcagaaaaaggggaaagttgtgccctagacttactggacctttttagattctcgagaaggttggattggtagcttaacgtctagccttgcctccaacattgtcaagaatacaaaatatatttcatgtctctatgttaagaaaatacatttcagacctaacacatatcttgaaatatgaagctctagagctccaaccgaacctatcttatgaggagcaaccaatgcagatccttgataagaaagataaagttcttcaaaaaaaaaactgtattattggtaaaagtactctggggaaatagtaaggtggaggaagccatctgggaattagaaaccgatatgaggatacaatatccaaagttattcaggttagattttgaggacaaaatttttttaacgggaggataattataatgaccacttgatttatttatgagaattggtagctctttatgggtatatttaatttacttatcattatattcctcttagtaaataattaggacttattgtcaaaaatatgctttagattattattttttaattttggaaatatatttgaattctaagtttattatgtatgttacatatgaaattttaggttttttatattttataccaagtaataatggaatgtaatgattcagtcaatttgagtcacatagatacgggtgagtatcttagatttagtagcacaaaataactagaccttttaaaatgttgagattatttagggttatagttttgaaatattttacccctaattagttaggttacttcttaatgaagtaagggtaaataaaaaatttaccctttttatttttagtggaattttgaaatttttagaaaagtaatttttttgtgttagtggaggatgataagttgatataaggatgcaattagtcatttttatccttactaaaataaaatcaaagaaaaaaaaaatcccaacctaaatcagtttgttttcacaattttagacctgaattcaagggtccctagcataaaattcaaaggtttttgctaaccaatgttaaggaaagcctctctctgaaattctctttgtttttctagtaaaaatttaggtttcatgcaattgctaggttttttgtttctatactaatcgggatgagttgagattgttttctggaattgattttatgttgtttgagttgttatatgttaattttgatggttgtagttatgattgaccatgatttgagctttcaagctcaatcttggtcctttaatggtagatttgtattcagtgggttgatgatgctattttctgttggaatatgttccttatgtctcaattagctgttttggagctttgtatgtaatttgggatagttttgagttgtgaatgagatttttagaaaatgtgcagtagaaaacggcaggctgttttactagaaacagtctaccctttttagtaaggagagaccaagaaaaacgattttcattttttaaagtattttttccgaagtcttgtttttgtcattttatcaagatttagggtattaccacactatttatttatagaaaaaatttaaatttgagtttaagtgcttcaaaagtaatttagcaggtcacttaccagtttacgtaaattatgactaagggccttaaatcgtcaagcaacagtttccacttaggttgaccagcactcattaatttagaattaagataagattgatataatagttgcatatatgtatacatgtttagtgtgcatgtcagttttcgttaaaataacatatcaaggtattagtgaggtgtacagagagttgcgccgagataccaatagatatatgtttggcatatcaatagctatcatattaacatatcaggatattgctaaagtgtacatagagttgcactgagatattaacatacgtatgctaggctttgtcatacgaactttccaaagctagtacgcattggacgtaggatatggtcgtgattaagtgtatgagcgcctggtcacaatcaagttttatgtttatgtttatgtttatgtttttcttattgagtctgtcgacccacgaattttatttatgtaaagtctttttttggcaagttagtt

SEQ ID NO: 295789 - DNA, 4273 bp, Cannabis indica
agagagagagagagattaccttgcaaatagtgcggccagtagccaaatgaacagcttctattccttcctttagatgagccacaactacattggggagccaccaaagctgagtgtagtttgttatggtgggaatataaggtaatggctgcaaaaataaatgaaacaatgtaaggaaaggtgcacgagaaccaaaactgaaaacagccattgttgacatccagacaaatctgacctttttaaattttgaggatccagcacgctctgtaactttcccgattaagtttgggattttctttgttgagtccttccctggtggattcttttcctcaggcttgttgaaaggtaaggtgagtgattttccaggtgttttcttcaaggctttccttttatgccgcctgaaatgtgctagttttaacatagtatcctctcttctatcctgataatataaagtggcatataaaaaatcatcaccatcaaagaaataaaatttaaggaaaaagaaaggcaaaagaagatgaaagttagtatgaatactcattatcatacccaatgatgtggcatgactccaagaattgattctctgaattccctgcattcatgctacaacacaacaaaaaacaaaagggggaaaattagctcatattaagaaatcaaaattatagcaaaattatgttaggagaaaagcaatagcagtatgcatgcatgtcagagcgagttatgtgttcaaatgttctcacttctcaggaattatttagggtaatttttcttcataagcacacttcaaagtttcaaacattatttgcaaggcataaaagatcatactagggaagaaaaaactgaagttattattatgcatcaaatataaggaattatttagtaaggaaaaaacagttgtacatggattacctctcctggacgacgactgtttaatgcctgaacatcaagcttgtagttatgctgaggaatcaactgtgatgcgtctgaagaatgaccttcaacattctaaacaaaagaattatgacatttgttagcagtgtcagcaccttaactatatgctagccaatgttggaacaactccatatttatgctcattattcaaaatttaaatgctaaaagctttaaaccaaaaaaggaatagccaaaaataaataaataaataaataaataaaaattccattgtctcacagataattagttaaatttgcattgacacaatcaacaagaacacatataatatcatagaataggtgcagttatcaagtgagcaaggtgtaaacaaaacatgtgagctaggctagctctttcttaaattaaagaagatcgtgcttcttctttttttctttttctttctccatcaataaaatgaatttaaattgaatttattttacctcattctttccacgccatctgatcacaccagagccaccagcaaatgcataaaatttaaaatgacgtgagtctgcagtacctggattttctgaaccctgcacaaaattttgaaaaagggcaaatactatcatatacatgacaaacattataatactgagatttcaagaaacaaataaaggaaaggcatttagctattctttctagatatgtaatagttttccttcttttttgaagaaaaatacgaagcatcttaatttattagtctattgcaaaatcataaaatttgcagccatagtatcattgaaacatcctctttgggttgcaattgtacacactacactttttttgtaaagaatcaatgctccctgccaaactctaaaataagtccctgccctacccaagattggctcaaacctcagatcttgtgggaataatccacatgcctaactgtttgagctacccctgatgggtgcatacactacacctcaagaatacatgataccctaaaaagtcacggatcacgcagcattctactcttgaagtttaaactattcagtagttactagctattattaggtagtagtaacacacattaaatctagttgcagggcttaaaaagaaatattataaaactttctatcaaatatatataacaattacaagatcaagaataatcaaacaaacaaatgattataacgcaagaaaaaaaattgactttacctccttctcggttgtgcttcttccacgctgctcggagcttttctctgcttccatttcttcaaaaggatccaaaagaatctaaaacacagagaaaatgtatcccagctaatgaagaatgattcaactacaagatagttctgtttttacccatttaacaactctaaaataaacatcaaacagaaacttttaatttactgagacactactgaaaggatcaaacacatacatgaggctgcacttccattcttccaccaacaataaccaatcctgaatctccatgcttcagggtataattgctaaccgagattgctatctccctatgatgagcattatgaggaaaatcctcctgtcaaataccacaaatgttctaagtgaatacccaaatgaaaatattcaagcaattaaacaacttgtatcaaccaacaaagggaaatagcaaggagagctgaaaatcaaacctgcaaattgttttcccagagctttttgaggttagaatcgaaacacatgacagtccaacccgatgtgacaacaacaaggacctgcctgacgacttttcctggtttttgacggtcaataaccccagtagccatggctacagcacgtctcccagacgagacacgaactttatcaggcaaaaggctcacttctgcgatcacacgcgcattactgaacccttcatccacacgcagactgtgtggttccaaaatctgaggcgaaacccattttttttcagtttttacaaacacaaaaagcctgaaatctacataaaaagtagaaaaattgaataataataataataataaagatttttgaacctgaattttggcgtcgtgggttgcgaggaggacttctctcttgccatcaccgttaagatcagcgacaataggagggggcaaacgttcgccctcgaacttaattgggtattcatcagagagatgcatccacgcctctcggaaggagaaatcaccctcatgctgaaatcaaattcaaaataaaatttaaaattggataaggattgaatgaaagaaagaaaaaaaaagttgagttgagtttagtttgtacgtgaagagagaagaagatagcgaaagcagagagcataagaatggccaaatctcgcttcctcatagtattgactactactttatcagctcaaaattgatgatgatgaagaagaagaagaagagcatgggagtgaagattgcgtctcgtaactgaactgagtttcttctctgatctcccaccacgacgcgggtcttaccactctctcccaaaatctaattcaactcttaatactccaaaaaaacgaaaacggaaaaccacgaagctctttagcttcataactcaaataaataaattaatcagttttttaaaactgaatttaataaaaaaaaaaaattgaaaacacaaaacatcttttactttcaaaatttattttttttgtcaatttttttttatatatttttatcacttacgcggacttaaatccagacccgaaccctagaccctaaaatcggatcccaattcccaaccccaacactggatccaaacccagatcagagaccccgtactagaccccagactccaaacccagaccctgaccaaaactcgaacccttgaccccaaactcggacccgggtccgggtccgactctgaggtcgagttagggttagggtcagggtctgggcttaggggtacgggtccgagtcctgagtctggatcccgggtctggtgtttgggtctgggttcggattcgaatctaaatccgacaggtccagtctaaggtgggatgtattcatcttgtggtatggtgtaaaatattgaattttttatttttactaaaaaaaaatctaaaaataattttaaaaaacattactcaaacattattaaaattttaaaatgactataaaattattttctattttatttttgtaaacataattctaaaaattaaaaactgaaatcacaatcaaacaatctctatctagaactattttttttcgaagacctcaaactaatttaacctcattttaaaaaataaaagaaaaataaaactaatttaccaaaagtaggggtgttcatccgatccaatccgcacttttttagtcaaacaacatccaatccgcactaagtgcagatttcatattttggatccaatccgatccgc

SEQ ID NO: 295790 - DNA, 3398 bp, Cannabis indica
tcacctgatgacattgtttctcgtctcccctcataagccacagccgccacaagcttgggcacatatccaagatatccaacatgatccgcaagtgcgggatgcactcgcaataatgaaaccaaagcagcagatagaagcaatggaagttctgggtcaacagcttgagtattataatggctagcagcaatggaggataaatattgatctaacagtccttccaagaatctctttggatttctgaggggaaatttaggatctttcaagaatagcctaacatagattccaccgacctgcatgaatttggaaatcagaataaatgaacaaagaagacacgttaaaatcttacaaataaaatcaactgtcaatacctgtggttcatctctcatttcttgctgcccggatgcttgctcaggcacatcccaatcaacgacacggcctttcatctgttctcggtataaatctgatgccatagttgaaatttgtgcagataaagaagcagccattgctggtgtccatacaagttctggtgtttctgtagtctgctcaacggaagctaccactgcctcaccaggaccatcccgaattattgacaccaagccgtcaggaagaaaccttgctagtgttatagcaactctaggcccatgcattggttgtcctacaagcttccctaacaaagaagctgcagcagctctttgctgcaagggaatctcttctgcacaagtacagtatcagaagcagtaaagaaccatggtgttgaaaaaaaaaagactcaacaaatcaatcacaatgacaattcctaccttgcaaaggcaacagaagttcgagaatgtagactactccaccatgtttggccgcagcccaagcaagttcagcagtgcttgctaatgcataaagaacatgaagagcaccttcacgacaacttggagaagagtgtagcatttgtaacaaaagaagaagactagatccatctgcaaccatggcctccaagcaggatgcatgctttgtcaagagcgacaagacactcagacaaagctgaggaatgttactttctgttgccgcaggcacagaaaagcattcaaaaagaggtaatagcttgtctttcgtagaaaatattgatgccaaatttggattgcttgtgagtaggttctacaaatgaaaaggacaaaggaattaattaacaaattaaagggcacatcaaatggataaaatatacaagcaagcaacatacctgaagagaggtcagcgcaaatttcaggttcaaaaccagtttcaactctttttctctgccaattctccatcagttacaggtgccaaattatcagattcttggtcattacccgatccaccagcaatatcattgcgactctctgatgtctcaagggatgagcccgcgagatctggattatcctgaatatcagaatctggagcacactgattgcttaataaatatgagataaaatcaaccagggcaacacagaatatctccggttcgctgatctcaaaatctggctgatcattgtagactcttaagtaaacattgccaacataaagttctttagatagtgccttgtacacaaaaacatgtgaattcttcagatcatatgaaccatcaggaccctgagttgcacgctgctgatccacaaatttcaatagctctgctcgggttgaagagttccagataatctaaacacacaaaaaattgaaaatttcaatcaatgttttcatcagccaaattgtttcaaaaaaatcacacataaatgaccatgtacataacgaagaacatgatatatcattctatgcacatcatcaatcaaacatagatctaaacacaaaccccatagaatcataacattgaacaaagccaacatgtaaatcaaacttcattaatagaaactcccagcaccaagtatcaatatgctcaagctttactcaaccctgataaaaatctaagtgctcaagcagtttcataaatttagaaaagaaacttgaacaagtcctctgagttcgtctagaattttgtcctcgaaacagggggataaatactcttttgtgccagaacattcaaaagcaagttgaaaatggaaacccttgctgtgaagcttcttggtcagtacagttattgccaagtgagaaaacacctagaagaatgttgttagagcttctcttcaattccaccacagatggaacaaagcgattagaatttacttttatccgatgcttcagacatttcaaaaaggagaggttcatggtattctcaaaaaccaccaacaatcctccatgcctctgcttcaatgcatttcatttcttcagtttacttagagaatgaaacctttggttgtaatctaagttgatccctacctttttccattgaagtagatgatacataatcatctgttgtaagcctaatggttttttttccttctctatctaatacaatatatattatttcaaaagcatctaaatagttcacccacaaccaacatatacacatttctctggggggagacagtttacctcaggagattccaggttggaatttaatctggacaaaagatctttgtgtacttgatctttcaacatactggcaagtttgggggtgagcatagctcttaaggcatcaactacagcctgattatacggtgttatattctcatcagcagacaaaccacttagccgtgatagggcctgggatgcacgtacagcatgcaaattttttgcaatttgtacactagcaccaacgccatgtgactctgtcgtatctgattcgtctgctgttgagtcatactgaagcagcaaaggtaaaaggtacctaaacaaaccaaattccaaagttaaatgagaagtcaattcaataatgcatgcttgaataagcagcaaatacaaaagtagctaactaaagaacactcaaacaaataattaaatgattgtgagaaaattagtctaaaatacagccatctcctggagccaatatttggaaaaaccgtgtaataaaatgataacttaagaaattaggccatttaccataacacgccagcctttattaaggcatcctgcaattcaggagacacggaaatatgagctattgtctgaagggcagcatcaactgccgaaggtacaagctcaagttcagtacagtgcacgatgtcatcaaccagtccagaatactcgagcatatcagccctagcactctcaaacttactcaacacagaaaacgtccgcatcacattagtaacaataatggctgatggttcacttgcaggagtagttgattgaactacacacatgcaacgggaaaggagagtcgcaataagttgaatcccaccatctctcacaagttcttcaccatttaacaaagaagatgcacatctaaaaatgaaaaaaaattacataaaaataga

SEQ ID NO: 295791 - DNA, 7319 bp, Cannabis indica
atatatatatatatataagacattataaaaatcagattagtttgtgactttgtgttataagtttcaccaagatgattaccacattgatgcttcccttgagttgaaccactagtgatgtttcatccaatccaaagccacagctgcattacttataagaaagcaatactgcctattgttttgtttcattggtactttgaatatttacaactgaatatatgtgtttcatgaatttgcaagtaatacaggagagtaatttcccacactggggtaatgtaacactatccatagatttccttgtttctggtgattacagaaattagcaaagccatccaccccccatgaccttgaattagtggtatctcaaaatcaagtcacatgttagttagatcaacacatattgtgaattagcaacttccaatgagttcatgccattgaaaattcagcaccctttaaattccaatgaactcatccgttagattttttgacaagaaactaagagcatctggtttcgaatcgatagttctctccaacttgttctcagcttttgactacctacctgtgttaaagcagtgggtgtccaaaagaataatgttgccacaccacttctgcattcaaggcctattaggggtgtacttggatggatccttgatgctcaattagagggcattcaaacccgagtcagctggatactgcgtaagaatgctaatgatcttatttgcaccacctcattgactatttcatcgcaaactccttttcgacttcactaacgatcactttcaagcgatcgttcaaattttgaatgatgttctttgtaatctttttctgattcctagtgcttttgagccaggcaattccaaaatatactttcagcaggcatccctttgattttgaaggcaaatcctctacttggtatcttatgtgaagctgcgaaaatgaaatggcactagtcagtattccaaaagattttcacattgactgaaagggttaatctagatgacagtcacactgacaaaacagaattgataaatgggaaatttaaaagcaggtattgagaagaaaccgttctgctgttcatacattgaaatagtcaccaaggggaactccatggagagtcatgacctcttcaataacccatccgtttctatcagaaagggggcttttttgctgagtacttcttgtctctcctctgtaacgggaaatacgcttgtcgaatttgtaataagtttgcctttcaaagacatcgcctttctctgattcccatggactgtgggtatagttttgacagccagctttctccataattttacggtccagctcaccaccctcaaacagcttcatatagaagcttgtctgaattaaccaacaaagaaaatgtatgttagaagaagaattgcacctaaagaagatataacaaatagacagaacaggcagaaaagtagaaaaggtgataaggcagataggtttgcaacagtcgatgaagaaaaggaagagatagagagaagaagaaagaaaacttacaggtactgaaagaacagaagaataaacctcagacatgctgacatcatcaaggcccaaaaatgacccactttcttcactctggaggcttttggcttcagaatcttcttcaacaatttgcaccttctgctcaggacttaaggatttagccttccaaagtgccattattgtcctattcagcaccaataaatatttaggaaattttgaagagagctcatgacataaaagcatgctattagttgatgcaagagagatctacctattagctacactgaaagatacaaaggactggaaatggaacttcagcctgccttgccgatcctgtgtcttcgcaccgtgctttgcatctatacccttgccttgccagagagtcatgatcatagttggactacccatggaagctaaagtaggaggaacaacttgaatgtcttctatgtcctcccagagaaagaagaacttagtcttgtgtccaaataaatttgcatgaaatccaattattctcggtgagagaaaaagacgaccctgaaaaggatcaaatgcaagttagtgagatataaatattgaaagaacattttaaatacatttgtgacccaactaaagtgtatatttcaaaactaaagcacctgcagaggcatctttctctttaagtgacaagtaaagtcgttaataagaaactcctctggtggaagtccaaaaagtttttggaatgctgagttagtttgaggagaacgaacgtttatctgcgcaataataatttttattacaagtcgagtatagagataaatgaagggaatgcaagagccattttagtagaagaagtgaaaagaaaaggcaatggttttgaaagttctaagaatttaccttcttccccacctccttctccatcttacttaaataatcgttaacaacattaccaccccttgtattgtccaagaaaattctcaaatgaagcttagactgacaaggctgagctaactttccttgaagaggaacccacaaatcagctaaatctgatatgtttgatttaacaaaattgatttcggcatgccccagagatgttgcatcatcaaaaggtccatcaaaatcatacacttccacatccagcatagaaggaggatcatccattgcatcaaattcaaatatttctgcaaggagtgatcaaaagaactattaatcagatgcataatcattttacatcccatcaatcttttgacagaatttttacatctatgtaacagtaaaatggctacatagaaaaagactgatcaaagtaaaaagagtaataattaccattccattgaggattagatttctggaacttgattgaactagttctagttttcccattgcaactaaacaccacatatggatcagagaacccgcttgtatcaacggctgctaagttacttccttcaatcaaagcaacagtgagcaaccacccatctccttgtgctttcacgccatgatcactgcctattattgaagacaataatgctaaatcatgtatgttcttttaaggaatatgaaatcaatttttcagcaatttaaatacaacagggatatgttagcagaaaaaaaattaggggatgagatccgtgatattcccccagatgattttgcaagtagttgaaagatatcagtgtttggcattcctgctaagattctttatatatcagttatgttttattgacagttcaagacaatagaatttcagctgattagaatggagacagtagatacaaatgttggactaaagttagcatctgacactgataagaaatggtaccaaggcaacagtattacctttttgtcgtctggcctgcatgaagcgtgaaatcaatcccagtaaccgttcagcttgaagaaccagcacaccacacacaacaagttcaccaattgaatctggtaaatcaagccctacaaactccagcccctgaatgggacttggtttggctagccagatgtgaacaagaatatacaatcccaaaaatactgaggagaaaacaccgaaattggcaaaatactgtagtgctagcttccaatctgactgagtttcagcctgcagtgatgccaaaacttgttccttgctggatccaaggtcctttaactcgacaggcttgacattttgagacaacaaagttgcatactgctcaaagctttccttcaggccctgccttgttccattttctatcattcctctcatcatggtactctgaataaaatttgttcgccatgatatcactaaatgtgaggtttgttctccagatgaaagctctggcccaggtgtgatgcagtagagaacttctgtcttaaaagtactcccatacataacatcaggaatgcttacactggctaaaactgcaaacaccttcccatcagctttgagatacgtctgctcctcagtggctttaacagccttgagtaatttagttgcagccttgatataagttatcactctcttcaagcactcaccaccaatatcaaaattccaggatcctagttgatattccgtacttccctgcaaatcggctaatgatttgggaaagcttgaatctgatgaaaatagaaaggagtttaggtctggtggagtaatgagatacaattgatcatgaatcacacctcctggtaaattgcatggcatgtcatttccttcatctcttgattccatcattttcattagttcatcaaaattaccagaagaaaactcatcctcagacttagtattacattcctcaggctcaactgtttcaggtatctccaataagtcattgtatttgctagaggtagctgaatctgtattatttttattaaaaatctggcaaattcgacctgctaatgttttctgtgaaaaagacttctcctccttagaagctgcaaattcgtctagcctaggaggagaagaagagtttgatgtaccactgaaagaccttgaaggtgattcagctcctaaatcaggatccttcctcaagagtggagaactacttccattactattcaaatccccatatggattgtttagagagaaggacaaagaaataagaattttacctataagggaaaaataacagaaatgaaagaaatatcaatacaatgtacaattataaaatttaatatgaaacaggtggttcaacaaccacaagtactattacaacattgtatctaacatttctcaactcaaaccaaatttcgaaagtgagtgatatattgagcaacagtttagaccaggacattggggcattataaaatcgaatcaatgaagagaagaaaatattcacttaatgatccaaaagatataatatatgtaactactgaaataaataaaagaagcaaagaaatcgaagtacccaccaagtaaaacttgagatacaagaaaattgacccccaaaaaagttgaaaagtttaaataagaaaatgacataccacaatccttgttcttggatttcttgtttttgggttgaagagggtaccaagcagtctcaagggacttgctatcagcatcgaaaactcgagaaacagggaccttgacttggccaacgaagtcatcgttaaagtacttatcttcatccaaaacagagacaagtaactcctcgttgagatcctcgaccctgaagctgaactcttcgccccaaaaagggtttaagttcttcttcaccactttggttttggctctctgctttcccagctgcaatttaacgtacggatcactcagtccattgagatccattgctggaagatttcgaccctcaataatacgaaccaaaagcttcattcttgttttcacaaaatcaaaattaaaactttttttccttctcaaatgttatgacttcttatcaaatgggactcttcaaaatcatataaattcataagtctcagaagaaaagggaagtaattgacattatagaaagatatgatgaaatttccacgtaatgaggcaagaatctatgatctgataatacgggagacaaaaataaacaaattaattaaaagtaagttgattttttgcatttcgattaaaataagaatgacccagatgaaaaaaaattctgaagatggacaaaaccgtatgaaaattgaccaaagaggaaaactttgtgaaagaaaaacgaaaacaaatgattaataaatggaaaaacagagccaatacagacagacccagatacataagactatgaaagtgttggcaaaatcctataaagaccatatgaacattcaaaattacgaaattgtagcagagagagataaagaaagtaaattagcttttaagttcaacctcccactttctctctttttcaattagcaatcagccatagcgcgtatgttattggactttttgactttacttaactaaagcattaaaaatctcaactttatatttataataataaacccaaagtttctatatccattcttacttccctttttttcatttaatttatttaaaaaatggtgagcgggtgattagtttaaaagggtatacaatcaggaccttgttacgttttgttgaggatcaacccaaaccccaaatgagaggccattcaatacttaatagggtgtccaatgctctaaccatcaatcacaagtcaaaaatctaattctaaataatacttaatattattgattaatacaatttttagacatgtttatcattcattgtgcaaaggttttggaggaaggaagaatatgtttttgatgttaatactcatcaattttatttatttgaaaaagaaaaatagaacaagtttcaatgattaaatcaaaatgaaaagaaaataataaataattaaagatggcatgacgtatttgacaagatggcttttatcgatccaaatccaatagtatagacaaattctactaatgtatttttctaataaagctcaacgggaatgattattatttatttttaatttaatgtctatttctatcttctataatacgccatacttatatttgactaacatacaaatagaaacgttaattacttttagatactataatactatcaatagcagaaaattcaaaaatatatttatttattattatatatgatcctcttccttacataacttttgtttaacgacacatacgtatgatctttttggttctgttttttttcttatcgaattaagtaattgtatccacatatacaaattacttttgttttgctttgttagacaaaagttctatcaataaaaataaaaacatgcttcattattccttgtaaaatttcctcaactttaattatatatgaacacacacgtattagcctaaggctgttgttgtcgtcacaaccaatatataacttttatagacaaagtttcagtttgctgaaaagaaatccttccaaaaaaaaaaaaatactgcatattccataaagttttaaccgaagaataaaaacctaaaagaaaactaatatgttcatcctccaataagagccccacgttttttttaaatatatatgtgtatacattatttctatgaaaggtacatcttactattatgtgtatatatattatttctgtcctatcctttcttatatcctactggttgtattttaatacaatatctaacattgttgcttctttaagaattatatatggaatactctaagatttcattaaattcatttttacaaatgactcatcatggtacagtagaacctctattcaagaatacacttgggaccaagtaaattatattctaattggaaggttataactaaatagagttacattaaaaaaaaaaaattaaaaaaccaaaaaatatcaatgtaacaataataacaataaataatcattaatactata

SEQ ID NO: 295792 - DNA, 9797 bp, Cannabis indica
attttaaaatattttatttttttattttgaaaacaaaaactaattagaatactattaacgaacgcaccttaaatatttatttatttgattgtagtacctatttctttaaacaaaaatcacaacacacatatctatacacatctctatctattttctctctttttttttcttttgattatatttacttatttcaataaaaatatttaataattataatatttatccacgcttcccacaatattttacaggaattatagtatttttaagttattaaatttataccaaatgaataatttaatataaaatatgtcatcgtgttttgtgagaattgtggaaattatgatttttttcttttttttttaagatttgtaatagaaaataaatatcatactaaaagttagactccacgtagataaaattatcttcatgttctttgattcatgggcttgttataatcaaagacaaaacaacttgagaatcaaactcataaaaaaaaactatagtgtgaaaataacgagggttattataatctccaattattttttattttattttctaatgtaattattttttttaattgataaattgacttaagaagtttataatctgattataacttataaatccaatccatatgaaaatttcatatatttttatggtaagtttattcacaaatatagcattaagaatagcaattaataaatcatacaaacaacttaaatatttttgttcaaaataattttatatccataataatcatagcatatttaaattttattttctagaattttagtttaaatttatatataacaattaagggtaatcagtcaataattacaaaattaaaacaaattgtatggaattgaaaaaaaagagaagaagaaattgtataatcacattaatccacaaaataaactcaagtagttcacgtaataatccttaaaaaaaaattagctactagatgacattccaaaataataataaaaaaaattaactaaagacataaaagatagagttgaagagataaaacactgtttggagtcctccactggtgccttctactcctcgctctccttctacactccgaatttctcttaattttcgaatggtgtcaaagctttgccatcaaccctgattttatgatgcaaaaatccgagttttccaaaaaaaaaaaaaccaaggttgcggccttacaaatgatttccattttcttcgctgattttttacatttttttagttttcagttcttgttgcaacgatcgatagtattttgactattactctctcgatgtaattcaaaattagacgattcaaaatattttgaaaagataaaagagagatataaaacttttatttaaaaagttattcttagaagtgaatgtagtcaaaaatttacttgaagcttcaaactttattttcagtcacaaacggagcatgttccacatccaaaacatagaattttttgatttatttttggaaagtgatcactcttgactgtagatcatgaattttggagctaaatatgcaaaccttgaccaaattgaggcaacaagaaatccaactaagcattattagagttttctttttccttcataatttcttatttttgtctcaaaaaggcttgaagaacactaaaattaccaaaaacgaagatctcgcaccatttgttgtagggaatcgacctcatcggttcactacctaaggggaaaggcgaagttcaatatacagtagtgacggtagattacttcaccaaatgggtcaaagtagagcccttagccactatcacatcaaagaaggttcttgatttcgtggtcaagaacaacatttgtcgttttggactcctacagaagatagtgtcaaacaacgaaaatcagtttgacagcaacctctttactgatttctgcattagacatatatcattaagagtttctcggtggttgcttatccacaagcaaatggacgagtaaaagtagttaaccaaactcttaaggatacattaaagaaacgtctggagcaagcaaaagagaattagcttgaacaactgcccgaagtactatgggtttatggcacaacagaataaacaacaactatattatacgatatgctcaaggtcctatttttactattttaaaaaatataggtccattttgtcatttaacaaaacagatagtccaatcgataacttttataaaatagtatttacccaatttttaaacatttagtctttttgatagtatacatagtcatatacatgaaggtgtaatcggttgactacaatgttttgcttatttgtaattgaagctaaaatcttctgctcaaaagcgaatccttgtcaagcattttatttaagctctgttttttttcataacatttaatactaagcttttcttattaatatcatcaatgtttatacaaaattgaatctcttggaaagagtaaaaacacctggtttggtgtttcttcatctcattttctatagccatgaactagtaatcaaaatcttacttcaaagaaaaataaaagttagtactaaaaatggagattcgtgttcctcaaaatccaacagttataaacagtgttcctacacctgacatatatatacataaacatatttagggagggagagagagatggatcagttggttaattaatggagttccttttctaattgaactgaatccctcgtgtttgttctacacattttgtaggctttttctttttgctccaacaaaatgttaatataataataaataaataaatatacaaaaaaaaatattaataataataataataagctcattaatttcaaggctgagcaattcccttcttgacgagcatatcgtatactttgtcaattctactagggtcaatcttgaaaagctgatgggcatcagattttttagtaatgttgccactgaaaatctcaactgacataacctcttgcatctttagatatataggtggagttaacctcgtctcactacatagccgtttctcctgccattcaaatatatttgtcaataaactacaactcaaatttgaagaacaaattcaatataatatatatatatatttgtgtgacgggggtacttacagcttcagatagcagatctgcaccattaaaacccatgacatccatgtctccaatagaggccatgaaaccacctccttgactgcttggaccaacatgagcaccttcctttgttctaccaccaacatcttcaacttcccttttcctcttttgttcaagatatctattggcctcaactgacgttcgacagccagctgcgcgtgcctcctgcatacatatataaacaacattaagaccctacacgatacaacacaacacagcaacaaataaaaataagtgacttaccttaagttcttgaattcttttaagagttcgatgctctgaaatgacagtccgaagtaattcctcatgttcttccttggaatggaaacgcatgaacacatcatatcgtcgacatattcccttctcttcaggcaataagtcattctcaaaattgttaggatacaacagatttctttctaatatgaaatcctttcgacgcttcctctcatctagcctgccaaaacagggaaagagaaactcaaattttttgaattgtatgtttgtatgaaaagtaaatatcatgcaaaaaattcatctgagttataatatttttgtgctaagcataaagtcccctccatctaactgtgttaacatttctcacgcctaagataaatagacaatttgtaatagcgtagcttgaacactctaattgacacattacacaagtttcagagaaaatgagattcaaatttttgcaacctacctctttgcatatatacgaagcactctcaacttaatttcacgctcttcctcagtatcagcatctttgaattccatgtccgccaataactgctcagcatcattatcatattcaggatcaaactccagtcttttggagttataaccactcatttcaaccaaagacccttcattccccaaaactggcctttttccctttaaaacccctgtctgtatgaggatctgccagcaacataaaaaaacatagtataaatatcaattttatattggtccaaaagaaaggatcatggttatcatcttcacaatacaattccacaagcctgtgtcccgaccaaggtaacgatctcaaaatgttgtgtgaccaaccatttttttccctaaagaaacgagaaccttgttttaattaaggaagaacatacaaggaaaggtgtaaaccacacttggagaaaagacgatagggagaggtattataaagatactccattccctagctaaatctgaaaacatgcttacaagttactataatcatcaaaattcaaaacatgaactcattacttgtgtttaagatcatcagattttttattatccatttaatttagaaattttttgtgggagcgatttatagtataagcatgtgtgtgcatgggggtgttcgctttgcatatttatatttgtgctgagggagtaagaaagatactaaagtaaccaaacatttgtaaacaagtttagaagctttaaatctaaccttcaacttttacaatcggaccatctttaacatgggttgcattaggctttttgttagcagcacctacgtttgccccactagaacgaggcccagaatctgcatttcaatcgccattaacttcaagtctaatatctaatgcttatgcataaactgaaatccaagtaaataaagaattttccaaccagtatttaagctagatagtaaacggctagaggagccagctttgtgtgaatcttctagtctgatcaaaaaaaacaaaattcaaaatgataaaacatcaacttccagtctagtcacttaaagttcatatataataatttcattagagagagtgatagtgttacttgatccttgatggagaaaatggagattcttctttaatatcaagctctgaaatcatgggtaatcctgtgatttgggaaaaaaattgatagaacacataagtcataaataatgtccaagaaaatttaatttaaataaaccatagtcgtgaataaactgccacttattgatcttccaagtcattccaacccgaacatctaacatatacattgtacagagaaactactgacactgactaaataagcagaatatccatgaacctttccttgctttaataagtaaagcctgttgattatgaccttaaatccccaccaccagatctatcatcatatttgcaaatctagtatgataaattctttttaacggtaaaattcataatgaaagaaaacaagaagaaaaagtgcaggaagagaaatttctcacctttcttctcttcactatgccccttagccatggcaagaagttcctttctgttttttccaacaacatgagacatgtccttggatagatacagtcacaaactcaattacttccatcaaaagttgctaataagaaaaataattcataatctaaaaagacgtatcataccggaagaggaaatagtggagagttcatgtatacatctgtatagtgattgatacattgctctttactctttgtccccacatgctcagcaatttcagtccaatttcccaagccatacatttcaattccctagtacatggaaatcaacttaattcaaaatgaatgaaggacacattactcacatgcgcattccattcataccacccctttttttttcaaaatactaaaagtcacaagggaacaaaaaaacaataaaagtacctctagaagcagtatctcatcatctgcattccagtcggggcagataagaggaaaagataaattatcctgttgaatgaaaaatcataaatacatctttcagtttccattgtgaaagaaaggccagaattgatataagggaatgtaaagaagctggtttctggatattctttccatatatggaagagaaacttgttcacataagaggttggagaatatataatagatgttctaaaggaaagtcagagtgaacagttaaccataagcctctcaaattcaaaaatcaataaaataaataaaaaaattccagctgtaaaatattgctgaacaggaaatttttgcctaagataccaccttgctgcttgagaaaatggtgcttctatgaatagcacaaaccataacgctagaagtcaacaaataatcaaaatgaaaaagattcacttaaaaggtattactgaccataaccctgtaagggtgattgcttttatgaggttgcacctcagctccaacagaaaaacactctatgcatagatcaaaatcagcacatgtgcaacacttgattcgaatcttccctgtaatatccttgttgcagtaattgcaatggtataaagctttcccttcactagttccttgacctgactccaaaaaagaaacattaaagttgaaaggaaagtaaaagaagggagaaggaagaaggaagaagtttccaagcgaaatgcagacaaccaacaaccatagtggccatgatgttgatgctcttcaagtgtaaaaccattacaatgacaaggatattttacaagtgtttctattctaacccaacagcacattaataacttgctttaatatgagggaaccgggaataagcaacaggattttcaaaatataaatgaaaagctcagcatattaagttattaacaaaaaagcacaatgcaattatacctttcaatactttattaactaggaaatacaagctagtgtaacggtacctgctgtggtagattctaaattttctccgctggatgcatttttctttctccttgatctggaggaccaaaagtggatattcagattaaacaaagcaagtatgccaataataaaatcaaattggccaaaccatccaaactagataatgacaaatgaatccatgacaggaaacattaggttataacagtaaaagagacaatatcaaacataatgtggtcagaatcatcttaaaccctaactaacagcattagcatatgcacagtacaaagaaatcaatgaaaacatactcacacaactagaaaaaaataacccagaactcttctgtgggaattcaatcaaaatcatgcggaataggaatgcaaagtacacttatctccactaaacacttttcttttatggcctgaaagccaaagatttggacttgaaatttcattatacactacatttctactcctttatgcaacttctcaagtcttcgataatttttcaaaactgaaaattcaactaaagacgaagtgtagaggttcgagaaaaacagcaaacaaataatcccaaaactcaaatttccacaacttcaaaatgggactaaagataataacaattaaaaatttaaaaatataatgataataataaaaagtaacgacctttgagtggggtcctcgtcaggagaatgaaaatttccacgagaacgacccattgttgattttctgaagttgagctcgctcgatagtcagtacccacgagcggagcccctgaataaacccgagaacagaagatattgtggtatattctaccaaagttggagtttgtcaaagtagagaggtacttgctgtgttttctattcaattctgtttcgaggaaggaattaaacccaaattcatgtctgggttaaacagtcatttgttctgggtttttatgggtctctctccaattttgacttaatttcaagattttcgctcccttttgaggattcggatatttcctcaactggtccagccttatttttcttataaatgccattattttttttttttgagatggttaatagtttttcttttttagggtatgagatgattaaatgatatatttatattttaaatgatttagaattttcggaatcgaagtttcgaaaaattaaaaaagaataataaataaaaaaaaaaaatcgaaatcgaagaacaatgttttttttttaattgaagttggaagaacattctttatcattgacaaaatatatattgtaatttacatttgcgaatgcttatttggtcattgttagtaaatagttgtcactgaagtagaaagctaattgattgaataaaacatattatttgataattgatatgttagagtactctggttattctaaaatggaaattgattaaaaattcttaaaactaccaaactaaaaatatattatattagatgttctaaattttttattagtgttttttaaattggtatgattgagtggtaagtcaaatagatgtggttgattctgttcttgctaagactatagagttaaagaggttttgagttggttttaagtgattagttaattgtattaattaccatttcactagaacttcgtgattaaatgttgattatacctattcgattactataattaattttgaatagtttacgtgatgttttttttgaatgatctgagttaataaattttgtatttttttattaaaaataaatattttatttaaatttattatttactgtactaagtatattttatttaagattttaatattttttctgtattatacattaatattacatatttaaaattaataaaaatataataaattattttatatattattttctaactctttttatttttatttaattgttccgtatatttatgtataaatgtaaaaaaaattattttaaaatatataaatgaaaaaattcttataaatatattaaaatttaaaaataagaattttagtgatttatttttaaataaattaatatatacagtgtaatgtaaaatttgaagtaaaatactaaaattatttaaaaaaaaaaaattgtattcattttcaagaatagaaacaaaaattgattcaaaaaaaaaaaaagaaaaaaagtaaaaatacttggcaattatcataggcgatacatcatctattgaggttatataacctgagatacttttcggaattttttttttcctcatttttgttttgaatgttggcaatcgattccaacaactaatataactcctacatcagttattttaataaaaattaattattggtaacagtgaagaaatttgtggcactcattcaaattcaaaatgagtgagaacagtgattatattactcgcttgttgtatacttgatagttgatacaatgttaaaaaaggcatctaaaattttgtgataacatgctcatctcatcgcactgtgttgagtattataagacttgataaactttgaagaacatttcttgaaaattttcctagtgctcatgaaagactaaatgtcttttagaacaaaagctataaaccttgtttaggtttattgtgtgttctttcttttcttctccttgtctcttattatatcttacatcatattgagttgtaatagttcttttatttgtattagggaaattgagtctttagttataacattcatattctatcagtaatgaaatatttccccacaacacataaattacacttaaataatacactgtaaaattgttttaaattagtgagttcttatttaaataaatttaattggttaaatgaaaatatcacattattgattataatatttaagtgtaatttataattggagatattttaagactattcaaatttcatttgttttgtgatttttctttcaagaaaattatatgctatatatggatggtaacttaagcaatgaaacatatttaattcttctttaattctattttgtaaaatgatatcaatataaatatatatatatatatgatattaaatagttatttagagttattttaagcttttcatttattttagtcttttatgttagttgtttatct

SEQ ID NO: 295793 - DNA, 5261 bp, Cannabis indica
attgatattgaactactttagatttgtgtttctatttggttgaatcaaaaacatgattggaaaataaattaacagaaaataaaacaaaaataaaagatttaatttgtaagtgtgtttgactatggatgaatgattaggaatacgaatcttgttattttagttatccaattgttaatgcaatatattagttttctccacttaagtgatgacagattataaaaataatcctaactattctcagatcactaaggtcctaaatcatgtattatctacttgcatctctgaaataaattaacatataatttgcattgattacataatttaaatgtcacacaagctatgtaaatgctctcgttttatatcaaaacttatgtttgttgtattaaagcattcttaatattcacttctcagttttatattaggatcatagatcacattcaagatgactagtctaaaacatgtattaaagcaaataatcaaatcacaataatccagagaagaaaaattaataatcgcattaactaaatttggaaaacatcaactaacattcatcatatccctaaattagaaatttagttcataatattcatgttcacatccataataaaactattaaaaaacagaaattaacataaaagaaataaaaagagaagaaagaaacttattgtggaaaggatcagagttgccactttcgatctagccatcgtccttttctacttctagggttcaatctttgagtgttttccctttccaactcaaagttcctttaaatagagttaattgaaactcaaaatatcacaaaatacgaaattatccttgactcgtacagactccctaaccgcgccaacttcaataagtcgaaattggttgtctctacccaccatctcgtcacggccataagtggccctctcactgcgacaagattgcatggccgcgggctcattcttcctcatcgcgggcaatgaacaaaatgcaaaaatacccattccgtagcattctcgtcgtggccatatgtcaggttgctgcggcgagattgctaaaaaatttgtctttaagcctgatttgtctcgcctcagttcttttttttaaatattgatgcaattgacttgtaaaaaccacgggagcctataaacacaaaaaataagcataattttatcctaaaagcattaaaaatgactaaaacaactctaaatatcaaccagaaacttaggctaaaaatagcctaacaaattcccccaaactaattccttactcgtccttaagtaagactaaaactaaagaccacaaacaaacaaactaacagataactgagcccccaaataattaaattaccactgccacttatgaaacatcattcaataggttaaatcagaattttaattcaaaaactccaacaattaactcggatgcttctttcgagctacaatatataaatataaatttaatatcaatatttgaaaaatatcacaaatattttacatctcatcaattctctaccatccaatgttcaatatgctcgcatgacctatctctctccactaatgttgaccaccctcattctgaatcataagattctttctaggctgtaatgttttggcttaggtaaaaagtagatgaaaagtcatttaggttctattataccataagcacattgtaaaccaataaagcatccatataatttcacaatttctcgtatttacacaagaaaaattattttaatcgattgagaaagtccacttttcgaatccaacaacgctgtttttttttctttctctgtttttgctttcttttttcattagttccacttcttttcagtgagaaattttttttatttttttttcttttcagtgatgttgaaaacactttcacattacacaacttttctcaatctcccacttttcacttgatttccccccataacaatccactcttccaaacgtatttatgcacttatggcataattcaaggttcattgggaatacatgcagtgaatgggaatattataagctctaaagagtggttaaaaattttcaaacaagtttgggctcaaaattgcaataaactaaggatacaacacaagggtcagctcgaaaggctcaattgttccaataaaatttccttaattattccaagttatagatattagggattttgcctcaagaaaatatatcatgaaagttctattacatccaaacaaatagtccacaaactaaagtagaatacaaacaatattctctaatattgacaatttacatcgatacacaatttcaagtaagtaactaaattaatccaaagaatttacgaattaagcacacagtttacatctcaatccatttcacaattaacattggcaactcaattaatcagttatcatcggctcaattatcaatactctaaatacattaaacttaactaaataagaaacataacactaaacaaaaatagaaaaaaaatagtagaaatttttaagttccctcctcaaaactaaaagtatagattgtccccaatgtgtcgtgtaaaataaagaaagaggggcttacctgcaacccccatcaaaaagagttcggtggtggtggtggttggtcataaggatagaatcattgtggatttgccaaataattatggtcctctatccttatattcatccgagtgatcaaagaattcagctgttgaacttgtccttcattaaaaattctcctttgcgccatgtagttctgcataatgagatagttcagttgaacttatatgtacaccatgactgggtcaatagggccagcaatgtggcaactcttcatcatgcacttcttcacactcaggaggatttattgggctccttgttgttgtggtattgggttctgacgaggaggaggttgtccatatggatatggatctttaaatctagatattatccctgcattgattaagcattgtggagggaccttcgagtcatatgaaaattgacaaattccataggcctcacataaattagtaatgatgtcacctaacctaagtcctccaccaaaagctcctcccaccattgtatcaaaacttctccgaataatgtcacccacatttagattgaactccttcataatggcatgtacatatttcaactgatccatctaagaatctgaaaagtgtttacttggcaccaacctgccactcacaaagtagaaccaggcacgagccacttggttcaactcacaccaatacaattgataaggttctccatcatattcataaaacattatgctcgggtacccaattgtttcagccacatcaacatagttaattttttcatcctcttcaataattctcaaatgttgttcctcatatgggaaggtggaaagcgaatacaaagcatgaatcgcccgcgttgtgactagaatatcggttccccttaatttcaccactttattctttctctcaagccaattagcaaaaaattcaagggctaaagtttggttcgccctttccttgacatcaacaaattgctcgcaatctcttctttgaatttggagcccaatagtttcaaacaataggtgattaggcacatgcaaattactatactcaatacccctatcttgggcctcaaggcttacaaacctcgccatatccaatgttggccttcccgaatctcttggagggctggatgatgatgcacccgctgcacttacccttgattgctttagacccattatttaaaactcaagtgcacaccaaaacttccggaaaaactcaacagcacctcccctcaattttctcacttttgggtgacttcccaattaattatcaattagtgtatatccacacaatcaacctcaacaacaaattaatccaaaataaacaccatccacacaccaattcttcaaaaagcaccaaaaatctaatacaatctcacaatctttgaagaataaatatgagaaatacttacattgatgagatacaatttagacaacctctattgttgactattcttgagaatcttgaggttgaagatgatgaatagtgaacttcttatttttgagtaagaatgggtgattttaggaatgatttataagggaaaaagatggattgatgagagaaaagatatttggaagtgaatgggagtgaagatttgaggaaaaatgaagagattgtggtttttgagatgagaatttgaatttttggtgatgaaggtaatgattttgtagagacagttagggctaggtttagaaagtgtttagggttgaataagaggtttaaaagtgttttagcctgagttgggcctttaaatagtcttcatgggctctttcaccgcaatgagcattggcctcgtcgtgaccaaatcacttgaaccaaatttttagggatttttgcccattttttactgcacccataaatcaggcttgtcgcggccaggtttaatttgttgcggccactatacgtggtcccgaaaaaaaatcgacttttaacgctttgcacggtttgaaaattatataaaaattctacaaattcaaagaacagaaattaaaaagctaaaaaggaataaaatttcaaatgtctcaaacttaattaaagtaataaataacttagggtgtctcccaagatcgctgtcgttatcgtcatatagtcggacgttgatcttctcttcatagcggtgccaataggaaggcagacttggcttggtcaatctaactacccaagtaaagctttaatctttcaccaatgactttgaaagtcttcggtttctcgcccttcggttccaccactccatatgggaatactctaaccaccaaaaaaggttcagaccaccttgactttaactttccaagaaatagtttcaacctcgaaataaataataacacttgttgtccaggttagaactcttttttgaccaactttttattgtgccacttctttgtcttctctttgtaaatcttgtctttctcaaaggtctcgttttgaaattcttctaactcattcagttgcagcagtctcttttcacttattgctgccaaatccatgttcatggtcctcatggcccaaaatgccttatgttatagttctactaatagatggcatgcttccctgaacaccaaccaatatggtgacataccaataggtgtttaaaatgcaattatgtaagcccataaagcatcatctagctgttggaagttattttaccaggatcttagatctactcacaagtatgttgatttaaatacctaagtatgaacttctaaaacgatatgaaattaaacacataagagtatcagaaa

SEQ ID NO: 295794 - DNA, 3974 bp, Cannabis indica
taccaaggtactggaatggtgaaaacctaaaaaaatactaccaataagtgcaaaaggtccaagcacacaagttgcaccatgctcgaacaccactcttaagtggtagccttctgagcgggactaactcaaaggtttgaaaaaacaactagtactaaggtcaggtgaccattttcaaagtacatattgttcaaaatcattgctcttgagcaatgtcttttggaaagattatatcgttcaaatgttttatattttaattagctgaagatcaggtagatcatgtaatagcttattataattcaataaatatacattaccacggtaacaacagatatcgactaataagtgaataaagatattaattgttattcaaattgtgtcaatttttttttacctttttttcaattctattaagttatttaattttctgaaatgtgtacaaagggtttgcctaaacttaaaaaccaggcagacaaaataaaacttgtgcaatgcaagtgatcaagagtcaaaagtttgctcggtcacttggggggcaactatacccatacaagaattggtaaaaaacaagctcaataaaaaaatattaaattcagacttacaggtaaatattcatattacgataacaaagaatgataagtttggaataaaaagctacctggcgagctaattgtcttaagcaaaataaaaatattttccaagtttgaaagttgtttggtcggctatattgtaccgaaaaataggcctgtaggccgaacaaataaaaaaagttgagcaattctatgccaaatgactcccaaactttttgtattgatcaagtgaatcttgagcggctatagttgaatcttcggtagcaaggttctcgtgctcttgggcggaagaggagtctttatcagccatcctcgcttcttccttaactttttgtgccttgcaaaagccaagaaagctagtacaaagatctcccttgagatagtcgaagttggcgtttggattctccttccagaactcatagaaaacgtccaatgcgactgtttcatagctctcaacttccttttggagtgcctcttgcccagcaccaaaagttacccgctcaacatcaagggtttactacaaggcatttttctcttcggtcagcttagtaacctcggcttcatggttttggaagagagtataaagactttccttttaatccttcagagcattcacattcttggtcaccaccccaatgtcctcctcgagcttggtcatggacagtatgtccttaatctcttgccttagatcttcaatgagcttgttcatagcaacaatttagttgtttactttgccccattgaaaactcttttgcttggcctctttcttagcatcttccagtgccttcttcagttcactggtagctgttgtggcctttagcacaacaaatttggctcgagaataagtatatgcaaacttcagagtaacttgtacagtaaagtatagttaaagcatgtacaaagcaaaatctttataaagacaatcccatggcaaaacacttacttgggtaacctctttcagaactccaccgactagtagttccgctggcatctcctttgcccccgtgagttgctcatttaccccatgcatcacgcgatcttaataaaaactgagcatttctttccccttcatagtttctggctggagtacggtggagtatccaacggccttggcagcccgggcccctcaatattggcccctttagagttcttggctgaagttttggaagcctgagacttggtattcttcctcactagagagataacttcacgagcagcactaggaatgttcgaggagttagcagccaaactcctctatgtgttgacctaaggagtcttagagcttggggaaatactcttgggtaaagtatcatttacctttggacatttggtctaagatatctgaccagatgcatcgcttgacctcttctttagaacacgtagcattctcttcaacatgactgcataaaaagaaaagcatctgttaaaaacataatcaaacaaagacaaatatgttaaaaagtgaaaaataaacaaccctacactgaacgggagcaccctcgcgaacaagtaatgaaggggcattctcatcaaaagagtcctcctcttcatcctcgaccaccacaacctttccctttcttaccgcatggacggaaggacgagcaacctcctcaagatcgtccctaatccttatgggtcgctcaattggtacttgatcaccatggggagccttcttcttcctcctcttcttcagagccttttgcacggttgtaacctcctcagtcacctgtttgggctcctgaacttcatcagatgggtaaagcccgtacttgatgaagttagcctcagtggctaagagggaaatatttcgagtcgactctacaagttggagtatttcttgggctcttatcctaagctccaaggtaaaaggagaacagcaataagatggaatatactaaaaagtgataatggttggtacccatgtccttgacaaagtattaatcctctaaaacccaccaatcttggacacatatgtgcctgtggtaccggtcatccacttacactcattctaggaaaagtagaaatacccaaacctattctattttgggctagatttcaaatcaaacagccaattagtgtcgtgggcgatggctgaccccatccttgggtagcatacaacacgaacagtgcaccaaggtactttatgcccttaggagtgagcttggtcagacatatgtgatgataattggatatttcgttaaaatagggatgtaaaggcagcattgcaccctatttggcatgtggccctggccatgcacaaaatctgcctccaggatttgttgccagctatccgggactagggaggaatgcctccaccttcacaaggagacattcttcataaatattagttaatctcttaaaagttagcacaaatggttgtgagacccatcgagcacccctcaaacctcgattgttgaaaggtcgagcctcggtgtattcctcctcaatgtaatcttggcctaccaccaagacatcttcctccttcgagataggcttttcagcctcattatagccaccaaaaggaagtacttgagctttctcctcttcatcttcttcctctctgtcaactttagaagggctagcagggcagacctcaccgctggtcctcaatctcttggactttgatgtcccctctagcaactacttcatctgcgcttggtggcttggcttgctccaccccagctgctgtaaatagctgggcaaggtgaggatcaatttttatggccttcctcatagtctgattggtctatgccatcattctatgtttatacagttgctttgtttcacatgtatgcttcataacaatgatagcgataacggctatgatagtactcctggcagatggggttggccaaccctctggaagtgtgtctacaacaccaggtcggaccctatacatcgaggtattggtggtgctacaccacgggctccggggtttgtatgatcactgctcactctgaatcctcaaaactagaatttgaaagattgtcacgcgatgaaggtgaatttgcaccgagttgagggtgatcttcttataagagctgaagtagatcctcgttaatatggtgtttgcctccccagaactcatcaggattcatctacaaaaatatgagggacaaggagagagagttggatgggggaaaggagaaaaacatgtttaatatgcagaccaagctgattcaagataaaaagaaggagtttcattctggaatggatttacgaaactcaaaagtttaaaatctcgaagaatatctagaaatttttagaaacccataaatgggtgaatgtgaacattttcaggccaaaagtaatacgaaattagagaatcaagaggtttaagcgtatgttagtcaaaattaaaagccctaattgttgggttttgtgccc

SEQ ID NO: 295795 - DNA, 3455 bp, Cannabis indica
taacatcccccctcaagttgcactcatttactttgagtgttaacttgtccctgagatagttgaattgaggattgtgtagaggttttgtaagaatatcagcaacttggtatgtagagtccacatagcgaacctcaagtttgttttcaagaactctgtttcgaacaaaatgcacatcaatttcgatgtgttttgttcttgcatggtagacggggttggaggctaaagagccagcacctaaattgtcgcaccacagaattggagtagatactgtgggaatggaaagttcagtgagaattgattcgagccaaaccatttctgcagaggcaagtgccagagcacgatactcggactctgtactagatcgagctatgacactttgcttcttagaacaccaactaacaagattgttccctaagtacatgcaataaccggaggttgattttctgtcatcactgcaaccagcccaatcagcgtctgaatatccttggagactgaagtttgtggaagcagtaaaggagagaccaagatttggtgtgcctgctagatatcgtaatatgcgtttacatgccccccagtgctcagttgtgggtgctttgaggtactgacttagtttgttaactgcaaacgctatgtctggccgtgtcattagtagatactgcagtgcccctattacactacggtattgggaaggatcttcaagaggagtccctgagttgagacttaatttggcagtggcacacataggagttggttgaggattggacccaagcatgtttgttttcaccaaaagatctttggtgtatttgctttgattgagataaatggttgttgaatctcgcaagacctcaaagccgagaaaataatgaacagaaccaagtactttcaaagcaaatcgttgatgaagtgctgttataacgctttgaatttgttcttgattatcccctatgattagaatgtcgtccacgtacacgaggagcattaacagttggccatttttcttggtgaagaacaagcttgtgtcagctacagagttgacaaatccccactgcagcaaggtagttttgagtgtatcgaaccatgcccttggtgcctgtcgaagaccatagattgctttggttagcttgcatacatgattggggtgttcagagtcaacaaacccttgtggctgatgcatgaaaacatcttccttgagctctccatttagaaaggcattgttaatgtctatttgctgaatgtcccagcctttggttgcagcaagagagaaaatgatcctgattgtgcacggctttacgacagggctgaaagtctctaagaagtcaaggcctggtgtttgttgaaaacccctagctacaagccgagccttgtacctgttcacagtgttatctgcattgtatttcactctaaacaaccacttgttagtaatgattttcatatcaggtgtaggtggaacaaggatccatgttttcttggttttaagggcatgaaactcatggttcatggccttgttccattgcttgtgagcaagggcctgttttacagatgttggttctaattcatttccaatatgagtgagaaatgtccgaggtttgaagactccagcttttgatctagtgatcatagtatgtttgttggtaacttgggttggtacaggttctgtgtgagtgaaattggaactggattgggagttttctgtgggcagagggtaaggaagaggggatccagtgtgtggggtatgagttgaactcgattgactgatgtttgggctgggaacaggagtagattgtgaagcaggagagacactcgaacctgatgtggctagagtaggagattgatgtctggtgtgtatagggaatgcaaactgaccagtgttggtacttggtatagtaaaagtattaggatttacgattgcaggtggaggagtttgatgagatttctgtgggaacagatcgttatagggaaactcagcctcattgaagtttacacttcgagcaacatagacacgaccattaggatgtaagcaacgatatcctttttgtgcgttattataccccagaaacagacatttggcagatcgaaaagcaaccttgtgagtgttgtatggtgtaagaagagggaaacatgagcaaccaaagactttaagaaggttgtaatcgggtttgtggttgtacagcttttcatagggggatacatttccaagaattgggatgggaagtcggttgattagatatgcagctgaagcataagcttcccaccaaaaatgtaatggcatttgagcctgagccaaaagtgtaaggcccatatcaacaacatgtcgatgtttcctttcgactcgaccctgttgttgatgtgtgtgagcacaagactgtctaatattgataccaagttcatgaaaatgtttatacaggggtgaatattctttaccgaggtcggtttgcacactcttaatcttggtttcaaacattctttcaacaaggtttttgaaatgggtaaatagaacagtaacttcagcttttgattgcatgggatatatccaaacaaaccttgtgaaatcatcaacacaactgagatagtatttgtaaccatctctagatgtgtagaatgaggggccccaaacatcagtatgtattatttcaaagggagatactgttttattagaagtagtcttgaaactaaattgatgcatcttgccaagttggcatgcatcacaaaaattgacatctttacatttagtttgaggactgacttgagctaaaacttgactaagaattggcttggctgggtgtcccagcctacagtgccatatagaacttattctactcttatcaaaaacaggatttgaagaggtggtacagttgaaaactgaagtgttgtgttgtgcagcagaattgcttgactgggttggattctggacagcaacagaatgggtgggaacttcaagtttgtagaggccattactgagggaacccttgagaagaacttgcttcgttctcttgtcctttataaggcaacacacagagtcaaattgaaggacaacattgttgtctgttgtgaattgagatatgcttaagagatttttggttatactcgggacatgaaggatatctttaagcagtaaagattgattaggactatatgtggaaatgcaattagaaccaacatgtaaaatagggatagaggctccattacctacaatgactttggccttgcctttgtaatcagcactgttagtgagttgttgagcatctgctgtcaagtgattggttgctcccgtgtctaagtaccatgtgcctggggattcttcagtaatggccgattcagagatatgagcttgaggatggtcagttgtggaggtggaagtttgacctgaattggattgattgccggtaaacgttatatcgaatcgatggtagcacttctgaacggtgtgaccaggacggccacacagctggcaaatc

SEQ ID NO: 295796 - DNA, 4031 bp, Cannabis indica
tctatatacccacttgcaaccaattagtgtcacaccatcagggtgtagaacaagtgtccaagttttgtctcttatcaaagcttttatttttgttcccatcgtagcaaaccatttgctgtcaaggagaaaagttttgatggatgtaggatatacaagaatgccatgagaacttttggcttggtaatgcctgacttggacctggttcgcatgggatgagagttggagttagcttttgggggaacaatagaactgttatcctaagagtttgtgttaattgttggtaattgtgtttgtgggtcaggttgaggtacaagttgtaatgtttgagtattttaagatggagtagggatggtaggagcaaacataggtgatttaatgggtggttgtggtatagacgaggtggggggcaaggcttctgtggtgacagctacttgtggttcagctatgaaactagtaactggaatcacaggatgaacctgcataggttgtgaccaggtgtttgaaacaaaaggagctaggacaaattggtttgtgtgagacatgttggttatgttggtaggcacaagtgtgtgagctaatgtaatactagatccaggttgagccaaaaaggtagcttaactgacgggaaatccattctcatcaaagagaacatccctcaaaatgtaaagcttgccatctttggataagcatttgtatcctttatgtgatatgctataaccaagaaagacacatgatatagatctatattggagtttaacacgattataggatctaagatttggatagcataagcaaccaaagaccctaagagtagaataatcatgttgtgtgttaaataaaatcttaagaggagacttgaaatgtaattatggagtaggcattctatttattcgaaagacagcagccatataggcttcaccccaatacttaagtggaaaataagcatgagctagaagagttaaaccacttttaacaatgtgcctatgtttcctctcaaccactctattttgttcattggtgtgaggacatgagactctatgaactataccatgttcttgtaaaagattggtgaaagcttggtattctcaatcaaattggattagtgtaattttgaaaccaaactgaagctcaacctatgttttgaaggtaataaaggttggtaagcctcacacttggttctaagcatgtagatccaagggtgccttaagaaggcatcaacataggttaacattggtcaagtatgccatcatccttagtcatttttcttgatattctcccatcacttggaaaaccaccaactgcgagtcgctgaaaatccacagccgtgtgacctttaattccttagcaagtctcaattaggctaacattgcttcatactctgcctcattgttggaggccttaaagccaaacctttttgcacaatgcattttggtttctctaggggctgtcattacaaccccatcccctggtccagtgtcattcgaggctccatctacatgcaactttcaaatggactctccttctccattctcttctaactctttgttagcttctcgctcttggtctcccccgtctggacaataggtgaactctaccatgaaatctaccatcatttgtccattgatcgacactcttggggtgtaagatatgttgaattgacttagctttatcgaccatttgagtaggcatcctgaggttttgggtttgtgtagcacttgcctcaaagggtggttggttaacaccatgattgcatgtgtgtgatagtattgcttaaacttctgcgatgctacaatgagactgtaagacaacttatcaatctctaagtaacaagtcttatcatccacaaaatgctgactaatgtagtatataggctgttgctgctttccttcccctcttacaagggcagtgctgatcagggcatgtttagagactcccagatatatgctccttcaagcttgtgaggccctcttgcaattctcgtcccaaacaaatttcttacttcctttgagggtgtcaaagaatgggagacatttgtcagtggacctcaaaataaaccaatttagagcggctactctcccagttaggcattgcacctccctcatgttctttggtgactccatgtgtattaatgctgtgtattaatgcttttatttttttgggttttacttctatgcccctctcgttgaccacgaatcccaagaacattttgaaggacacaccaaatacacaattcaacggattcaacttcatctgatatttgtagagggtagtgaacattttgtccatatacttgactatatcccctgctctcatggtcttaaccaacacgtcattgacatatacctccatgttacgaccaatttggttaccaaacatcttgttgacaagtcattggtatgttgccctagcatttttgagtccaaaaggcatgacccggtgtaatataagcctcaatctgatatgaataaagtgtgctcctcatatgcaggattcatgggtatttggttgtaccctgagtatgcatccataaagcaaagcaattcgtgcccctctgttgcatccactagctgatctatccatggcagtggtaagctatctttttggtaagccttgttcaaatgagtgaagtcaatgcacactctccacttcccatttggtttgggaaccaaaacaaggtttgatacccacacacaataatatgcttctcagatgaatttgatgatgtcaagttggtcaaattcaaccttcaaagccttgtacttctcgaaatttagagccctccacttctaccttactggctttgcgtttggatctatgttgagatggtggcacattatggttggccctattccttccatgtcttcatgcgccaagcgaacacgtctggattattttccaaaaacttccttaattttctgttaagggtttcgaggagcccttttctgattttgaggaccttgagcgagctttccaagattactatttcttccaactcttctactttccctactcgcacttactcacaaactcgagggtctagttttgatgaaacttcatccccttagctgggccccctatggaccatcatcgtcattggtcctcaaggcttagaggcgattctaaacgattctgttctcctttcaaagtggtgactcccctggggttaggaatttcatagccagatggtacatcgagatgattgtcttcaaccagttgtgcgatggtcttcttagcacagcattgtaggtcgttggacaatccactaccaggatggtggtcatcactatggaatgtaggggtctccccccactgttagtgctagctctatcgtcccccgtggttgaatcaagtctccggtggactcatatatcggtgatgcatagggtttgagatcccccaaggcagtgaagaataggatatctaaacttccattatcaaccaatgtctggtgtaccctggtgttagccatatgaattgtaagcactagtggatcattgtgtgggaaatgtactcctctcgtgtcttcctctataaaggtgaccgagatgttttcccctccaaagttctttggaggtcttcactcaaagctcgaggagtaaggttctagccttgccccttgggtgtacttgtctctccctcttcgagttttgcctcctacgcaaggccctcctatgaaagttttgatgtcttccaccaatttagggacttctctgggcattctctattggtgctcctcatccatttgtgccctgttaatgctcgcacctcctctcctgacgacatatggtgataggtcttgctctggtatgatcaaccgatcttcctcaaggtgagttcttgtgtactaacaacgaaaagagcgtctagtcattttgtagtgattgtgtgcaaaagaatgacctggcttgagcttgttgttcccacagacagtgccaaactattgatgatgagaactcgtcaaataatctagtggtttaaaaaatacaaagcaacccagaaattaaatgatgataatgttggaaatattttac

SEQ ID NO: 295797 - DNA, 4683 bp, Cannabis indica
ttacatttaaattgtattaaatttaaatttttttattattattatttaaattaataattaagtaatagcaactctaatataactcttaacaaatataaaaaaaataacatgcactttgggtgcggttaactataaaattttaaacttgtatatataaatcttatcaaattttaatgttaatatattttacataatttggttttttagataatatcgaaaactattctaccgaaattttcatttttttataataaagcaactttattgaaagcaaactaagctagaatagtgaccacaaagggggccacttcccttaaactgccacggaacctggtctctacaactcgagcctagtgggcgagtaaatcagctgcaatattcacagaacgagtgataaaaacaacaccacaaacttaaattccttacacagattaaaacactcaacaaacacagggtaagaccccatccaaaagccaaggaaccaagatgaagacccttaactgccacttcagaatcttattcaatgatgacattaaggaagttgagagccttagtagattgcagggcaagtagaatggctcttattttagcttctaagacattgcaaacagaagagaagtccacagtcatggccatctagcataacaaatgtataagaagataacatgcagaacaacaataaagtaataattgaaaatttaggatggtgtacttaccctggccccttgctgtttggcttcataagtcaaggcaacaagatcaaagctgctgcaaacgacccacttctcagccattgagtcacataaactatcccctttcggatcgataagtatagcggcgaatggcaccaagtcactcctaaccctcaatactaattgtttgttgagctcctcacaatataacataggttcaaaaccctttaagcaagccccattggcaattttagcttgcttctgagacttgatgagggaggtcctcctctaggccaatgctagttctttctcttggcatcatttcaagtagcactcaacctcctacacattttctaagatgtctgcacttatggctttaagcttcaagggaaaactgaagcttaaggttggaatgttaggaagggaagtgtaaaggattggcttttgtactttggtgttgtgagtctacttctttggctatgatggtggggtatttgattgttggtcgtttggttgctattgttgttattaagtttgaaacggctgtatttggagttgtggtggttagtttggttggtggttgagttggttgttattgatgttgtttcgattcattttaggtcaaggcctctccctgccttaagtctccatcccctccgagagagtgttgcctccaccctagcctcttaggctttccttttgtgactagaggtggtgaagcgtttggaggcaataccttcttggggcacacatagccttccctactttcttcagatgggatagtggcccccatgccactttggtcgagtgagggagtggtgttcccaaaaggagcatgcataaggtttagctcaaactgttgcagatgcataacctctaggaccactccactgcgagaaagtacctgactttggaatgcctcccggagaaccttctctacgttgactaaagtttgtttagacagtggagtcccttgggtgctgaaagatgaatgggaactatgcaaccttggcttacgggttcttttctccatgctcttggatttaccttttcctttgtcccccactgcctgagatacaatacgattgataaagcctactattgattgcaacattttagactctagcatttttgcaaaaccaagaaaacataacacgattatgaaacaacaattaagcaatgcatccaagcaaacacaagtagacaatcgacaaagactaagacttgagcgtgagtgagaccattaagtgagctactgtatggctctccctgagcaaataaagctatgttttccaagttcataaagctgccatactctctgaagttttgggaaagacatggacaggaaaggatctaccatgaccacatcaggaggtgatacatgactactctgacccctaaggacttcatctattctatggacgctggagacatgaaacaaatggaagggcctttttaggtgctagccccaagagcacccttatccagatatgtcacaacaaacctctctgcaagctcttcctctttggtcagggggtttggatgatagagttcccagtatgtcatcagatgcttattttcttttaaggccccctacatgatctgcacaacctcaacaacaattttctccttagccttcatgagaaaatttccaatgcccctattgttgatattgtcaacactttgaaacccaactataagcccgtactcgcagagcagctttatggtaacaaacttgctcacatccatagtactttccaagattgaggtgtaaaaggctagtcttgcctttagatcctcgttcattggagtccgaggcatgagcgttgtcataggcaaaagaattccatcagttgtaagttctcaattaaaaaaaaaaagcaaaggaaaacagaggaaaagattcttaccaggaattttgaagtccaaagaaaggtttagaacctccttacagggaaccatgtggagaaaaaccagtattccttgatgttcgaagaacacagcgtgaagctagtagggcaatgcatatcctcttatttttccagttagtaaaaactaatcttttcattgtttttacgcatgggataaggtttgaaggcgtatcagtgtaaaatctcttccagagtcgggggttccatttttcccatcttaaaaatcacatattacccagatagtagcttgtaagatggcgggatctgctgaaaaatgtgcaatcctaacttttgtgtagaattttacaaaatatgttctcggggcaagtgttccccattagataaatgggtctagctctaagcgttgagcccagccttgctctgggaggtagactcatttgtagttgataactggttccacactagcccgaggatattgcagactcctccctcagtggatatgttttccatcatactataactcctaaactagttaatgttttggtccatctcccaaatagagttgttgtaaacatggggagataaggatgaggccttttccttgcatttacctttccttgatgctttgaattttcctatttttacttttggaacagcttcaagaacaggattctcaagggcaggggcctgagggggcacctctacggtgcctcgacccctgcctcctccatgttcacaacctcgagttgaattctttgttgaggtcggtcactaaaaaagaaaagaaaaaggagagcccaagcaattaaatacccaatatcctaaggacatacgggtattggggagggcctccctaaattttcttggagaggtccccaccgaaaccatcactcaaaaaatgtcattctcacggaacaatgcctcaaagcagtaggtcgggatcccacaagaaactcaatgaaaatgcaaaacccagaaattaatcccatttagagccctaacagctccaaatgggtagacaaaggaaaaattgacctagaatttcctaagaatcacccctgccaagttttaatttttacacccacttcccagacaaatgcacacacacttatgactcaacattctcgaccataattagttcaattccatacaacatcctaaatattctttcaaaagcaatcacatgcaagatagatccaagacacaacttgaataaacgacttctatcctagcatagaatcaaaaatatcaacaagtcctggaaaacttgcttgtgatgtgattcgaataaggggaatggttaatgaaagtgattagagaacttcttgcctagttgataactcaatcaaaacccacttgaacatcgaattcttcatttgactgggggtggtttgtgttaaggtcaagggttggtgcgtcagggaaacggcatgtttaaacttgtaagaggcaatttataagaaggttaaagctctcattcattcactggtgagaatatgggataaaagcttgggatcttttagtctggattataagaaaaaatctttggttcaagtttttgaaaacaaaggaagttttaagactacaaaatggtgaaaaatgaagacgagtggctttacatctatttatagccaaggccaaattaagtaaattgaaattgatggcctagatcatctcctcaaaaagcacaaggcgatctaatggctagggagtgaaaaagatggcatttaatgtcccacagctaaaatcaaaacatttaattttcatcattacatacctcgagccagatgtgcattaaagagttttcacgtcataactctactgtcagttgaatttccccataaaaagtgcacttcttgcaggcgtgtgttatccacaggatcattaaacatacgaaaagtgtgccttgccagttgttcccaacagaagaatttttaaccttacgattattgcaggccaggtaggaaagatgctctcgcgttctcaaaactcacctacgtgtcacaggtatactttaactatctagaaggagactgtaagcttttgtcactcaagagtcgtagaatcttggggcctaaatgttatccatatatcaagat

SEQ ID NO: 295798 - DNA, 1782 bp, Cannabis indica
tgacaaattacacctatcaatgataggactgaacatttttatcgggtttgacccagactcgaccaaccctcagactcaacccgaccaatccaaaaatttaaagaaacttgttcaatttgggcaagtcgggttcaacccaatatacctttcgagcaggtgttgggtttgattttttaaatgatcgaatttcgagttggactcggacctacgcaggttttttttactcttcgaccaaaaaaacccttttaacaaaaagtccccaaatttatgttttttaaaataccatattttgtattttaactattatttattaaaaaaaaaatacccaatttaattttttataatactaaatttaatattttattaaaataaaagactcaattatattttcaaaatttatattttaaattttgaccactatataaaaaaagctcaattaattttttataattttatttatttatttatttgaagcaattatactaatataatttttttaaaaaaataattacttaaaataaaaaggttgggataatgaatttgggttttgaacccgacgtgaatcgaacacgcaaccttctgatctggagtcagacgcgctaccattgcgccacggatccctttttgaaacaacaaccctttttaaatcatatcatattccaattccataaaacaaaccacactttcttctcttatctcataaaaaaaactctaatccaaatctcaaccaatcacaaccctccacatcaccaacccaaaatccactcacatcctcacaatctcatataaacaaaaaaataaaaatccactctttacattatcacacaaattaaaaatccaatctttactcatcttcaacaatggcagtctcatcatcatcatcattctcagccatttcaccggcaaccctccaaagggctaacccaacccaactgatatcaccaaccaccatctcattccaaggcctcagagctctcccaaagctcaaacccatcatggccaacacaagaacaagaccaagtggtttgaggttgaccaccataaaatctgaggttcttaacccatctgtggttataagtttaagcacaggtttatctctgttcttgggtagatttgtgttcttcaattttcagagagagaatgtggctaaacaaggtttgccggagcagaatggagtgacccattttgaggctggtgatgttagggcaaaagagtatgtgagtttgcttaagtcaaatgatcctgttgggtttaatattgttgatgttttggcttggggttctattggtcatattgttgcttattatatcttggctacttctagcaatggatatgatcctaagttcttttaatttaatgtttaagaaacaaaaaaacattctagtatgaatcgaactagtttgagttcgagtacttgtaattgctgttgttgttggatgtgttttaattgattaattatccttattgtgtttttgtaatttgtttgtaatgtatagtttgatggaattttaattacttattattattattggccctttgtgcttcttttattttgtttataattcattcatattaattattggtgagacaagaataaatttttgttaaattagtccaatggtaatttaaattaattattcaatttttttagactatataattacatggtataatgatatgaggatggtatataattactaaaaaaatttatttaaatattaattttaaaaaatatatggctaattagcatttttgccccttaaattttaacatataccaaat

SEQ ID NO: 295799 - DNA, 7182 bp, Cannabis indica
tttttttttttttagttattttcgatctaaaccctccactcgtgcaatcaaacgaaaccctaggtcttgtccgggtctctcacggtaaaaaaattgggaatagaaattaacgaaaatcaattttgaaattcgaataatcgaattagggtttcaaatcaggaggtccagattcatatcctaattcatgcccactatacgtgatctttacgattcgcttgaggagtcgatgggctctgtcatttttgctgaggtacgagtttgattagtctatgcttttaaagaatttatttttgtttattgaatttgtgcgggaatgatctgaatgagtgggggtaaagggcgtgatccacagcttcgttgttttttttttccttggatttatttgtttatttatttttggtgatttttaattttatagtatgaatttggtggtacagatctgaaaatgtgcagaggcttgtacgatggaatgtgaaaatttctgggctttgattcggggttttggattgaggggttgttgatggaaagtagaatagaaacctcacatggcaccgatgtccccaaaaaatcgagatctttggatcttaagagtttgtatagagctagagcttcgaaagaagttgaaaacaagaaattgaagagaaaggtagctggaaatgaggttgatgagaatagggacaagaagaagaaaaatagtaaaaaagaggtgtctctcagtagtttgaagagtattagcagtaatggcaagaggttagatagtgttattcatagcaggttgagctctgacttgcatgattcgaagaacttgaagttggagagaggtcagaacttgaacggtagtattggctttaatagcatttcatctcttggtaatggcattcaagtccctaggcgcaaacggggttttgtggggcggaagaaatttgaaggtggtcaggagtcgaagcgagaaggccagtctgctagtaaagtggaccttgttgttcagaagagtaattcaagtggggaggattctggaagtcaggctgagtcctggaagaaggtcaaacggaaaattggttttgatgagttcaaggaaaaccgaagtagcgagtcgaactcaactaggcatgtagaggaagtagatgagcgtgtgagtcattctgttgtaaataatggcgatttgtctctaaaaaaatcacagaggaaacgacgtggaaataaaaaatttgtaccagacagtgaagatgttgtgaagaaagcagaacccttgagtgacaaaccttctacgacacacaatactacccgagaagatgaggagaatcttgaagaaaatgcagcaatgatgctttcttcacggtttgatccaaactgcactgggttttcatcaagcaacaaggcaactgcactggcatctgtggatgagttgtcatttctgttatcttccgatcatgattatgttagaagtagatctaagtctctgtctggctctgaatctccatcaaatgatactgctggcagagtattgaggccaaggaaacagcacaaagagaaaggaaattcaagaaaaagacgacatttttatgaattttttttcagggacttggatgcttattgggtattgaaccggagaatcaaggttttttggcctttggaccagagttggtattacggtcttgtaaatgactacgacgaagaaaggaaacttcatcatgttaaatatgatgaccgtgatgaggaatggattaaccttcaaaacgagagattcaaactcttgctacttcctagtgaagttcctggtaaggttcagcgaggaaaatcatcgggcaaagataaaagttctgatcagaaaaaaagaagcttgaagcccaaaaaagataaggggaagagggatttacccacgcaagatgatagctgtataggcagtagttatatggactcggagcccattatttcttggctggctcgatccacacggcgggtgaaatctccttttcgtgcttttaagaaacagaagacatctgattcatcaactatgaagccactgctggctcgattgtctaaagattctgtctctattcatggttctgtaggaagtggtaatatgagaagggataaaagaaatttgcctagatgttcaaagttaaccaatggatatgctggtgatgcagtgggggattctgcctcagaaagcattacttgccccaaagacagcaaaatgcctattgtttattttaggaggcgttttcgcaagactggtgtagaactatcccgcagatgtgagaagaatcatttctgtagaagtgcatttgttcctgttagtccctctgctccctttgttgatgaaattggggattttgaaaagcaggatgtatttgttggaagattggaccaaggtgggccattgtggtctgctgacgaggctggtgtgcttaaattattgcttccagagattgagttagggaagttcaagttcgatatagactttccattggtacatattttgtatcactccttaggagtggataacttttggttgtttaatgctacaatgctgcttcattatggtgcagtggtgatcacatggccacaggttcatttggagatgctttttgtagacaatgtagttggattaaggtatctattgtttaaaggctgtttaaagcaagctttggcctttgtttttctggtattgggtacatttcgccaacctaccgaacacgagaaatttgctgagttgcaattgccagtaacaacaatcaggttcaagctaacatgttgtcagcgtcttcaaaagcagcttgtgttcgcattttacaactatgttgagttggaaaattcaaagtggacgtttctggactggaaactcaagaggcattgtttactcaataagcaactacctcggtccgaatgcacttacactaatattcagatgcttcagagtagagcaaaccattcttctcattctcaagtatggaggcagcctactttaaccaaggtaaggtatcttctgataggtttcaatcttaatataaacttaggaggtggtaatagggttttgtattttcaagtctcttctgtagttgttttacctttatctgattaacatatttgcagttggatagtactacaatcatttttttatacaaggaagttaacatttatttgatgtggtcttgtagtttgttattgtaaattatatatgtaagtgacattgacttttgtaaattttgtaactgattagggcacacagaagaggtgtaggcagggaataagtttcatgggtccctccagggagtctgcttttatgaacatccgtcctaattctgatgagatgtacaaaaagcttcctcctcttgctctttcttttaccgctgcccctaccttctttcttagtttgcatcgcacgctgcttattgagcattctctggcttggttgagcttccaggagcatgattcagtagaacatctagaaaattctggaagcatgttgatggatgacagctctagtatggaggaatgctcaaataaaggttcagaattcactcttgaggataatatgaataatctttcgacggaggctgcttctgatggttgcttctcctctgctaggcaggagttaagcaccggtccttcagtttgtagtaatggaggtaggttaaaatcctcccagctttaccacaatgacgatgatagtgtggctgggactgtggcaaccattcagccacatgcatggcaaaaccgccatccagtgccagaccagtgtgctctatcttcaaggactacagttggcaaagatacgtctgagattgggtgtcattcttttttgaatggtctcagtgttgaaatcccaccatttaaccggttggagaagtctcatattggggagttacatggtgctcagcagtcttcagagcttccttggagtgcaaatggtagcatctttcccagccctaaccccactgctcctagaagcacgtggcatcgaaataagcacaatgcatcatttggatatccctcacatggctggtctgacgggaaggcaggcgcagtctataatggttttagcaatggacctaggaagccacgaacccaggtgtcatattcattgccgtttggaggttctgaattcagtccaaagcaaaaaagtatacaaaaaaatcttccctctaaacgaattaggaaagctaatgataagaggtcaacagatgtttccaaaggatcacagagaaatttggagttgttatcttgtgatgtaaatattttaattactgttggtgacagaggttggagggaatctggggcactggttgtgctggagcttttaaatcataatgagtggaagcttgctgttaaggtgtcaggtataacaaagtactcctacaaggcacatcagtttttgcagcctgggtcaacaaaccgttacacacatgctatgatgtggaagggaggaaaggactggactttggagtttcaggatagaagccaatgggctcttttcaaagagatgcacgaagaatgttacaatcggaacattcgagctgcttcgatgaaaaacattcctattcctggtgttcatttgattgaggaaggagacgaaaatggaacagaaatagcatttcctcgcaattctaaatactttagacaggttgaaacagatgttgagatggctttgaatccatctcgtgttttatatgacatggatagtgatgatgagcagtggattctgaacacacgaaaaaattcttcagaatttgatgacgacagttcaggaaagatatctgaagagatgtttgagaaaattatggacatgtttgagaaggctgcatattctcaacagcgggacctgttgacatcagatgaaatagaagagctcactgctggagttgggcccatggatgtaattaaagtcatttacgagcattggcagctgaaaaggaagaagaatggaatgcctttaattaggcatcttcaggtactttttcatctatactgtcatcactttcaaggagtcataaactaataaatgtgcatgaatattctctgaagcttgaaaagtatgcgtatttataattgaatggtttattttgatgaaaaaacattgatggtttatgtggttggctgttggattggagtactttaaacagtgagtactggcaattaagaagtaaagtaaaaagtataaagttctcaacaatgatcagttctatagcttgtagttccaactcttatttaaacttactgttgactctgtttatggatgcttttcctttgttaatgtacttgtcttgttattcagccgcccttgtgggaaaggtaccaacaagaagtgagagaatgggaattagcaatgaccaaacttcatagcagctatccaaatggatgccaggagagatttgaactaattgagaagccacccatgtttgctttctgtatgaaaccacggggtttggaagttccagataagggatcaaaacaaaggtcacacaagaagctctcagttgccgggcaaagcaatgccacatttgatcaggatggttaccatgcctttggtaagccccttatcctctgtgtatcacattactattcaaatttattctcggtttgcttgcattgcattactcttacattctatgcttctgcaggaaggagattgaatgaattttcttttggggatgagaagtttgtatatccaggccataattatgactctttagatgattccccattgcctcagatgtcatctcctaggatttttttttgccacgggatgcagttagcatgtcaatgagtaacattgggcttgacagaaatcattttcatagatttcacaagagaaggtcaaagaagttcaggaatatagtttcgcctaacgacagccaggcgatggctttatatgatcgtagaatgttagaaaaaagacatgagcatcatcagtggaatattggttcttctgagtggcagagtccacagcatttccacctagagagatctcagaggcatatcattgagaaatttgatggtccagatcttgatgagttcaggttgcgtgatgcttcttgcgctgctgaacatgctattaacattgcgaagcttaagagagaaagagctcagagaatggtttacagagcagatgtagcaattcacaaggctgtggctgctcttatgactgctgaagcgatggaagaatgttctgagaactcagacgacgatgggtagtaccgaagtattggagagagaatttcccaatttcactaacatgctgttctgcagcttgggagacttcctaatatgtgtaaattcgtcataggcattgttttctcactggaaaagaaagccaggttttacttcgtcaacaatggtgagacttttcgtcattgtcagtaggacttcgccacaagcatctaacatgagagctattcgtcgtccttggtgagaacgaaggagaaacttggacgcagccagcaacttaccctgttcctgtgagccctttttgccaacttgagcacatcccttggttcagtacaaattgttgaactgaaactgcggggctaagggaaatttgtgagatattggttaagcatcatcactttgtacagaaattctttttaccttttttgttcactaccccatttagcctcatcattttcatttgtccccctcacctcttttttttttttggttatttcaagtgttcgatatcaaagcagtagttgtcgaaaataatacaacacaccacttgaatatggattaatactatctactactttagcgttaatgggaatatatatatacacatacacataaacgcacgaaaataaatgttgaagactttttatatcgctattgcattagacactttctaatgctttctgtctatttctagtaagggtggtaaaacatgtcactaatgctaatgctttctgtcaatttctagtaagggtggtaaaacatgtcagtatattttgcgctaggcatgtcgacgcacgctaaacttcttactcctaatttgatccataaaaaaaaattgtgctgtgttcatgtcgtagagttgtagaaaaagagattaagatttagaaaatttatacataagcttgtatattttaaaaatatttcaaatttcttttaaaaatttgacttagaattactcaacatgaattaataaatatatattgccacaaaaaaaatgggtgattctacaat

SEQ ID NO: 295800 - DNA, 4864 bp, Cannabis indica
tttttttaaaaaaatctaaaattttctcgtaaaataatatctaaaaaaattctccaaaaaacaattattatctaaacattgcaaaaatatatcattctaaaacgacgtcgtttaacgcgtaacaaaacaaggcttggagaaagaaaccgccatcgccgtactatgcttaggtttcaaagcaatttcgcgcgggagataatactcttctacaatggccgatcatgatctcgagttggagaaagctcgattgttaagcttggcactcgaattcggtttcgatcaagattccgcaaaaaagtgcttggatcgtctggtccagctttacggtaccatttcgattaatctttatatgccttggagtttaaagttctggtttttcctttttagatttttatgtgttcaaatgtgtttaggtgaggatggccgagattttatcactgtggagtactgtggggatgattttcttgtgtcgctcgctgaatccatggaggatagcgaggaatgggataatgtgcaggatgctggatttgaaactactgcagctatggaaaatttgtttgaggaacaagttgtcaataatagcaaaaatgataatgtcattgatgagtcgcctttaactcagaaaaaccaaaaatttgtggatttgggttcttcgagtgatagtgactcaaatttgagaataaggaaaagaaaaggtgttgagaataatccctatcctcgttctgatttgcgtagttttggctttggtcaaagttcagggcaatgttcttctgggtctttggtaagaactaagaactaaactcagaatggtatatatatttctttgtgtagctaggtgttttattgttttcagttttaaactcatttgaagtatcacaaacttggactgtataagagtgtaatgagtggtttttaatgaaagaatctccattgtgtagtttgaaatgctgaagtagtttatcttttgttgaaggactgtaagagcggcttaacgcgaggctcagtttcaacagtgcataatgaagaacagggtctcaggacttccaaaaatgacactgagattctcagttatgaatcattacaggctttggatgaccttgaattggcaaatgttgtgatttttggtaacaagtcatttcgccctttgcagcatcaggcttgtagagcggttatggaaaaccgagactgcttcattcttatgcctactggaggtggtaaaagtttatgttaccaggttagttttccttgtttgcactaactacacaatgtgttagataagcattagcttaatgcttatctatatttgtatattggttccattgtagtttgtttttgtttggagtgtagtttaaaagaggggcatacttcatttcagtgttgtaatatccttttgtgtgcttccacagcttccagcaacactaaaagaaggtgtaaccattgtcatatctccattgctttccctcattcaggatcaaataggtgcactgatccacaagtttggtattcctgcaacatttttaaattctcaacaatctgcctcccaagcagccatagtcctccaagagctaaggcaaggttttatttctatctctctccttctctcaggcgtatttgctatattctaccgctatttatccttcatttcttttcttgcttaaaaaaatatcatgtgcacttttataaggcttatttctgtacatgtgtggattcctttttgttttctggatgcactcttgtaactttgagataaaagtgtattttcatcatgagaaatatatgattaccctgtaaattatatctaatctgttactcattatgttattgatccatcttgctcatattatctatccttggtactaggaaagataaaccatcattcaaactgttgtacgtgacacctgagagaattgctggtaaccaaactttttttgaggaccttaaatgcctccatcgaaaggtgaatactttcaggttattgagtttgatatattggccttgtataagagcattcgactttgacgcttactgcaaatctaacctacttgcatttaaatcacagggacaattagcagggtttgttgttgatgaggctcactgtgtgaggtaggacgtttcacatattcatagttcattcattttggtgatagtattttagtatttctagtatagtatgaagatatgcagtgacaccttcattagtcattagaccgtttcttgactattgactatatgctgacaaaaattatttgataagtattgttttccattcatgattaattttattgtcttcttttccgtattcaaaattttctttgttgtgcactggaaaatcttctagtgttaaactagccttattctatgaaagtacaaaggaaaaaaaaagtcttgacttcaggatgatccaatccaattatctgattcaaaccccacgagaaatgtgaatgtataattgtattgcggggaatgaaatgtttaaattattaggaatagaaagagggctgttaagagaatcgagttactttccaaaacaaaaaggacataagaattacattttttttcctccccttgtttttatcagtgtacatgttctgattagaagtttcgacgaaaatctttgcttttggggtcgttagatcatattactgcttttaatttttgatgatcaatctagtccttttatccagccaatggggacatgattttcgtccagattacagagaactgggttgtcttaagcagagtttccctcaagttcctgtgatggctttaactgccactgcaaccgatccagttcggaaggtactgactttgtaagaattaatctctggcattgtgtaacttctggataaaaataatggttctgagatctattgcaggacatattacaagctttaagaatcccccatgcacttgtccttaaaagaagttttgatagacctaacttgaaatacgaagtagttggtaagactaaagaaccactgaagcagcttaaacagctactgattgatcgtttcaagaatcagtgtggaataatctactgtctttcaagaagtgaatgtgtggacgtttcgaaattcttgaatgagaaatgtaacattaagacggtctattaccatgccggtatgagcccttctcagagagtttctgcccaaaagaagtggtatcaaggagaggcacatgttgcgtgtgccactattgcttttggtatgggaatagacaaaccagatgttgtaagtccaactaaaactcagcaatttttttccctcttaaacctgcaaaaatcactaagtaggtttttttttgcagtaattagtcagaagtgttgtacttaaggcactaagtagctttttctcggcggtaaaagtcaccttttacatcaatttggtgcggcaaaagtctgttagatctaacagatagtgcctaacagtcttaccaaattagtgtataagaattacttagtgactaaagtgcagtatttcagactagttaattttctgtgcaaaaatccacttaatatatatgccattgttctgttaagattagactacatttcataaaccttgaatttttatctgatctacattgtctttagtactattatgacttaattgagaaaatcttccttatcaatatccagcgatttgtcatccacaatacaatgtcaaaagcaatagaaagctattatcaagaatctggaagagctggaagagatgatctctcagcagtatgcattctcctttatcagaaaaaagattttagccgagttgtatgtatgttgcgtaacgggcaaggatacaagaaagatagcttcaagagagcaatgagtcaagctcagacaatgaaagagtactgtgaacttaaggtcagcaactttttaactcccaccaaccaattttttttttattgatgattcttacaataaaacttccagccttttaagctacgatatgggaaattgggagagaacccaacaaaccaaccaacaataatttctctttctattactagttaatttagtaactccactgctgctattgtaggaccaatgccgaagacaaacattattgaaacactttggagagtcttttaatgaaaagaattgcaggaatggatctaatccttgtgataattgtctcaagaattcttcttcttcttcttgaggcatatgcacgtgaaatcaaaattatttgtgtaaagaagaggtatgtatgcaaatgcaatgattcattagtagctatagctagctagccttgtccttgtccttgtccttttaagtatatgtctcgttaatttttggccccagtacaggggagaaggacattatatagggactttcttctttctaaaggctccaaagcttgcttgtctagttgtctgttttagaagaatgtggatgctttttgtaatttcacactttcaagtgttcattgcattgtagacatttgcatgatattattgaataatattaaatgtcaaaaatgtcctattttttttggaataaaaaaaatcaaaatattatgaaatgaacttaaaatgaactatacagttaataaaattgcttcattcgtaacaaattaataaaatgctaaggaagtgaatataattatataaaatttgtgtgattgtatttggttatgagatgggaatttcaataagatttaggatgattatgtcatgtacattaaggaaaaatttatagtaagcttttgaaattgttgtttcggtacactcctatatgtttaggtatttaagatagtttttcaattcaaaataatcttgtacattatacacttattaaagactaatggtaaagttttaaatttttttgaataattttagttacgaaaataaagtttaaatagtt

SEQ ID NO: 295801 - DNA, 2853 bp, Cannabis indica
atagtcttatgatttagggtcatttgctatattttttttgaaatgatgacataaactaacatactcctatgatttggggccatttactataatttcccataaaactataagtcaccataataataaataacaattaatctaaaaagagattttaacaatggtctcaactgtcactaaataatccttctcaactacaaccacgtgtcaatctttatctttgatccaattgaaagtctctctgatgccaataatttcagccaactcaagttctacatccccaccaagacagatggtttgggcttcaacaagaccgcccaaattatcttgagttacatgctgattctaaactgatgattcacagtgaataatgcatcgtcaatacttatcttgatttgattctcttcaaactttaccaaaactttagcaccatcttgtgccacaccactagataatggtgtatattcatcattcatttaggtattcttccattgttcaagatacaactttatcgaggtaaccactgttaaggttttatgccttaaataaaattcaattttaatgtaatcttatttattatcaataaaattcagaaatcatattttaaccttgtcatatgctttattcacatgtttatttcataattatatgtttaatatataagttctattaaatcttaaacatataattatttatgattatagtgatgtcatcacggtgtaaaataattgtgagtgtatgcttcaaatttatttaatcttgtgatttattagtacaccagatttacactaacgtgataatcgacaatgtggtttacttacatttaggcaagtgggatgtcttttctaagacattagttgtatcaaatgcataggatttacattagactagaccgatattgacagtgaaaaaatgtaatatcccataaattaattataattaattaaagcatattttatgaaatataaagtaatatgaatattaggagaataaattgagaaaaattatgatcttactaggttaatatgagaaagtaggcttattttatgaaatgagcaaattagatgtaatttattaattacggatagtttattgggctatgttgtgggtaaaatacatgaaataaaatatttttcaagtttagcaacagtagaaacttgatcggttgaccataaatatcgcgacggtattagtgaatattgtagtggcaccgagagattttttatgatgtttgggaatttttagattaagcaggttatttataaataaccattttacccttacaattatgtttaagtggatacttgtgtggtaggcaaaattggtaattgcaaaggtttaattaagtgttattagtttgttattatctttatttaagttatcttgttgttattattattattgatttagaattaatggataagttagaaaataaagaaattttagtaatgttaagtggtaccaaaagtaagttattttgccttgtctttctctttcaccttcgactcaagaagaaccagcaaaaacaattagattttcgtaccaaaatttgctcattttactaccaattaatcaaccttaggagttgttcaaggattggggtaagtcttctttgttttcttggtaaattgagagtttaaaattgagtttttatgggaatttttggggacttcgggtatggggtttgtagttgtgtttgggggttaattatgttgattgtttagcttagaattgaggtgtaattgatgtggttatgctgctggttgtgttggagcttcaagcttgagctccaatggtgaaatttgattctttgtgtgattgttgtatttaaggtgtggaatatgcttattatgttgtatataggtgttctggaaagtttgtgtttactcaaaaactgaccctggtgatgtggaataaatatttgacacgtgacaagaaaaaaaatatctcagagttgagtagtcctgagtcatagcagtcgacctgggagaggtccctagccctacgcttaggttgactttaggaactacgaaatgggtgtttggatcatgccaagttgtttccaacttactatctttcattattttgtactatgaatacatgaagaatccaagtccaatgcccgaaagctgaaaatacatgaaacaacacctgggaggtcaacccggacgcctagggttttcacccaacgcccatgttgacattccaactaaggttttagttttagggaccgtcttagtgcaaatgagtcaatctttgtactaagatgtgaataagacatgtcataaacatttttgaggcattagaatcagcttcggagcactttcaattttgagcaccaggtgccctatgcactcagcactatgtcaacttggggcacttccaaccaccatactaaagaattatcctgagtattttcttcttctacatccaaaataaggaaacaagtactttcgggagagaaaaagatcgacctggaggccaaaatggggacccagcgcctagcgcccaggttgacactttgccaacttcagctttacatccccatacatgaaaatgacacaaacttgatttcttgcctgtccgcaactcgtatggtgtctttgggacatacttgctaggcacttgattcaagatataagcagcattctttaatgcctcaccccataaaaattctggcaagtagaatgaatcaacatacaacgtaccatgtcaagaagtgtgtgattccttctttcagcaattctattttactgaggtgtccctgacattatatatcttgcattaataccacatttctgttggaaatattttaccaagatctagatttactaccaagtatgtttcattaacatc

SEQ ID NO: 295802 - DNA, 4202 bp, Cannabis indica
tttttgtttttttccctaataataatatgggtaaatagtgacataagtacttaaagttttaagtttgtaagtggtctaattccaatatttatttttagtagcataattaccccatatttgtaaaactgtaatttttctccaatttcttcagtacaatttctattattttcttataaggtttatattcttgatcattgggtttagacagaaacatgtagtattagtttcttctaaatattcctttaatatattcaaaatagagtatgtattgacaaaattaaaataaaattacaattttacaaatattaaatacttataccgctaaaaataaatattaaatttattctactgacaaacttaaaactatcactaactatcactaataacttgaaagcccaaaagcatagagaagaaaccatcctttcttgaaaaagctaagctaagctaagctcaacagattcacattcacctccgtcctcggaactgcctgggttccaacttccaacctctctctctatcctctccgccattactgaattctaacccccaaaaccctaactctaccctaaccaaaacttcttttccgctatgcaaacgctacttttaccggcgggtcgtaccggcttctacccagcagcggctgactccttcgctccaaatcttccccgacgctccgggagaccaatctacctcaacaatctcagactcccttcctccaattctctcttttctaccaagaccttccactcttcgtcttcgtcttcgtcgtttcttttagcaccgcagctgccggagaataggagaacacctctgtcgttcgctaatttgagggccacttcttcgtctactcctatcacttcctcaaacgatgagtctgagaaggccaaactcgctcaggttcagttctattctacgattatctgcattttttgttaaactgtttgatctcgattattgcattttagctaattttatgattcggaattgtattaatttctgtgttttggtcgttgtgggtaatcagtaatgcgatcaaatgttactatgttagtgtttttggctattaaaaggcttgaaaaagtatataaaaaagttttgggaattgtttgtgaatcaatgcgaaattcggtgtggggttctgatgattggtaatttacttccccattttgaattgctttaatcgaattgaagaaaatgaatggttattgtggtgtaggtggcgaaaagattagagaacacttctaggtatttcaagagattaggaggtttagggttttgggggcagctagtatgcaccattgtagctgctgtgattctttcgttttcagttgtggtgactggcaaggtcacatctccagctacgttttatgctactgctggtgggattgcagctgctttcatttcggtattttggtcattcggttacattcggctttctgataggcttcgaagaactgcaaatgatccatcaaaggtattgtcaagcttctattctctatgatgcttcctagtggatttgattatgctaaaatatgagattgcttgatcagtgctttatgtttaactatttgaatcctttcaagtttgattatactgcaatatctaattggcttttcccaaaaagtcttgtccttcccgcattgtgttggatttggaaattagttattttaaatagatactatctctatagcattaacatgataatgatgaggcggcagcagcaacatttggagaaatataaaaattcgacatgatggtataggaaacaaaacgattcattagactatgtgctgcaaaagctttagcattactttttataaaggccagccagtatatgattttttttgttgtctaatggggttgtttacttggaaggcgacttccatgtggttatcccacccagattttgtttcacaatcttcatcttcgtagcagcatccaaatgctggtatggtatgaatatctcatgtagtgtagacatgtacaaatgctcataccaaattataatattcagtcggcctatattgatcttgaaggttgattttttttttttctttttgttctgttcatttattttttcataatttttcaggctcctccacgggctgaagttgtgaaaagcttgagaaatggcatagtagtgaatctactgggcatgggtgctgcaattctcggcatgcaagctacggttggattattagttgctaaggctcttactacctcggcgaatccatattaccaaggaatcacgcctggtaccagtcctgttcttgcattggatgtcttcttggtgcaggtattttacttatttatttattttctgtggaattattggtttccaatgctgtaggtaccattcttgctatcagaaacaataaacattattaagaaacttattctggttaagctgttactaatatttacaccaaataatctatactttcatataagctgatgagtctgtcttttcaggcatctgcaaatacgatcctctctcatttcttgggtctggttttctcgttggaattattacgctcagtgacattaccctctccagaaaatacccctgtgccgagaatcgcatgagttctgatgcctctgtagaagaaaaggtggtgcttcacaaaattggagaatagaagtgacttgtttttggaatctgtgaattgtgaattgattttttcactatggaaaacattagtgaaaaataaacaaagaaatgcttttggccgctatgttagatgagaaatgtcaaaattttattttatttgagataacaagtaatgaaacagtttcaggctttgagcttccttaggcatcttgctctttgctctttgctctttgttttaataaacgcttactatgaattcttttggtagaagttggaaatttctaatggcagacgttttagctaatggattttataattgatttgctgaaaaaagggaaagaatttctttattatattatcacataaggcagtatcccaaaaagcttcacatacgatgagacatttcaatcattttactacatatatttttgtgcaagatcagcatatttgtttaacaagtccagtgcaattaaaactacaaagaaaaacacataccaaggcactagtaagtagtaaattctaggtctttacaatctcaaattaactgccccattctcaaagatcgagatgaacatgaaaagaataacctcgaagtcaagggctagactgtatataccaaaaaactaccccataaaacgagtccaaaagaacccaaaggaaagaaaaaagaaattggaaacgttaatactgtagtcaactcttgtaaatcaccattctcccttagtactctttaatagtggtggaattgcaccagagagtaaaaaggaaccacaaaaagcctcatatatgttgaacacccatctataaggtcctaatattactttgcctgtcctgcatcacatgaaaatatgcacaagtacattgatatatatgtatcaataccaatacgatcaacaaatagaactgaaaatgtagactcgatgtaagaaatatgcaatcgaattggatgaacgagaaacacataattaggagttaggacaagtcatggacattgtatcttgaattccaagttttcccatctcaatgatttgagtttgtacagtgtgttacgccataaaatcaaacttaaagcataagcatccaagtttgatcaaccataccatataaaggcatcttaaaactgcattgtgtaatattgagctaagtttttagacaattaggagtgctaaagtactcttgggcttttggaattttttccaatttcagaagtggatggcagacacaacatgacattaggtaggttctcttaaaagcattttgcaaaacaaagttatgggtacatatttagacaccttttaaagcaatttatgaaaaataacctacacaagctagacagtgcaagcaattgggaagcataaaatcaatatagtgcagtcaatgagcaagagtaatcgccagaagacagtgcataagtactagagtcctaatgaaaattgccgagctgtacaaatggtgaggtttgacctttgaactatcagcaccaaacagaaaaatggtaaggaaaaaagaatggacagacaaaagaggtcgttcctgtgtgtgtgtgtgtgagagagagagagagagagagagaggaggagagagagagaga

SEQ ID NO: 295803 - DNA, 4079 bp, Cannabis indica
tcctattactttggctggattattcataactgcatatttacattaatgatgcagtgatcaattggatatactgcttgttccacttttggaagacttgcttttatattcatttaatttcttcgaacaagaactaaaagaaatggaatgaaaagaatcctctgtctaataagaaatgctaaaagacaccagtgatacctagcaccctcctttgtattataacgcgattagtgcaattaaatatcgggtcccgtataatttaatataatattttttaggaaatgtcgctaataaattgcaaggtgccacctctaggtggtgctaggcaccactagtgcccaatagcaatactcttgtctaatgcataaaaaaagactaaaacatcatgtcattttaaatagaaagtgatgactaatgaattttgaaaaagaaagaaaaaacaacaaagcagcagctaaaattaaatcatcacacagaaacaaaaccaagcacacggttcttgaacacatgcgctgccacctcacaatttcatattgctgaaatatatagaattttcatacgacaatataagaattttgtgttttatttgtaatatatgcaactacaataccttaaacgcttgaatttttcgtggaacaagagagtcctcagtggtcccaagaccaagctggccattttggtttcgaccccaacttcaacaaaagaaaagaacttgaattaattgaaaacgaatatagattataaaaagacaacacagtgtaagtgctacaacaaagtttagctgaattagcagaactaagaattcatgaatatttcttttcttatctgggcagagattcaaagtctttcctgtaattatatttggatgtattcttgttcatcattgtactattcttcctcattagtactagaactttttcgtatataataatataatatctttataaaattgctccaaccaagaaagtttggctcataagcacaggaagaaaccctatgctgggaaaaaagcatgtgcatatgcataaataatgttaataataagttaataacaataatgattatagccgttcattaaactattatattatgtagcatgcaaggaattgtaaacaagctcacaaaaagtcctcttttgaagattcaagaatttctcgtggtcgtgtttaacaacctattacaggcctgcattttaaggacattgtagagtgcgcttgccgattattgttaccaactggacaaaattattaactaaatgtttggcagattttcgtcacttttttcttcttttaaaattagattatgataaatatcaaacaaaatgctaatatgaaaaacaggggaagaaaaaggacaatggcattgaaagagaaaaaccatgtgtcagcctatcaaaaatggtaaaaaatgtgaacgctctatactgtgtgagagaactaacctttgtacctccccttccatagtgactgccaaacagtggctgtctccacaagcaatttgcgttatccttataccgtgcaatgcttttatgggctgaggagtgaacaagtcactagaattaccatgacctaaccttccaaagtcacccctggaaataatgtaaagtataatgcttatatgataactgaaaagcataaaacttacagaaagctgtgttatttgttttattcaaatgacacaaacatttctgtaaactatgcaaataaatctttgaactgataagatataaatttatattaattcatctagaaaaacttcgcacccaattgagatcaaaattaagataatgcagtactgactgattaaagaaaatgctatgaaaaataaattgtgagaccacaatttagactaccaaatggaataaggttacttaaatacataagtgcagagtggaagaatagaacaaaccatccccaactataaacttccatatgtctctcagaataagcagttgtatgatcagcaccacaagtaacagatgatatttcaaggccatccaacgcacttaattgcgtaggagtaagtcgatcttcagcatctccatggcctagttgtccatcctcccctcttccccaagagcaaacaacatcgccagctgtacataatcaataaaaatccatttatactcttacaaatgaagacaaaacgatcaccccagaagcaaaagacgtgtacaatttaaaatttacacaattaaacaattataatgaaaataggaccaagtacacatatccgtagaaatcaaaccagaaaaaccccgaccaatagtgtctagaagcactgagaagggagcactaaggaacaagaatcaaaatactgaatttattaactaaaatgcagcagataaattaccataaatgtgatcacttaagaatacttttgatcttctttcttataaacatttctggattcggtagtggacagagatgactctgtaataatctttgttggctacattttaaattatttggtttgaaagggagaaaaatggctgcttttgagaataaatacaattaaaagaggaatttacagggaggaccaaaaattttgaggtattttcatcttatttaaaacagtataaaaagacaccaattttattattatttttttttaatctacatggatatagttgaatttaatagtcttttttgtaatctttttgttgttcgctttcttttgttctttttattttaagacttctcccctgttttttcgttacctttcacctatgatttcgtacaatatattttcatccataataattcggttttttcaaggagccaacaatacaaactcaaacaagtacgtaattttttttatttattataattttttttttgttttttgagttgattacccattagttcaagctacttgtgctttcatgaataaaacagagacgcgggagacaatggcaaacaaacatagacatcctctttcacatgactaacattttaccaacaccgacaagacatagccgaaaacatattcagatttagcaacgtctaacaagaaatttcatagaaagcattgaagcgatagcaaatccaacactgaaaaaactcacaacacaaatttacagttaaaaaggacaaatgagagaatgataaggaatagaaaccgtattaatactattacagcacctgattctcgctgaatcttcaaaatctttggagaatagcgaatattctagcttttctttttcttttcttattttttttaatagaaatctaagagaatcactagcacgctctacgatttcagcgatcaaaaccatgttttcatttctattcagcccccaaacaggaaaagaaagagaaatggaagcttacagagaagtgcgacggagtgactagcaccagcagatatgagcagaacacgacgaattgaagcagtgacttcggtaggtgctgcctcgtccgccatgggaatggaaatgggtagagagagagagtagaagtagtaggatattgagaaggatcaatgaggttcttccctctccagaaattgaaaagtgataaaattccataaagttaaacaacagagtgggccctcctgtatttatagcgatgcagattagatattagcacatgtggattcaccgcaacttctttacatatttttaatactctccgtatcagtgtcagccggaccgtcttctgtcagaccttagacacgactaaatttaagaattaacaccaaatcttttccataaaataaaattaacactaatttaagcaaacactaatttttcttccaatattaaaaactcagcaatatagccgcttttcttgtagctaatttaatttcttttagtattataataattgttacttaaaatataattttaatatatagtaaaattataaatatatcatcttattttcttaagtaaagtcgccgaaattaatggtagttctctttttgattgaattttcgtttcggttgcgttaggttactgcgtggttgcacgatagttgcccaagaagcatggatcgtgggttgaagatgtgtgtaagtggtatttgtgtaattttttttatttagactgtatatttatttatttggccagctgaaagtat

SEQ ID NO: 295804 - DNA, 6382 bp, Cannabis indica
ttttttggattgcaagtaagcccgatttagagggattaggttaaattaatggttttcgtagcgtgcctaattgttagggcgttacacctgtgtgtgtgagtgtgtgagcgagtgggggcttgcatgtgagccatgagtgtatgtgtgtgagttgttgtgtgtgtgtagagtgggggctcgcatgcgagcctatgtggaaggctcacatgcaagtagtgggtgtgtgagtgtttgtgtcgtggtatgtgtctgagtgggggctcgcatgtgagctatgtacatgtggctgagtgttgtgtgaatgtaatgtaagaaaggtgaattatgtttaaaatttgaatatatgttggaagagaatgttgttagaaaagtaactaaaggacaaggcgtgcatgggagagatgtacaaccacgcctcctaaaagctctgaaagcaaggaggcatgagtagtggagacaccacatctacaaggtccgaggacccgaccaagagtacgaggtgcaagaccacctcccgcaactgcgttttacagcttgtaagcaacaacttagctctcttggaccataatgcacctcagcccaataaagcgtataaataccccactctcaagtgtgagaggaggttagaaaataaatcttataactcatatattttatgcaatagaatgaagctctgacttacacaagaaatctcatagccatttaaacttacatttcacttcatcttcattttgtttctatgttttacatttagattttggtttttcggccacaagatttgttgacgagttcttaccgtcaacaatttggcaccgtctatgagaatgataagatcaagccaagtccttattggctcacaatcatcacaaaatgcgtagattctcacgtcgtcttcagtcaatgactgttgacagcgattcattgttggttgttcaagctatacgatggaacactaaaatgtattcttattttagtgttattattgaacattgcaggtatttgttgggaggcttgcttctagtttttttatttttgtttaagcaatctgctaatagtgatgctcattgtttggctcaggcatcctattatatctctcatcgtaaattcagtggaagtgttattgctacttaaattgaagctacattgttagcttattaaattttttaaatgagattgttagctcatttagttaactaagtttctcatttttattgaaaaaagaaaaagaaaaataaatcagcaaatataattacattttggaaattttatttcttaaattaatgatgattgtggtataaatgaagtcttaatactctataagcatcccaaatagatgctttaaataataataactattaaagattaaaaaaaaaaaaaatagttaaaaagttaaaattgatctccaactactcaaaattcttagctaaaaaacctaattttaaactttttaaaatctttatctatatgtagttaaactttaaagttttattatttattattttaatatttaattgtttttatttctcctattagtatttgtttattatattttgttattttgttatttttttttctttgattataattaatataagtattatatttaaatgttgtgaaagaaaatatagagaggttgactaataataataaaagtaaaatttggaaagtattttgaaggatagaatagtaaaacacagctctaaaaatctgaaattaaactgtctaaccctttctctctctactctctccactaacccaccaactccaggagcagacctccctttgcaccgctcacgacagaagcataccaccgcatatggcagaccaaccctaagcgaacacttaagatcgagcacacaatcttaatcttcatcttctaaaggtatttaaaatttaatatttatatatatatgcatatttttgggggagagagaataattgcaataagcaagaaaatgaaactacacctacaccattgttcatgataatccttcgcaaaattgtcccctcaatttaacccttctttcagaattgtatttgttagcaacccgcataatattagagctaaacaagaaaaatattcaaaacttagttcatttctccgaattttttgttttctgtataatattctgtttctttgattgtttgcatttctcaccttaggaggcgattgatttggtaaatatgagttaaaatggataaaatgtattaaaaatatatttggctgcgattgaatgaattgttggtgagctttgatttttcacatcttgaagatcttgtctttgttccttgatgacttcattgtaaatctttttgttagtttgggtgaataatttgattgatagtaatactaggctcgtggttaagttatttatcatatatctaatgatcttcattctgctgttgttttctgttgttgcttggtaatataaaattataactggtgttaattttatatagtcgtttgctaatttatattagatttactaatatgtttttcactctgaatgtaggtttgaagaatcataggggcttctagtattttaattatcttctctgctaaatgatagaggctgcaaaatacttttacttcaaacccatattttaactggagaattatcttgatagaggttattcaatatgcacctagaggaggcaattttgcattggttagaaaacttccctgcatgtttgtagcttgttgggtttcaggaagtcaacgggttttgctatacttttaagcccttttctttgtctgagctggttgagaaattttttggtttgcagtttgtggggaaggagaaatcttggataagtatttgttggtaataagccactctgaatgaatatgaggaaatatgtgaattcccattcgggaagggcgtttggtgatagggtatggatcactccattctttgctagcttgctcatattcattacattgtttttgacagccatatttgggctgtttgcctcttccaatggcagagagcaaatccctgttgatgttattttatcctcaaaattagagtcagatgactcaagtgggtactttgttaattctgaattgaaaagatcaccagaaataaatggaaattccaaaccaaggttgcctagattcgcgtatctcatttcaggtacaaaaggtgatagtcatagaatgatgagaaccttgcaggcagtatatcatccaagaaatcaatatgtaatgcatttggatcttgaagcactgccccgtgaaaggttggaattggcagcttcagtgaaggctgatcccacattccatgaagtggataatgtgcgagtcatggctcagtccaatttggtaacttacaaaggtcctacaatgattgcttgtacattgcaagcgatttcaattttattgaaggagagctcagagtgggactggtttataaacctcagtgcatcagattatcctctggtgacgcaagatggttagtgtcagtttcttagcttcaatatatttaagaacgttggtgtacctaagtttactatcttgatttaaagatttagcattcatttccttttgcctttaagcaatcatataatttgttctgatcacaattctgaaatgtggataggcgttttgtcttctaatttgtattttatttttcaaagagtccaacttagaatcgagagttgtaaaaacttatggtaggtgggtaagctaggtcagaactacctttttcttccatgttggtcttgtcattcagagattggagaataataactaggtcatttgaatggatctaaggagagtatgagtaaggggacatctaatggtagtgtcacttccttcattctttaacttgcattcttttaactcttaaacaatgttgttcatacaaaaaaaaaaaacaaaaaacaaaaacaaaaactcctagacaatgtttagatgatccttttatacttgtacaatcatattggatttgactttgtgtcctttggtaatatcttgtacttggaataaaatgtgttgatagtaagaactggtcaactaaactttagttataaaatcaaatgcaaatgggtgaagatgaaaagttttagaggaactcagtacattaatgaagaaaaatagttttgtattgaatctctaaactcctttacaaatgattattttccaactccttcaatggaacggagagatatttatagggagttctaatggctccaaaatacaagtggttccaaagatggggacaagattacttttgtaccatgaagatcagcatgtcagacgggtagaggtgcagcagttgtcgggtgtcagttggtactccgaatgagacaaatagtgtctccattacttgtacttgttgtacaaccactatttcttgagaggtatgcgtgctttagcaacttcatcctttgttgtacgttcccttgacatccctctctttatgctcatgatgcgagtataacacttaggagaaatagttaagtgatgggtctatgagaagcgagtcttgttgtttaatcttagtagcaactctttccccatcctttttggtagtcactctattgtaacatatacacactgaatgtgattgctccttgtgtggagcaggtagtgttaggtgatgattattggagtaagggaacaagggagagtgagtgagtgagcggggagagagagctagggagcgaggagagtaagtgagggagcggggagagagagctagggagcagggagagggagtgtcacgtgggagagagcggagcgaggagctcctcacgcgtggagctcaacccgtgccttggtccttcctcatgtttgctctccccctcgggggtgtcccgtcttggtagttggtgtcttcttttcttgtaaatacttttgtaaagtgtattttgggatttttcctctcactaatctataaatctccaaaaattacacatgaacaattttttggaggtcaacaaaaaagagcccttattatctgatagtttgatgtcttcttgcgaacttaaataacactttttgtttcttggtatatcattctttaagcaaatttggttgctttttgttgtttaatcggaaaccgctgatacataaattattgtattctctgaatttctttgatgcaagcaatcctattagcttatttttgccttgttttttattatttattgtaaattatgcaaagaatttgaacgaggtggtttccaggcataatcttaatactgctctatctcctaattttgcagattttcttcatgtcttttctaacttatcaagaaatctcaacttcattgaacacatgcagattgttgggtggaaactgtgagcaaattgcataaacccttttttaagtctctaacagcttcttatcatggctcttattatttgttatcattttccacatatctgtttttcaggaatcaaagagccaaaccaatcattgttgatcctggtctgtacttatcaaaaaagtctgacattgcatggactactcaacgtcggtcacttcccacatcattcaagttatttacaggtaattgtggcgcttgcatatgcatattttgaggacacatttgtaatccagaattggctcatttttattgtttgttttgttcaggttcagcttgggtaatgctaacccgacagtttctagaatactgcatatggggatgggataacctgccacggactatcctcatgtactatgcaaacttcatatcttcaccggaaggctattttcacactgtcatctgcaacactgatggatttcagaacactgcaataagccatgatcttcactacattgcttgggacagtcctccaaagcagcatcccagatacttgtcaatgaaggactttgacaaaatggtcaaaagcaatgccccttttgctagaaaatttgcaaaagatgatcccgtgttagacaaaattgacaaggagcttcttggtcgaacaaaccggttcgcaccaggggcatggtgcattggaagctctgaaaatggagctgacccttgttctttgcgtggcaatgactcagtcttcaatccaggtcctggagcccagaggctacaagaacttttcgggactctcttgtccgaagattttcggaagaagcaatgtgcgtgaatgaggataatgcctttgtttcgtaattaaaggccatagtttactactcataagtgtacattaattgtcttataggttatatttaatcacattgtttcatatgtaaagtggcagagttttgtttccagtatggtaaaactgtacatgaaatttaaatcgcaattccactttacagtttaaaacctttttttttttttagtatgaaaatgccaattatattaaattaatcatccataatacaataagcatttaacgggggagggatttcct

SEQ ID NO: 295805 - DNA, 6624 bp, Cannabis indica
attagggtgtttgaaaaagattctaatacgttctttatgagacttataaccattgaaagaatattgaaaaactataacatggagatgctgacaatatatatttggaatattaatttgatttttttttaaaaaaaatgtagaatttgcaaatgaaaaaaaaaaaaattaatcatttgaataaatattatggttattataaaattttaggccgtaaaattataatatttttgaaaatatttctattgaatgtttaattttgaagattcatgctattttatattttaattgattgttatttatttatttatttttgaagattctccttcttaaaactttacatgttatgtatataccatcaataattaatgttattggttactttatagtatggtgagaaactacatttttttggaagcatattaagttaaaatcattctattattatgtatataaaaaatatataaaatttagtgaaaaaaaaaattgaatgttatataaattctctcctaaaaaaatattatcaaagcaaattttcatagtatgtttgagttttattaaattagtaatacactaattattttgacttactagttgtaattgacactaattgaatatttacttttttatggacaagaaagtttatttttcacttagaaagggttcttattattattatttttttttatgttttctttgtaatgtaatataattacttaataaaatatttgtaattgggagttggtggaatcaaaacttgtaacttttgttgtggtttatcacttttataataaaatattatagtagatctcataattaagtagatattatatcattattcatattgtatgctttatgaaattattcactaaacttttgtattttcctttttaattttctctccacgtgttacacatgtatagtcataaatcttttacaatattaaaattaatcaacaaattctttgaattaatccaaataatggaaatttatttttaattacaattacaatttctaatttttagaaagcatgaacattgttgtttaggcatcttattcattatagcttttttagtggaggaaaaatttcattaagatgacaaatcttctaataaaatgtacataaattcagtaagagtacaacattctcactaaagattcgatatgaaaaagaacaacaagctttagtaaaattatgagtcaccctgttagccagaacgataaataaacaaaaaagtgattttgctcaaacaagtaatcaaaagtatacaatcatttacaactaaattcaaaaggagagttaatcaataattgactgcgaatgaccttaaccgccgctaaacaatgtctcaagtactaccattaaccaatctttatcattgatcaaactgagagctttcctgatgtccataactttggccaactcaggttccacatcaccaccataacaaatggtacgggcttcaacaagactgctcaaataatcacgagctaccaagtcgaattgatgagtcacaacaaacaatacattgtcaatatttaccttgatttgattctcttgaggttttacccaaaccttcgcactatctattaccacactaggcaattgagtatatagtcattctttatttgggcattcttctattgttcaagatacaactttgttaaagtaatcccatcattcatattataatttttttcatttcaaataagttcatttccaacccaccaaatagctcaacagatcattttcaccataccttgtttctccttattcattaacttagagaaaattgaattgttttgttaaaaaaaaaagaataaatttgaaatattttaagattttattgttctattcatatcgttaaacaaaatattattattttctcaatataatttaaattttttattaacatcggtgcatggcatggcacgatctatcttctaagttcttttcatttaaacttttttttgttatatgattttggttgaaatattttttttttattcatagttataactatttggatgttttcttaaactaatcttactttatgatgaaaaaaattgttagttaagtaatatttctctctttttctaagggaaagtaagtaatatttcacattatatttgctatttcaaaatgcaatgatatatccatttttatacaattttggtcatattgaatttgatcatatccatttagtaaaaaatcttatccttatctcattcatattcttactcaattttttcactccaatgcctctagtttcattaattccaaccaaagtatccatagtacaagcattagaaatgggcttcaaacattacataccaagcccaaaaaagtaacatgggcttcaagcattggatacctagcccaaataagcaacaacatgggcttcaacaaatggataccaaacccaaataattaagaatcacataaaattcttatcattgctagctaaagaatatacaatccaatatatgtggttataatagaccaatttaattagttgcaactattacatattctatgggaatgaattattacaccaaacaaagctcatctaaagtgcaatgacaatatgtcaatgtattaaaatccaccacatttgtaccaagaaaaaaaaaacggtataatgattagaaaggacaaaaggaatgatatgccaattaccacccaaatttaaaatataactataaaaaattcttcaattactaagctacttagggaataagaatagaattaataataaaataacaaaaaaaaatatatgtattatatatacaaataaaaataaataatattaagtaattaactataccacatagttgattggtaaattaatagataatatttgacaaaattatgtatctaataaaatacaggaaaattatacaattctacttctatctattttggtattccggagaatattttagtctaattgttataatcgtgtatgttgtagttatttaaaatattttacaaaattttgaaacatttaaagaaattaacatgccaaaaatagggtccaaactgtttgttgcacgaatgaatattttattttatacacgtgtaaaatagactgtttaaacactgctttttatattgtaaattattccgaatttcttaaaattttacagtatatcttaaataactataacatgacaataaaacaaattagactaaaaaattattccaaatactaaaacagattaaagtacattaatacactatttttaggagtgtgtattataaaagcactttaaaatatatatttttttaatttaacttttcggattgagtactattatataaatatatttttctaatgtaaagtttttggtgagtaaattaaaaattagttaaattatatattctaattttgaaaaagagcctttacaaaggttttttttttttttggttgcttttacaatgcatattttaaaaaaagatgtactgatacattatttatctgtttcgatatttagaataattttttaatttaatttttttcatattcgtgtacgttatagttatttaagatatcctataaaaattttaaaaatttaaaataatttacaatatagaaagtattgttcaaacaacctattttatacgtgtataaaataaaatagttacgtgtgcaacacattgtttgaatcttatttttggcgttttaaatttttctgaatttttcagaaatgtcttaaataactataacgtacatgactataagaaaaaattttgactaaaaaattattacagatactaaaacagatagggatacattctaaaattttctaattttttttttttagagaagttataagactttaaaatttaaacaattacttttatttttatctaaaactttttaggataatttttggagaattgtacgatgcatcccttaaaaggattgtactaatgtatctttatttattttgatatttgaaaaaaaattagtccaatttttttttatggtcgtatacagtgtagctatttaagatattttacaaaaatttgaagaattcagaaaaatttaacatgcagaaaacgaggttcaaacggtctattacatatgaaacttttttattttatacgcgtgtgaaatagactttttaaacattaatttctatattgtaaattattttgaatttatttaaattttgcaagatattttaaataactataatatatatgactataaaaagatcagatttaaaatttattctgaatgctaaaatagatataaaatttattgatacactcattttaaagggattggcaaacaccaagggacgcagcccaccgagccaactcatgagcaaggatattgtggtttctaggcacccaacaaacattcaccccattaccattacacatcaaagaaaaaagtttagaaaaaagaggtaacaatttccaggaggggcagctacggtcttgtaaggcttgcaccagagtcttacaatccgacaggaaaagtacctcagtccatcccgaagaggcacagaagtccaaagccgagagaagaccatgagcttccgcttccaagggcgaagaaacctggaacttgaaggttgcagcacctagaatttgaccctccgaatccaagataatagtagcagtgaaagcagaggatccacgaacagcagcatcagtgaatgctctcaccgaggcttgggaaggcaaggacaaattcaaggggagatcagtcgtttcagaaatcgatttggagcaagagattctccactcctgcacctcagttaaggctttacagagaatgacctccggggaagccagaattccttcatggaagcatgcatttcgcgcattccacaaggtgaagcaaagagagaccgccacttgggtaaacaaatcattatctgggggagaaacctgacctggagatttagataacagccacaacaccaagtctttcggattattcaaatttagacaatcgcttctaattccccattgtgtgctaaaccaacattttcgagccaacggacacttgagaaagagatgaattatcgaatcttcctcatcctcgcagaaaatacatctcatattagttgggaatatagatgaaagacgcttaccacaggggaggagatcccttgccaccttccaaatgaaaaacttggacctttcatggatcggagccttccaaatctgagtccacaataactccggggcgatcaaagtatctttgattagagccttataagcccctttgaccgagaagatgccagattcattacttctccaaatcaattggtccgattctcccataggcaattttatcacttctcccataggcaatactaacttttaatttcttagaaagtaaaccaaacaaaaccttgtttgtatgtatgctcttcttattttttttagagcgaaaaattggaaacttttttttctttagcatgagtcacacaaatcactaccacccattaagtgggcctagaaattacactatgggccgcatgagtactagagtttgggtcaagatgggctgaaaagcccacaagtactatcaattgacaagtatatgtatatcgtgtctcgtagtctcatgataattatttttgacagaagcaataatgggagaattatatatatttaaataatatttattattttacatattatgggtaagtgtacattacactttcttaaaaggatattttggtagcattaaaagaaaatatcggtaaattttttatctattttaacatctaggagattttttagtccaaagttttttttttttttttctattgctcgtgtatattataattatttaaaattaactgtaaatttttagaaaattctaaataatttataataccgaaaataagatttatatattttattgtacgaatgactgtttattcttatacgcataatagtaacagtacgtttaaattttatttttggcattgtaaactattcgaaattttctgaaaatttataagtgatcctaaatagatacaacatacttgatcataaaaaaataaaaaaaaatttctggatgacgaaacatataaaagatctaccaaaacgaatgacgtagttttgaacattgtcgtcttgtctctatgacataattttgagtgagatgttaataaattaattaattattttttttcattaaaaaaatatctttaaaattaaattcgtaagttctctctctcaaaggttactaataagggaaaaaattaaggcttctcattcctaaatctattagaagttgtctcttttctctggtcaagcctaccgaccttccttgggcttaggtgcggcttagttggggttctattttgctactacaatttgatttttgcaattgcgattagtcttttttctatgacatagttttgagtgtcttagtacttatctttatgacatagttttgagcattttttcgtcttgtttatgtgacatgattttgagtattttagtattgtatgtgtgacatagtagttttattttgttgttgttgatggttcttctttcttctttgatggctcgccatcaaatcgtgattagtggttgagaataacaagttctcaaggattgaaggggttgtgagtacagttacgtac

SEQ ID NO: 295806 - DNA, 9221 bp, Cannabis indica
attgaaatagaatagtagatagagctagaattgttaaatttcatagagtaagttggagagagaacaaaactcttatctttcccaattcttcttcttcttcttcttcatccttcacattatttttttttttttttgatatgtactacaaaagaagatgagtattgagagagaagagaaacttcatttgggaagattatgtaggagaagattttgtaagaattttattattagttttaattaaaaaaaaaattgtcacaagtaacaagactacccatcacttaattaattttaataaaaaaaattatcacaagagacaagacaatctatcacttttattattagtttttactaaaaaaaaaaaaaaaaaaaagtcacaaacgttagcatgtgactatattttaaatataatgaaaaagataaatgaatttggtataaggtaacgtgtagcatagaagaaaacaaaaacactcaatgtaactaacatgacaactcaaagacagtaaaaaattaaagattcaaaataaatacagtaaaaatgtaaaacccagtataaaagttgtaccgtttaacagtataaaagtaaataaattgataattttagtatgtggtgtaaattaaggtactcaattagtttcccaaccaaaaaaaattactactatcatgtgcattatattttagacaaatttttaaattaaaggataacacactcgttattttattattgagaatattaaaatatatagtgatatagcatatatttgtaatataatagatccacatccactgttatgtgtctaaagtctaaacccattatttagagttcatttactctccctttcgggaaaaaaagagtatttactggtaactacaatatcagatgggaatatggtatgttgatagagaacttggacattgaatggtgtaattaaataacaatatagagttggtagtaagtagtgtaatgtgtaataaatgaaaagatgtctaatacgtaacaacaacttaaatgatctggtgcagtgcaagcaacacatggcttggctaatagattatgcagcagttctccctatttatatgtacaacaaaagtgggtttcataaaggtttatactcccatattgatattcccaccaacaggcaaacatttttgtaatattaacacaaaacaaaaagaaaacaagtggtcaattcgagaaagatccaaagcttgaaacaaagataaaacaaaactcaaaaaaataaataagattggctactctttttttcttgtttttttaatttttcctgagggagatggcaccactacaataggaccagttatgtgaccaaccaacccaaatgcgcaggactaatcaaattttcatgaccacaaagtgatgacgatactaaagaggcttgaacatataaagccaaattttctcagttacaaatattagtagaagaaaatgttattgtacattgattgatctgatgaactgaagaactcccaacaaattcttcatcatcttctgcagggtgtttcttttgaatcttggcatactaaaaaatgactacctactctaagtaactctccgcatcatttcgatccctggctgcagatcatacaccaaggtagtttggcttaaattaatgccatggaagaaggaagaccaagagtagagcttctaccatgggctttctttatcacaaaatttaaaatttttaatatcatacactctggcttcccgatcacagcttttccaacagagcaggaagcttcagaaatcctctgtatcatcatccttgattatagtattcatcctatcgtcaaggcctgaaccgggggcaacctcatttaagtcgcccggggcaatatcatttaggtcaccagtggcaatctcattcaggtcaagaaaacgccttttctgttgtataccttccacttcatcttgacctgggctatttgacttttcaggaggtggggtttgaggtttttctactatgtcgggataaccttcaacaggctcgacacttttcatttcttgctcatcatcattgccaacatcatcgccatcatcattgccatcagactcttgagttcccattgaaaaatcaccattctcacttggttctgagggctcatctgatgtatttgatttttcacgtttcattgaatccacttctgattcagacacttcgtactgtcggtaattgattcggtttctggtcgcccttttacttcgtcttagacctgcctgaaggtcatcaacagacctcaacttagcttccctcctggtacgacctggcaatttcttaaattttcggggctcatcactatcctcactaatacttaatgagtcttcttcctcctcttcttcctcttcttcaggattttcttcctcaaaacgatactcatcgtctccttcagagctactggacaatttcttcttccgtttacgccgcatatactcttcatcatatatagcctcacccattatgtcatcatcactatcaaactctgcatcattatccgaaactgcttctacaaaatctttctcagaatagcgttgaggtctctgtctccgccgattgctacatttcaagatgtaaagttaataacgagagttttcactgagaaaaataaagtaaaagaaaagacgcagaaaaaaaaaactgaaccttctatccattggatcagatttatcatcttcatcagcgtcatcataatcagaagatttgggagaaagagcactaaaaccaccatgttgagaggaatgtgaaggaccgctccatctgccattagtagatacatcatgttttaccattccttcccttttgtataaaggttctggagatggatgcttccgcctaacaaagaataataaaatatcaaagacagcactaaggtaagtcaaagacgattctgtataaagagtaggtgagacaaatcaaaaggcaatgattttcatactttgtaatcttgattgcctcattgatggaccgatcataatcatctgcaataacatttgagaccaatcagatcatacaatcattaacacacaaggcttcagatcaaatacagatgattgtaaaggggaaaaataagaaaattttaggatggacataagttagctagccttttgaacagaaacaggtaagcgagaaatttaatttttttaagtcgctcttaagcaaaatatatcaatgcaaccttgcagagcaaattcatgcattccacctagaggaaaatactcttctgggtgtgaggatgaacaacatgacactggtgtcttttaacaaaagacagaagtcaaacagatattttcttccactagcttttagcccacaaatattatcgtagattttagatccatgtaaaaatgatgatgggaaaggataattcactgtcactatattgcacatatttatataaccaaaaatttaaagtaaaatcttatcaaagaatccacattccaatgccacaagtatggcatcagaggggagaaaaataaagcagcttaagccatttggccttaccaaaagtgtatgtgacaggttttctatctcgaagggagcgccctggagcaagcccatccatattgtaaaaattatcaagaaggagagcttgtctgtgctgcttcttcagtaacctctctttcctctgtacaaaacaaaatcaaataacaaaagtttatcaccccccaaaaaacaggaaataattgatcaaggttaaataaaacaatgatagcaacacagcaaaatttccatctcagaaaacagttttaggtaccttatgaaccctttcaacctcaggaagcatgtctatctttaactttttccctagtgaaacctctgttctattagtacttgagaagagtttctcctgtgagatcatacaatgagcttagaattaaaaagaacagcaacacatggcaataaatattctaccaagtggcagcaaatacatatatatatagatgtgtgtgtgtgtgtgtttgtgtacatatatagtacatcgttgaattttgtttcaggtaattctgtaagaaagaggggaggaaattagagttctgaaaatagtttggattaataagccagactaggaaactgatttacagaaatatttacaatcagaaatgatccacataagtcaatatttgtaaagataaaaatgtcattctgggacacatacacatgggcagatcattcttagcaacttacagaaacatcttggaattcatcaaaattggttgctactgtttcccactggtatgatgcattgagagggacttgagagccctttgatttcgctttcttcacttcaaattttcttatctctctgtaaagtctgtgaccaaccatttcatcatcttcatacctgtagcaacaaacatgagaacgccgtatacaagactcagaccaccaaacatgaacttctatggagaccatttacaaacaaattaagtttttccagtaaaagtgtaaaaccaataccaatcactaagttcaaagaaaacaaatagatagaaaccagacttattatataggaaagttgaaaagtctttgattaccagtatgaaattccatgagagtcacctccaacgcgttctttacgaaacgttgcaagtggaataccatgtttaattgagtggtcaatatagttcctgatgtcatcttgctgcaaaacatcacccacattcaatctaaatgaacatacagcaaaataaatgcagtgaaaggtttctgcaagaaattcacaataaacttggtaactgcaaagtatgattaaaggtttaaaaggaaataatagcaaattagatctgtgttcacgattgcatttatgtatctatatttataaattcaaaatcataatgcacactgaatgtaaatgtaaacttataactgcacaacattttcaactaactcactaaatggctgaaaacacaacaaacaaataaatatgaaggtacacagtcatagtcaaaagtataaccctttttcaaaagagggagttttaagcatattacatcttcacgagtgtatcatatttcattgaatttcaaaaacttgtagcatataaactagcagttactaaaaaattatacagtttggtattgaccactacccctcagtttggtggttaactttaacatattttttttaaaatattggctactctgcatgcaagatctcgctcctgcatacctaaaaaacatccaaatcacaagcgaattgttttcatttcttgaaatataacccttgacagacttcaaaataataataaatccaatataataatattacccattaaaaatatgcattgagtaagcgcacttataattaattagcacactgcatgagctaccccaacacacgcatacaaaaagaaaaaaggaacaaatcataagtgacaactgtttccacttagacatccctagacaaacatcaaaaagaactccaatatattaattcttattaacaattactcattaacagcatgaattgagtatatgaatttataatcggtaagaacagcactgtcccaggaaagattaccagaaaaattgacgaaaatagagaggaccaaatgattatacaagagttcaggcaacagaagacatcataatgcggctagtgccatcatattaactaaatatgcacattaaagttctattattaattaattacctccacacgaatatcacaaagtgctttcaagatgaccacacgaactccgggatcaagcgttttgtatagttcaatctcagccctagaaaattaccaggacaaaacacattagagacaaaaaaaaatagtataatacaggaaagtaagccaatatctatgattgattactcacccatgtgaagcaacgatgggtagatccccatctgcaacctgcaaatagatgctaagtctaattacgttttgcacaatcaaaaaattgatgataccaaatcacagttatgacaaacattagtaaacgaggtgcaattacccaatgccaccagtccctcaactttctgcacaaaacagtaacccaagtatcacgtgtaagtgccattcgtgtaacaggaggtatcgcctgaagaagaatgatagaagttatagggaaagccattgtcttagcagcataagatggtatactaaaataaaattacagattgcagcaatatgagtatgagcaccaaaaaatatataataatttggcacaactgttaagtgtatatgatataaacttgagaagtgaccaaaaaaaagagctagaaaatcatgccacatttaagacttgtaatgcgtggactatgagtaagaatatgaataaaacagatcatggtaataaaagtgaactgggagatactctgtaactttccacaaattacggagctttaatattaagcaaagatcaagacttcttaaattgaaatcaaagtacagtaactataaaacacaaatgatcaattttccagttaagcagagcttctttgcacttaaaaccgcttatgtaatgtagctaagagtcacacacttaagtttaacggtgattaaaaaccgaaactttgcaccattgaaacagcaaagacataaacttgtgcgttttttcttgcattaaactccaatgaggactaaacgggcattggcaaagatgaaaacaaggtaaaagagttgcacattcatcaaaagaagccatttgtattcaagacacaaaaaaaataccaacctttaatagagggatgtgaatatcactaagagtgtcattgggattaagcaaagccgtctcaaactcctcagctgagaactcggccgaaatattcaaaaggggtctaaaaacctgcaacgaaagacaccaaaaacttaagccctaaagggacgcagacataaacccccaaagatcgaacacttgacaaaaccctcacatgcaagaaattgagtacggacgcgaactcccacatcgaacgcagagtccaccgcggcaattgcgccggcggaggaggttccactaatggcgtcacgatcttactgctactgcattgttgctgatactgcggcgactcatcgcccccagcctcattcctatcttcctcctcttccttcttcttcttctttaaagccttcaacctccgctgctcggcggccggctgagacgccgcgtagagtctcgcggcggtgcgtatggtgcacgcgcgagatggacggttgctcctggagaggggaggtcctgttcccggagctacggccgcagtggtagtggtgtcgttttgggtggccggagtgccgttttggggcttggactggtcggaggaagggtcaccggagatcggggaaggggaagcttcgcgggacatggttgtagggagatcgagagggtttacggcagttaaggtgggattacacgtaggggatcagcataggtttgcattggaagaaaataaagaaaagaagaggcaaatcaagcgagagagattgaggaaaacagagagagagaaagttgcgaaggtaattcctttttttttcgtcctttttttttatttatttatttatttatttattttggggtgtgagagagagggagggtcttctcggccttgtgttaaatgtttttttttattatttatttttattttttattaatttcaaaattgaaaaagaagaagggtatggtggagaaggaccagaccagcaaagttgttttataacccatgctatgaacaacacctacatatattatatatgtgttcgaagaaaaaagggtttccttatgaactggatttaatattggcactatatttttaaaaaaaaaattaaaaacaaaaattgaaagtgaaagaaaggtgagaaaataagaatttcattatgagtagtaaatttattgtttgatttttattattatttttttaaagtatatttactgttttatatttaatttactgtgttttaatgaaattttaagaagcctccttaagtgcaaaaaaaaaaaaaaagcacaagactcaaaacagttgagaagatccgatcaccaaatcataatgtgatctaaaaataaaactaacttagcaagattatgagctacagtattatattacgtttacaatgcgtaaaactaagagcatggacaatactacaaatagatataatatcaactaacaacatacctaacttcgttgacaaatgagtcttagacgaaagagcatcacaaactcgctaacaatcagactcaacttcaatatccttgtaacatagcctcaaacaaaaaagaaaatcataaagcactgccaaagtttttgcaaccagaggagagagagaacttactattatggtagttgccgaagacaaccccaaccctaatcttcctaccaactcgagtaaccagtcatcaaaattgagtttgagatagtcgaccagaggtaacacccaacgaaaaatcgtcgagcaggggagagaaggccccttacgaacagaacgcccacccacggttgaattcgcttcgacaaacgagaggtgaaatcacatgaccagccatacactccttcaacatacaacaatgcatgcccacgaacctattgattgcgaccataccaaatgcgccataacaagatcaaaaataagctcatctcgtctcattgaaaaagagcttcttactcccggaggaaagcatacaaattcatatgagacctaacatgttgggattttatgccttaaataaaactcaattcaatataatcggattactaattaataaaagataagaaatcattttatgttgcatggttcacatgatttttttcatgattacatgtttaatgtataaattctattaaatctagaacatgtagttattcatgattatagtgttgtctacacagtggaaaataatcatgattttatgctttaaagtttaagtctcatgagttgttagtacactgaatttatactgacatgataatcagcgataaaatttacttgcaccttggataagtgttctgtcttttctagggcattagcaaagtatgctcgtatcggatgtatggagtatacagactggaccgatattgtcaataaatcttaatcctgagatggctagattctggcttaaatgcattatttgtgttctttgacttgtttgttaaagatgactaatcggatcgacccaatgcttacattttgggtaacatggtagtacaattgagtgggagggactaaatcatagacatggaatctataacttatataactattagaagt

SEQ ID NO: 295807 - DNA, 7457 bp, Cannabis indica
aaattagattgagctgcaaacaaaaaaccccaaaacttgaacaaattgaaacggaacaattgtaaacattactaaacaaactgtttttccaagtaaagagttatttaatccttaaattcaattgccacagaagtccagacagaagctaagaacttgatttattatactaagaaaatattcaagagtttcttcatttagcaaccaccaaattaatttcacggaaacaactaagacaagacaagacagatttctactcttctaaaagatttctagtctagaccatgacatagagacacaaattaaagactacaagtcttcaacgtataatgctgctactgaagaaaaagtgcaagcaatactatttatgcattctcttctataagagtgtttgacatgtggactccactaaaatatctcacaatttaataatattataagtgattcttggaatccagatgcaaacaatgaaaatttgaaaaagaaaagtatcaaatagagaggaaaaaacaattcatttatcacttccatattatatgacatggaaatgtacaatgtatataatcatgtcaccctaaataagcatattatgcaccatatatacattaataagtaaattgaaatacagagataacttacatattttcgcaagaatcatttggacgttgagaaataatgtctttcgttgataagtttaatgataaatcaatctcaaatgttcctttggcagattggttgatctcaaggaccttgcatttgacaaactctctttcatgatatccggacaatggatctgacacccatgagtcagtaagttctgtataatgaacccttccatacgtgtgaggaccaatttgcacaattaatccaccaacaccgggaagtactttggatactctgccacccacaatacatccttcacaaatatgagcagtaacattttcatttgaaacggaagcttgtttatcatctatcgttgaaactccagctgaagctttatcagggaaactatgtggaacaagccgcaatagctttttatccttgttaacacttaatacatgaccagatacaacttttcccacatgaaattgcttctggaactgatgaagttcactaggctcacatgaagtgtcgagaataaatagttgagctctcacatgtcgagatatatttagccacacccattcactgtccactttatatacataaccagtgacaaattgtccagaagagaaatcaaacttttcaatcataagcttctcctctgtttcataggagcctgaatttaaatttaaatgtaagagagtataagtgatagaatttcacattaaataccatttggcaaaaataattaacaataaatatatatttatttatagccaaaatccattagaaaaacacagattaggaaaagtaatgcaagcagtaaaggaaagctccaattaaagataactgcatttatctgccagatcagcatttatgcggatgaaacaactagggaatctctgatctgagtcaacaatagttattttcttaaaataaattgcttaatagcaaaagacataacttaatatactagtgttaaataacaataaaatagtattaagtgtaaaaaaaccttgcacaaaaatctcaatatctatgttacctgagagaacactcggtttcatggaaagatcaaactggtagctattctttttgctatctgaattattagcctttccaacaatccgtgcattcactgtttgcccaactctaaagttacaaaatggattttctgaaacattatcatcatttacctgcccagaggacatagtttttgatcaaccagtgacaaaggaacatgaataagatggaagagaatttaaataattgtagatcaataaaaatgcaaaaatagcaaatgctaagaggttttacctctgttatgtgaacacgcccatggagtccaattccaaatttcaaccttagttcaagtggcctgatttcagtaatctgggaagaaccagaatgacataaaaatatcttctaataattatttgtgtacattgagctacagaaaaacaactctttgtactttcattgagaatcaatcagtgccaactggtaaagaaaaaaaaaaagggaaagaatcatgtttacttacctctgcctgaacaagagatcccacagtgtagcttgacttcttttttgctctttttgagcttgatgtttcagattcactgatcgatttaagaagcaacagtagcctccctgctgttgaagggcttggaagagccataacagtggcaacaacactgcatgaagtgtaacaattacatgtagcaagccagtcatcatgtcattcatattcagcattggatatgttggatatgtacattcatacatcaaaatcaagtacacagaaaaggactcgagaacaagaggatagttttgaactcaaaatatgtcaaatagttcagaaagtcatatgctgtggtttcaaaagatgaaagtaatagagcgcacctttgtccattcagaaattgtttatgaggaaacttctggacattatagtcagattttgatgcatatcctaaggcataattatattcgggtattgagagaacctaaaatgggcattataaaacatttttagaaggggttgaagaatatagatatgtagactaaaaaagataaacaaataaagcagacttgccaggtaatcttctttgacaatttcaacaacagcattaactgtctggtgaacctccaagtccttggatgcttgtcgtttacgcttctagaattcagacagttttagattaacaatagagtaaagcgtggccaaaatgaacaaagaaagtctaagccaccaacagatcagaatagaaacatgaagaaaacaaatatcgaaagaaaaatattcaagatcaatgcaatatttaaaaaagctaacgtaagcatcaaagcattttgccttgataaggtgaggcatatgcctcaaatctatgttgaaataattttttttttaaaattataaactttaaacactaataaacaaaaataataataacataaaacaaatgataaactatatacatatataaaatctactaaatgcttgaactagcagcctaatttcacgaggtattttctaactaacacttagattttatgaataaattactactctaggcacaatttctaagtccagtacttagatagaggagtcactcttgctgcaccaaacataataatgcaatatttattagactagttttgttttggtaatcacaaataaaggcccaaaataagaattatatgtgaggtgtaagcctttctaaggcataaggtttgaggccttttttataacgtaaatagacaaaatgtaactgctttaaacctttttatggctttggctgtgagagctttcttctctgcttttggcaatgaactctttattgagagacaagtcgaccaaatgctctatttttgaaacatctagaacagttgcctggataatggagcctgtctctactattataccagctactgcaaaattcatacagagaaagaaacacaacacgaatcagaacaaatcaacacaccaccagacagcccagtgaaagaagaaaacttacgctgatggggggttataaaacccaagacatcattatacttgtcaaagctcacaaccactccaatatcctttgtttcttgtatttttccctcaacaacacagccaatgttaaatccctcagtccagtttaactcagatccattggaaaccaaggattgtagattggcaatctgttataaataataatataaaaaacatgatcaaaactataatatgcataaatctaaactttgacgaagtaatgtagaattaagtccctgaataaaaaggaaaaaaaaaagcaattatcaccctgatcgcagggcaaaaagagaaaaaaaaaaggaaaggaaagaaagaaagcaaggaaaaaaatcaaaaggtattgctaatttgctgcaatcaaataatatacataaacactgaaaaacgatatagtccatttatacttgagaaatgatacgtgtctttgtgagctagcaaggtaatcttaagaatatcctaaatgaaagctagacattagaattcttatgtaagtagtacgtgaagaataaaaagtttttagcaagcagtatatgggtgcatattagaagattttatctaatctgaataatgtatccagcaataataacaccaggccatagttacgcaagtatatgtatataatacactacaattttattgacataacatcttacttgttcatagttacgcaagtataggtatataatacaatacaattatattgacataacaacttgttcaaagcttttcctttttattttttatttttctttaaaaaaatgaaagaaagaaaagaaactaggctcccccaggccaacaatatttatatacctagaaactacagaatttttttgtgagcactcgcagagggctcaaacctcagactttgtgttgaagttatacagaaaggacagaagcttcagctaacaagaatatccaatagcatcaaataagcttaccttttcctccaaaagaaagaaatcttgcatgaatgatgcatctgttgaagagcaagatgtctgcttcaatgaaactgttactctaccggtttcactattaacctgcagaataaacccaatgtgatgatgaatgataatcataaaatgttttgaaaggttacaattcagaatgatttaatctcaaagaggtcaccaacatcgagtatattactgcgcacggactgtccaatgtaaaagacttcaggaagattgactttgtaatcatcagttgcctaaaaaacacaacgcatttgagtgcccgctcatcacttaaaaggaaatgatgaaaactaaaataaagtgaagacaaccttatttctaggagagaaaccagttaaacgaccaagaaagcgaacaaagcagccagtttcaatcaggttgcagatgtagccctgcttcaaacataaagatttgtaaataaaaaacactgaaaaccaaattgatgtaagacacctaatgagattataaactttaatttagtcaggaaacaatagtatcattagattcgagttccatttggtaatcccgcatcaaactttttttaacaaaagaaatatcacattcaatgtttatgatttagtcaggaaacaatagtatttttagatttcgaattccaattgataatcctgcatcaaacttttttttaacaaaagaaatatcacattgaatatttatactttttactagatgtggttccaacaaagaaaatttagacgaccatacaatcataattaaatcaattacttacgtggacaacagagttagggcggatctgactgatctctgatggaagctgctcagcagacttgacaagagaatattttgcagagagtttcaaattgttgctttcattatcttcattattgcaaaatgaaaaagaagataatatctaacattaatgtcagtcatacgaagtttatagtgcagtaaaagaggaaaaaaaccttcaattatttcatataagttcctgtgtcaatttctttaagagcacatgctttgaagtccttttaaaatgtggtagaagatgaatattaagaatggtgggaaaggaagagagcttttgttctacctagtagcaccaactgatcaaattcaaatccaggctttagtactgacttaagcatatcagcttgccctacattgataaaaatacgatcagcatatatattcaaaacaagaaaaagactgaaaaatgctccaaccataaatagataaaaaatattataccttgatgatcagccaaatgttcagttgaaattgtacccttcaagtaatttttcccattaacacaaactactactgcatttggagttaccacatcaacaactcctgaaacaagtgtaccaatcttgataacatcatcctcagaaaccctgaaaacatgataaaggagacttgtcacaggacgtccaacattttcccccttcttaagctattcaatggcatacaactgttggagtttccagattgtactattatttacactgtagagaagcaaaccttgaaggctttattatgaaactaagattgatgcgtcttgatcctgaaacaggacctattatcctacatttgaccacttgtccaacatgatatattgagctaggatcactccctgggtctaaaccgagttgagatctggttcaaaatgagaaaaaattaaccacagcagcagaagaagatgaaaaatggagttagttacagtagctccaacaacaggagaagaacagccaaactcattcacaataagaactaaagcttctgtatgcctacattctaacaacaactagtatgtacctagaagggtaaaaacagctgcaagactagtatttaatgtaagatatcttccatgctagccgtgtgtcataaagggaaagccgataaagtaactctcaggatatcatttacttttctagtttgatttacattacgtgaaattctaactcctacaattactgtcagcaagcaagcatgttatactgagttagctagaaaacacaactgttaacataaacttttaatgctccaacaattatgctgttaaactacaatttttttgctacattgttatcatagaatgcaatgaacaagctcattctgacatatctaacgataactacgattcctctcaacaagcaaggttgttatagtgagtgagctagaaaaggcagatgtgaacacaaactatattgcaaggtttttatcatagaatgcaaagaatatgccccagtctaacatatcgagccatagctagggtaaccatcaacagacgctatgaaaagaaagatacaaaaccgctaaaataatcagtaagtctaacaaacaaacaaaaaacgtataaacttagcaattgggactagccttggagcaaatccctggacaccactgtaaaatcgaacaaagcatccatgttcctcaatctttgttatccatccatgtgttattaatccatcaattgcatcagcataagagctaacaatgggaagtttagatttcactagcgttttcttgtgtgtaacagttatcctcttagacttgcaaccaagtacacgaaacaccagctcagctccaacctgccgagtgattcaaacaaggatatatgttcatagctcaatacttataaacaaacttaaggaaccattcatacagtatcagagaacttttacacaatctgctagaataaaatcaaataaaatattagttatttttcaatgtagaagtacctgaaacttttttccaggcttagaaagttcaaattcagacatatggcgaagtgggcaaagagccttaataccacctgagaatttcacaattgcttgatagggttcgacagctattac

SEQ ID NO: 295808 - DNA, 2327 bp, Cannabis indica
tataaaaagaaaatttatatttttttcatgtctaacatgtgtagatgccgaaactaggtgcatctacccgagtaagtcgccataaaatctaaaattataaattttttaaaaaaaaaagtaaattttacatttaatatatattcgtaattaaataaataaataaattataatatataatctttcaccaaaaaattatattatttatattttaaaaaataaattaaatttaatatattttgaaatataattatgtgaaacgttaatttagtgtatgatagaaaatttaatgaactttatgaaatattcattaaaagaaatgttctaaatgtataacaatatttgttagactatattgtaaacaaaattaacaacattgttttccaaatttgaaagaaacgtgacttaggcgatataaccgcctttgggtttgtgattttggattgaaggaagcatatcagccggccattgttggcgcatgtcatcaatttgcttttgcgtatatggccttaatgttagctacaaaaaaaacacctaaatttagttttttataaaatatatatgatacggtaataattatgtacacataaatgatatactttttaataaattattatatatacctggttgaagtaagtttttggactttggtgactttcaattaagtctttcaacatcctcaacatgaaatatccacacaccacatcgtcttcttgacgtgggcactaattatttaaaaggtctaaattaataactaagtaaagattataatgtatgaattataaaaataaaataattaaaattctattacttacagtgggttttaaaatttgtaatttatccttaatcagttgaggcatttccataaagtgaaggaaacgattgaaaacagtcattactagtcgcataatttcctcgcggttttggagatcaacattgacaggatcacaacaagcaacatagtaggcatatggcgccaataaaagtaacatccagtgctcgctgcaaaagaaaaagatgattacttaatataagtattctctaaaagttaattaaaatgataagttttaatttacgtacccatgaacccatggaacaaccataagttgtccttttgattttagttgcttacactgatcaaacaagttttgagcacgatcctcaaatgagcctcccaaagttgccacaatattaggattgacaaataaaaatttgtttgtacaattttgttttactacatacttgtataacaacctaataaaaaataaaatatataaatattgttaaacaaaataaatcatataaatatttttaaacatacaataatataaatatatatacctcatgtaacatacaacaacagcttgtccaatcttttgcatgttagtaaactgaagtatgtcgtccttacatatgtaaaaatttgacaaatcttggcccaatacttccttctctatgattggattaaaacactcgtccttatcaacccatcgagaaacaatattatgtacctgttctaatggagtctgcatctcttgtgttagatgatttattagaggttgtttctcttggggtagtggttgtgatctttgtaatctgtccccacttgttgtatcatgatcaacctatttacataatgaattaaattaacactttagtatgcaaaaagatcactaacaatagttataatataattatataagcatgtaagatgaaaaattacttgttgatatatatcattagatgtaatgactaaatgacgaggccatgggattggcgttccagcactttgatcaacataaatgatatctaaactaggacatgggatagggacaagagtcattctcttcaaaactttaataaccataacagtcatgtagtttgtgcctggtagtcctttgtcgatgactataccagatgcaacaatattagcctcgttaccaacagctaattggcaactagacccctgtagacaaggtaattagatgtacaaattgaatataaataaatataaagaaagtatagagtaattaatctttgttcatacttctcagtcaaaacaaatatataattataaaaaggaccaatcagtcaataaataaaaaaataaattgtctagaaaagaagaaaaagaactaataaaatttcttcaataaaagatcataaattgggtgtaaccagctgaatgatagactattagtcttatttttttttattttatatattattttttttttgaaactactagttatggagttaaaaaaagattaaaattgaaatatataaaataatataaaatagatgagaagaaagaagaagaagatgaagag

SEQ ID NO: 295809 - DNA, 2427 bp, Cannabis indica
aaatgtagcataaatcgaccaaaccaaccaaccaacgtgcactcttacttgggatacgtaatttggcttcctttatttgagtccaataaacatgtacaatatagctataccgatgtagttttataactataacatgtgatccatgccattcaattatacttaaatcttttataataatttgtatctaaataatatttattttagtgacaatgtatccttttgtatatcacaaaaacttataatgtttagttaaaagatagagtactataaaactttttaagatgtattaaaaactatccagattatgatagtcttaccttcgtattcctgtctctctttgcagcataagtaaataaggaattatatatgctgcaaatgagatttttgttataccatggcatggcgtgaaacaaacagagcccaacatagcccagaacgaatcgccgacacataagttgtatcatataatattgtaataatgtatatgtatacagacaccatatatttatatataaatcagaattaatgccggcaattcatccttggctttattgcactctctttgtgttcatgcaatgcccattatagtacattacatctttctctttctctaaattatatgttacatgtgtacaatacgtagtatatatataggcaaagaacggtgcatgtacaacataaaaaggaagatattatacatatatatatttaaatagaatcttcaatggattaggaaattccttgtcgagtgatatcaagccactagctggctagcttttttttttttctgctaaattaaaggtacatcattatgaccggaacccatgccacatacatgtgatgaccatatggttttgttctataaagaaaatactatatttggttcgatcggtgtattcagataactgttgacattttttcttctctcgtggtatctcaataaaattctttggatatgggtcaacgtaaagtaacttgtagaaaaggcatataataacaaagagatttgattattatgttatggggaatggttgacatgcatgctatggacttatcatatagagaattcaggaatatagaatctcaaccacagatattgatgagatgtgaggataagtactgccgattatgataagtggttttcatttacaatatattcttacaatttttcagatttaattaatttatatgggtttttttttctggatttttctttcatgcaattttcaatttcatttgtttagttatttttctatcatttaacttgtcacctctaatttcaggaaaataaccgaaatcactactttaagtttaaccgtactactttacaaggtgttagaacttttatgataaaaattgaatagtatgatttagtctcctattttttttttgagaaagcatctattattataaattaaagaaaatcgtttacaacaatagaaaagatagccgagggtaattcctcaagccaaatacaatcattatcctgtactgaagcattttttgctaaaccatgagcaacatgattagcatctcgtctaacatgacgagcacaagctaaagggagattggataaatgataatgaacatccaaccaaatcataaaaataagacttaatgggtcttggattgttaattgcattagcaagaagcaaagaatcagtttcaatgaaatccattgtagattcagactcctagcaaaaattagactataaaacatggccttagcttctatttcttgaggcctatagcaaccacgccgaagaatctcgaataattatacctaaaccaattcttttttaagaagaatcaaaggctgcatcaatgttcattttgaagcaatgcacaggaggaggttggcatttaattggagctgcaacactaaccgaatgagaatctttcacaccagtagaggaagagtgtgcaccagtagtagattgtatgcctacaacaccagcataagtagaaagatctgctaaaccagtagatggtacaccagcaacagcatcaacagcttcaaaacttgcagccgagttgagttttgcagcagcattttggaagttgataagataagctaatgccttggaatggatttcaatttatgtttgaggtgatttaccaagaagaatattgttacgatcataccaaataaaccacataatgcaaaaaatcttttccaactcagatttggtaaggacttgtgggaggtgaaacaaaaattcctctagtttcaaaccagtagcagatctcagatcaaaagaaaatcccgaatgaagccacactgatctagcatgtttgtgttgggttttatgccctaaataaaactcatttcatgtaatcagatttacttattaataaagatcagaaataacattttacgttgcatggttcacatgatttatttcatgattatatgtatataatgta

SEQ ID NO: 295810 - DNA, 1141 bp, Cannabis indica
agcctagtggcgattatttttgaaatgatcttgtaggcgaagttgcaaagactaattggcctaaacttatccaccatgcatgcgttctcttctttagggatcaaacaaatgtaagtgtaattgatttggctgtctaagcaaccatccgagaagaaagattgaaccatggaagaaaccacactaccaaccacgttccagtacttcctgtagaagcaccccggcataccgtcagggcctggggcctttaaggggtgcatggacgcaatcgtagaagtgatctcatcaagcagggggactttcttgatcatatcattatcctctcgagagatcatagggttgaaaaggagatcaaattcctccccaatgatcgagttgcaggactcgaataaattgctgaagaattcattaaaaatttggccaatcctcttttcattacgaacccaattatcgttgttatctttgatggtcacaattttgtttcttcgtctccttataattgtcgatgcgtggaaaaatttagagttatgatcaccaagtttgagccacatttctcttgacttctgccgccatatactttccttagggagccacagctccctaatgaggcgctgaattgtttcttcttcagcagataaggccaaggagattggctgattttggatccaggccaagcgggattccgcttccttgatctatttttcacagtcgccgaaaacatcttttctccatttctgcagagctcgtcgggtatcactgagttttgcagagagtttcttcccaagagggtcacaagtgccccaagctttctcaatggttgtcaaacaagacggttctctggtccaagcttcgaagatcgaaaaggtttatagcccaaactagttctgtcactggtatctaccaagatgtaaccatggtcagaaaccgtgatgggggagttggtgaccgaagtatttggataagaagttaaccagtctcctgaagccgaagctctgtctaatcactacaacaaatactattattaggggcggaacagtccgctggtaaagatatgagattccgctggtaaaagttattaccggcggggtccgtcggtaatactccgctggtaataaagggtcgctattcatcattaataccagcg

SEQ ID NO: 295811 - DNA, 6805 bp, Cannabis indica
atgtggtcatttttcaactagggacattttacaatcgttttttttcgagatttagaaaactacttttctccagaaaaaatccatactcatctatctactacagcaaaaatatattattattattatcaagacattaaaaagggtgaggtgatctgatcccagaactagttaagagaagagaatttgaaggctaatgccctatttcaatccataatacttcctatcgcctattcgtctgggcgtaaatctgagcccaaacatctccttagaagcttcctctggctctccagaaccaaccagcttcacaacaacagcagcgctttctgtgatgtgattaatgtcatttgtgctggaccacaagcgatgagccaactgcaatcttctgtttttcgtgtttaacgcaataccccactttaggtagatgttctctctttcctgtttggagagcttcttcagtaattgcttagcaagcattagcctttcacggcatagtgctcttacactgttcacaaaggttatataaccaaataagtttccatttgttaaatgttttgcttaataaaatgtacaactttccaggcattgagttatctaccttgatgcataagatagagttcgaccatcctcgacagtttgaccgccacgagaaaatatgtctctgaggaaggacattcttctcagctctacctctatgtaaatggagtcagtctgatcacctctgaatagtaagaagaaataagtcctgtgaactaatgacgcgttgcaagcatgccagagttcgataacctctctttggagcctcttgaattcagaaggccactttggaggacttcccacttcttcattctgaattgggtccaatccgacatcttttacatttcttgcaggaactatgagcttatcctctgtctttaagacctgttaataaagacaaccattgataaaataaacattaacttatttctattcaaaagcagttattattagatgcatagacagtttatgctaaagtggtagtacacaaacctcagaatcaggaattgttttctccaaagggtaatcctctgtttcctctactctgctagatgaagaactggtgttagtattctcatcatcgtgtgaagatttgatatcctgtactttgagctcatcaacagaatcagtcaaagcagatgcatgtgaagcatttcttgataatgtctttggtgaaccatttcgtgataaattcgtatgtgaaaatgaagcatttgttgataacgtccaatgtgaatcatcaattgacagggtcgtatgagacgttgaatgtgaatcatttcttgataatgtcttatctgaattaattcttgataatgtcttctgtgaaccatttcttgataaagtcttctgtgaatcatttctcaatagtgtcttctgtgaatcatttctttctggtgagccatttcttgatagtgtcttttgtgaatcatttgtcaatgatgtcttctgcgaatcatgtcttgataatgtcttctgtgaatcatttcttgacaatgtttctggtgagtcatttattgacaacgattctggtgaatcatttctcaataatgtcttctgtgaatcattcactgacaacgtttctggtagatgatcatttatcaataatgtcttctgcgaatcattgtttgatgacatttcttctgatgaaccatttgttgataatgtttcaatgctcacatcatagttcagttggggaactttcttcggcaaacccccggctcttcctgtgaaatttctctctactataactggtggtgtgctctcatccttttcttctgtatcaaaccattgtgaacttaaacgcgctttgcaactcctgctcctagttagctcccagcatgagaagccagacatacttttatccactaaacattgagatggtctttctgaagatggaattagcaaactgtttttgaagctattcgaaacttcatttttcatcaaggtaggtgatctcatttcttcattcgtcacatctccattctcaaccactgttaattctgaaatagcttctttttctttgggagatgacacaattgagtttagagatcttttcgggcttgtatatgatgatatgtttgactcaacgtgtctgtttgtgttttgctcttccacttctatacatcgaacttccttgcaagtgtcatctgaatttctatcataattttctttattttcctctggcatatcaatttcaacaaattttggaatgaaatttggtattctgaccgacaagtgtggagagggtgaatccgtgggaacggaattttcgtcaaagtcttgcagttggaaaaagctatcatcagagatattgctctgtccatctgtatcaaacgaattggttttggtatggtgatcaaggcctttagaaccagcaaaaactagggtccgtggtgctcgattttcaaaatcccacgaatttctcactcgcaacttggggtaatactgatccagatccacctaaagtagtatcaacaaggaataaacttaagagatgaagtggggtgaaaaggctagatcactcaagcataagtaactacacataccgattctgatcttctatcttcttcaactatccgcagcaaatctttaacctgagactgagcagcatcacgttgcaatatgacctctgatatctctttcttgagctgcatgagcggaaaattagagaaagataaatttatgcttcagcaagaaagctctattgcatgaatcatgtcctaatatttatgttcatagatttacaatggctcaacttggtttgagaaaattcaagtgttaaatgatctattttactgatctttccttcaaaatctcattttttttaccttttcaatctgaaggtctttctctatcaataatgcagaagaatcagatgaagccgctgttgatcctgtaaagctcaactcactctccaacctagccagttctctttgtaacttcttcaccaacgctttatctgacataactacattgacctgtgcattggttgccacttctttagcacaacttgcaaacaatagggtatttcttgattgttcgacgtggcttctggctggactcaaggtacagatgattgcagttctagcatttcctcctaaagaggactggagtatacgggttagctttgaatctctgtaaggaacatgaccatttcttcccttgctgcattaagtctcaaaggattttaggaattagcagcagatataaaaactatgtaaaagctagagcatcaatttagtagaaaagagaaaattcaatggtagataatgattaagactcaacactgtataacacatcaacaggaaaacaggcgtttagctagaaacataaggagatatcttaacagctttacaccccagtgagagaaataccacatttacagtgcatggtactttaactgaccttagcttacggataacagtgcctagagtcagtaaactgcgatttatatggcaaccttctttcaaccttgcaccagcagataatgtctgagatgcacgctcacttcccgcaagatcaacaaaattctgtacgcataatagcataaaaatcaaaccagttttaaacgtgtaactctgttatcttcttgaactaacacatgaacatgcatagagaattagtcctaccactgtagctgatagagagcttgatttgtctcttcctaaaaactcgcgagttgagctttcaattatctgagagaaaaccaaatcataatattgtgatgtaagaaaaagtagttatcaagtggtgagatatgaactttgaggtgataacatgcagtcataccagtcgaataatctgatgcgatcttgagctagcttcattaagtgatgtctcgcctatttgtctttgagctgtaaaaacaagtaatgtagatgttaaaactttaacaacgccccctctcagttatccatcgggaagaagagtaaatacatccttaccttcacaaacagagagaagttctttgaaatggttccagtccctcagtgtttcctctgtcagcctttcaacgatggtccctctctatcataaatggtaaagtcagtacaaaatttacacatagaacgttaaacagcacatgacaaaatgatattcacctccggatcatcgagaagtctaagaggagtgttatctgcacttagtaggtctctcacagattcattgtagatctccatggccgaaagcttcataacataatctctttcattgtgctacattcataaaatattgttttgtgtaagaaaacaaaagtccaaatccaggaaaaggcaaagaccatttatattgtacacaaacttaccttctctacgtaatcatatatatctgctactgtatactcagtgataccactcatggtgtatgtctttccactacttgtttgtccatatgcaaaaatgctcgctgcagagtgagtttcataaaataagattatctattttcaataattatgttcaagaaaagttcatgacacaatagcaatgggaaaaaatcaaaaggaacaaggtgttatgcgcttgtcctgtactcaccatttataccaccgacaactgaaagagcaacatccttggctccttcttgatacacctgccttgtggaagaatcaaagctaaatactctgtctagtaccagaaagaagaaaagtcagatcagaaattcccattgttgaaaaattgtcaaacaaaaaacatcctataattgagtttatatccaatctaaccagcaatgtggagtactttcaactgaccaattgagaaaaagagagagaaagagagatttgattgacaaaaaagaacttatttcacagaaagtaatgccgtaatgaaagcacccttaccaaatgtataagcagttgggtacatggaacgctcagaaactgaaagattattcctgtaaatgatggttgtatcattgatacactcccaatctgacacatcatttcttgcagcctccttctgattcaaaggtcgaagccgaattgaaacaaagattttctcatcacattctccctgtccttgcaattgctcccctccaccaaaagaccccatatctacaccttaatttatcttcaacaaaaaacccacctccaaatctccaagtaagatttctacgagacaataagtcaagaaaccgtatgttctaatggataccattaatcattgattaccccctcttgtattgtggttctgagcttctaatataaacgaacaacctgctggttttcacaaaacataacaaggaccgaccaaactttagagaccaatcatcatttgcattaacaaactctaatcatgggtcaatgatataattcatcaacagtactttgtctggagtaggaaacccaaaaaatttctttatttattttttaattgaagtgtcaaaacaaatacatatacccaatgcacatacagacggttctctaatgtaatttaatggagtttttggagttttcccaaagggtcccaagttccagactgtcaaacataggttttcatatataatataatacaatttttatatttatatatatgttcttaaattactaattaaaaaattataataataataattaccttgaagattgagaattcagtcactttcaaggaatgtttgcgagctgtggaagattcttcatctgcagagaaaaataaaacgagagttcgtgttaactgaaaaatttgtagaaatggatttgattttctgacgaaatgcctgtttcatttttggagtttatattaggatcttcctataactcatcctgtacaacaaaaatccaaactgtaaatcccagaaatagaaaattcccaaaaataagttattattactcaaataaataaattcaacattgtttttgccatacacaaacgcaacacattcacacccaatatccaatcaatttaattcaaatattttgacaataattcaaaattagtaagatcttcatttcacaaaattcatttaaacaaaaaaacactaataatagcattttctgaactcgattaattctactttgactgtactcaaaaagtaagcttcttaatcttgaaaactgaccaaaaaaagaaaacaagaaaccaaagaagaaagtacaggaaggaacaatgcatcgacgttaaattaatggaaatgcgagtccaatccaaaaccagatcaacaaatgaaaaaatccttcaaagaagaaaagtccaaagacaaaacctgtaaaagcgtccatgtggagagaaagaagaaggcattactaactttgtgtgtgtttgagtttgggttataaattaaattgtggttaaagtggttatggcgtctgcttcttttgctaaattgttagttggttttcgacctttcattgcttccctctataatttaattcattcttatttttatttaaataaaataaatgaaaaagaaaattcagaaattctcttataaattatggggtggttgaccccactaaaatgaaaaatactaaaaggtatgactggtgtttggtattattctatgtgttaatatcgttattactcaactaattatcaggtcccatatactttaaaataataacatttaaggagtatcactagccaatcacaaggcgacatgtgtagaagtggtaggcaccactggtgtccaatagcaatgttctacttagatgcaacatttagaagaatttcttagtccaattctttgcataatcgcgtaccttatagctatttaagacattctgtaaaattttgagaaattcagaataatttacaatataaaatttaatattcat

SEQ ID NO: 295812 - DNA, 6063 bp, Cannabis indica
tttttttccctttccttttctgcttattagtttcgatcacacaaattaaatcataaatcagaaaaatcattcgctgaaaatgaaatcctctataagtgaaataagaaaaatcatataaaaaatagagctagtcatataaagcaagaattgagctattctttcggacaataaagttttctacaaaaatagatcgtctaaaaatatttctctttattcttggagaatagtctgaacctaaaacgaaataaaatgaaaaattgcatagagtgaaaatgagatgcaaagaaactcactgttccattccaatctgcatggtatacttccccatacgaacctaaaaaccagaatggaagatgggaaaataattagactccagcatgaagcatatttctatagctatacaaagagataagatttaatattaaaagatagattatcatgattagaaaacctttcaaaccttacaaagatcttgaaaataaccgataacatatttaaaaaggtaagaaactatgttccagatgcgaaatatatttcatattaaaataacatagcacccaaacaagataacggtcatgcacacacatatgtattgaaccaaagatggagaataaagttattagctgacaaaaaaaaagaagaaaaaagtgtgatcactgttgcacttgccaaaaatattgcattacctagaccaatcctttcaccaataactagatcctcccaaggaatttcacattcacctacatctacatcatcaaatacttgatccatcctatttctggtagaattagctgctgtggaaggaccttccggggccttcaatttcatactggtctccatgaatctgtcatgtgtgccttttctacggttttttaacacattttcattgttttcaccttctttattcacgtatatccaatcagtctgcaaatcttttgaatctctgggtttttcttctgcaacactagtgtttcgatcatctcctgaagtcattgttttgaattcacttgtttgtgccgccgacaatgaacttgaattaaacgcagaatttttttcatcataattgtccttacttggtgtacttgtattaccagatgacttaaatccaccattattgaccttttcagttgaactgctggtagaagctgctaatgatgaaatattataatcattaggttcacgattaattcttgtagagataccctccaaataatcactctctttcttcttaggtacttcattacaagtatagcgacttttccacatcagtggcacaggaggacggccagggacaacattattccttgctctttgaagctcatcagctttactctctcccggtttgttatacacagagttctttcccggtccttttatttggaatggattaagatctgcaaagaggttcttaggatcctcttggttttgattatatggaactacattaatattcatcctcacaccaccatcaacagcatgagctccacggctgcctttatagtgagtattccccatggctgatgatgaaaaattatccaactgattagaaggactagctttattggatactctagaaggaccgacaatgttttcaacacttgaatctgaaaatgcaggcacagattcaattggtcttggtcttccatcttgtacagaactattttcaaccataggattgtggctgctgccctcatcttggaaaggcttttgtgtggaataagaaagtccagtattgtttaaggaatagcgagctgggactttgcttatgtttggattgtatggtctatatatagaatcttttgcatttgggacgtcaactggtataagtgttccaggatctgccatgagatcaaccaaaaactccctgaagacagaaagtgaatgtttaaattcatgtagaagataaaattgaaagcaaaagcaaacaattaggtactgacaaaattgtagaagcttatgtgcatgtcttcatctatatcagtgagttctaagtattagggtaagacttgagcactttaggggctagatataaataacatataatagaaaacacttgagataacacaacaactaaatcaccttgaaaccagtgaacaacttaaggttatcagtttaaagccactgatcagcataaaatggtaaaagaaatgaaaaacattctaattattatttttttctaaagaaaggtaatttataagacctgtgaaaattgaaagttaaaaaaaaaaaactgtatatactatatacacaaacaaagtatgaaggaagataagctaaccatatttataataataaaccaatagaatatacaaaatctaccaataataaaatttccaagtaaaaaagcacaaatttacaaccttccatcctccagctttattacattcacagcaccatcctcaacacctgtataatgactgcctttcagaagtctacaaggcattttgatattgtccgctaatacctacattctcaaaaatgaaaagtgtaagtatacaagtagcaaagacagataaagtgtggtgaagaagcaaagtcgcaaataataaactgcagcttaccttaaaaagtagagcacggtgtcttgagaggccaatagttatagacccaataggcaacacacttgtgtgtagagattgccttgactccatgcttcgttccatccacctagccaacatgacattagcatccttaacaggaccacccatatgacccgcaacaagctcagcaagcctcggaaccaaaatcccaatatcactaacaggacagtctacagcaatgcattgtgtaatttgaattaactcttcaagagccggatcaattgttcgattaactaataaaacttcaaagctagaactcccaatgcttgtttcaagatctgttagagacggcatctttccttgaattgctgtttctgtggagagtccatatacatcataaaaaccatcaaccactttctcttcataatcaagcacattgtactcctggtaataaaaatagccaaatatatagaactttcagtggaattaaaagaaaacagtatctttgtttgaagaaaaagtagctaaagtcagagtacacttggaaaatactacaacaatgcagactgctattcaaaatgtctgtctgctaaatgaaccctaccacctagattccaccatgccaataataaaaggaactgaagtaagtaattagtggatcaaataccaaggataagggattacaaaattagattagtgttaatcgcactcagaaggtaagaaatcatacactacccaaggtctgagcatttgggtggaaatgattctaaatagtagctgatgcgtgcaaaagaactgaacgtccaagattgaattctattcactaaatcagtacaaacatgtaatgaccaaagacaacgtaaacgcttgaacagtatcagttctaaactgagtaatctcaatcgcaatattgtcaaagtaggaataaggtcacgttatttctacccaaattaatcaagaagtcgaattttatggcatttcttgcctattcaagaaacaattcaataacgacgccaatgataaataatcaccaagttaagttacactgtcaaaactagcccccaatttatcagcagccagcctaatcaactacaatccaaaaaaataatcggatcaaaactagttagaagtatggtaccagcaataattaatcgtaaaaccctaaatcacaagtaagacccaaattctattgaattttctttacaataatcaactaattctcacccagtagtgcttcgacagagcctcagcagcagcctcacccttctccctggccgactcgatcttatgattgcccaagctcaagatcgtcgcggctcggatctgatccttttcaggatcatcgcgaacttctgaattcgaagcgctgatcgccagggcaagttgaaactggaactcctcctcggacgacatataatcagaccgagccgttgacggtggagtggtgttgttggtgctcacagtgttgacattggtaaacggcgacggggagggggaagatgaagcactcccgggagaattagcggattgctgagtggaggcgttgcgatgatcggaagaaaatgatggcggagtaaccggaatcgatggcgaagtagctggaatcgaagtcgaagtcgaggtcgaaccttcggtggacgatcgattgggctcgtggctactccctatgtggagcttcttgaaaatgtgtttcatctttatttacttggttgattttgtgagattgaattttcagtatttcactagttttctgggaaactttctcggcaaatttctattgcactttctcggctgtgttctcgttttgaagtatataaagaccagagtcaatcaacgctgaggggaagagagagaggaaagtgtcatgtgtagaaatgaatagaaaggagggaaaacttaagggagtgatgttatatggtgtgaactgtgaagccaagccaattataataaagaaagaaagaaaaggcttggttttcaaaagaaaccacaacaacaatgacatgatctcttttttattagtactctagaactagattgacacgcttttactttgtaatattatttattttgttcagaattttcacttgtaaattgtattttgaaattatcttctaatcgaactgccatgctggcaatttatgtcagacatatttgcttacatggcctcattatttttcaccatcttttttttttttgtttgaaaaaagacattttataaattaaaagttagacctcacggtcaagtatggacatcacatctaccctaccgaaaatagaaacataagcctacctggccacattatgagctaagtaattacaagttctgggaataaacgaaaaattacaacttaacataaaagtagaaagttttttacaatgatgcgcatagttttcaatttcccaataggaactagttcccgtcatggccttgataaccgtttctgaatcactctcaaccaaaacaaaacagtggtgctgagaaacaacggtctccacggctagcaagacaaccgcagcttctccaacaagggtgtccgaaaatatgtagccacccacaaaaatggtctccctatgatccctagcaatagccacagcgcacatggagtcataaccaactctgacatcacagttgatcttgacccagtattcaggaggaggaacccaaacaggagacccatcaaccttcgaatgattaagtaaattagagtcataatctgcgtaataaaaagagatagtgtcgatataatgagtgatgctacccagaccattcatatgtatcttgtcagtgcgcgctctccaaatcgtaccaaccactatcgaagcataaaggaaaactttgtcaatgtccacccctttagactttaaatttcacaagaacttaacccaatctcaaatacgggctccagaattcactacaggcatgagtccccaaggagaagaacgccagaggtgaaaaacaaagtcgcagtagagaaaaagatgatccacagtctattttttgccatctatccttgtataagtttattgggtgtttcattttcttgtgtgaactctaaaaaatgagtgtacatttatttgttttttaaaagaaaactggaattttatcaatttactaattcaaatactaaataagactgtatagaactctaattgaaaatttgatctagaaaagaacaagatactctaacaaagctatgagcaaccatgttagcagactgttaaaacaaaaaaataaaaaaaaatattatcaatagaatgaagaattttaaagcttaaccacctccgaaaatagagaaaatattttttttatcaagaagaaattgcttcattaatcacaaactattacaactaacaaatcaaccaaaacaagaggccacaaccggctcacttacaaatcctttatatgtatactctctcataatctttcaactttctattttcaagtattgcaatctatacaagacaactttcttcacttcatttacaattgctctagccaaataagagtaagaattgtatatgc

SEQ ID NO: 295813 - DNA, 2227 bp, Cannabis indica
aatacgacgttccaaacgagcctctatagtgcatacatatcttactcacatatgtgttgttgttttatcattttgaattacatgtagaagacatacacttagaaaaacagataacaatttcctcatagatataagaaaataactccaaacaaagataccgtcagaaaaaataaacagaattgacaacttcagtattactctctataaaagaaacgaaaaatccaacagtgaaaaactctcgacaggagaaatgtgagaatcttagtagcataaatgtgagaatcttgtacttgtgagtgttgacgcaatttttagttaattggtctaagaagatcgtaaaaataagaggactgcaatgaattaatttagctaaataaaattgcgataaattaaaaggacacaagggatttatagtagtttacccccatgtcgcgatggtaatgagactatgtctacttacttttattaattggatccgacacaccaaagtaatgttctcaagagtgtgtggataataatgtaaaaagggatttctaggcaaatcaacatcgaagcttatgggtaaaaggctcatgggagacctaataccataagtctgataataataatggtgataatattcttgggaataatacactaatgagagcaagaaaagagaatggtaccccttagtgtttgagtaatggaggcttggtgttgtaccagtatgaaaaacttaggaaaaagttaaaggaatgaaatctcaagggatgaagtgctctttgcagggaagcaggaaaagccctataggtagcctatcactatctttatataagcttaaggtttgttagtaatcctcccaatgtcggggtgtctcactttcaaatctcgtagctatttttgaataatgaataaaaaaagtaggaataaataaatatctataaaatatcccttattcctaggcaaatatcccacaaatattaggattgttgttgaagttggttatttctccttgtcttaaatttgcttgtgtcgttgcgccttggaaatgccagcattggagaggtgtaacaaaggatgtcacctcttcgctagaaatataccaaattagataggagtgacaagagatgtcacctttcggcttaaaattcataaaattatagagtagtgttggagtgaggtgtttagggatggcacttctcgcatatgatgacacattggctgtggcatagctctccaacatcccatcatagttcatacttagtaacactaatcaattcccgagtaaagtgtgttaacctgtcttgtgagccaattttgagcccaataactttagaattgagctataactatgagacacacttagattgtcttgaaaatatcttttcaatgcaagttgaaccaatttatttggataaaaatttgagagagtgatgattggtttactgaagggcaatatgtacttttttactccaaatccgaccattgccacgtccaagtggcgattctctactgtgcatgttctcgaaccactcaagggtgtgttttgacttgtttttttgacggcgaatcatattttggggctcttgagaccccaaaacctcattttgacgtctaaaaccctaataggagaccactgctaccagtcagtaccaaaagatggcagtggtcgcccaaggcttatgggaagccttgaatagtgtttcttgcttattttagtcatatggatgctataaaaacactttggccacattggttcttggctaattggtagaagagagaactatcatcttttgggccaaaaagatggcagcggtcgcctatgggggtcatacacccttgggtgaattttctcacttgtgtttgatactttgatattggaaatacactttggccaaagaaattccttcccatttggtgtagccgaccacttccactctttgggccacaaagatggcagtggtcgaccaagtggtttctacaccaattggtggccttctgggtattgagggaacacattttgacaagtatcctttggtattttgagagtagagagaactaccaccctcttgtggcagtgctccccaaaaagagagagagagcactgccatcttcatgtggcagtggttgcctatgccttgtagagtggcatacttatgcaactttgactttattttcaagttcaagacttttatgcctaaataagtcaagtccttgttggttttcttgtcagattgaggtctctagg

SEQ ID NO: 295814 - DNA, 1316 bp, Cannabis indica
taaaaataaaaaacccctaaatttatcactttcggtcacaacaacaaattttatagtataagccagtatggttttcgctatatgttcactttgtttgcatgcatggagcgacatgtgaattgctgactttgtttctcttttagcactctaaaattatcaaaacatcccaaaatttgtattaccctataattgataaaactaagtgtataatagctataataaataaatataagttacagtacaacaagaataatattttgtgtcaatccatgtgcgctaattgactgaaattctagtgagagtgaggtgtctagtaagaactgatgtattaggttattattgggtaaattaatacttcacaaagcgttagacatgtcgtggatcaactctggctaacataaatgtgtcggttattaactgatgctataatactcatcttttttaacgtttccaataaaaaaagaaaaaaaaaaatttatatacttaatcaatagttgacaacatatataattgcgtcgtccttgcatgaaatggtactttcgaactagcatgaaaataagatttttgacaattacggtttgggcttagttccggtccattaatattttgggcctgagtaaatttcaactggcccattatgccagagagtggtgtattttttgaaatgggctttaaactattatttaagtttttattttaataataaaaaaatagaaaattagagttttttttatatatttttataaactttttttatatttgcagttttacagttttgtgttgttttcatgtttgtcgcaatgtgtaaataccaatttttttttaaaacaatgtgtaaacaacggtctgtaggataaaaaagttcgtaaaaatgaaataaaaaaaaactcagaatttcgtaaaaatataaaaaattttgctatttttgttagaatttgagataagatgaatgattttctatctcaaaactaattggtaatagaaggagtagactatttatcttatatattctattatctttccacgcattaataatgtagaactctctaacaatttttgagtatttttgaaataatccattaaaaatatggtttattctgataaacacgagatattttggcgggaaaaagtttctagtttaagacaagataagataggataattaaggaatgtagaagctttcaggtggataccagaagggaaatttaattgggttgagatgcaaaatggccctaaatttagtaattaagttagtaaatatacactttttaaaaaaaattaagaaaatggccaaatctaataaattagctaataaa

SEQ ID NO: 295815 - DNA, 2691 bp, Cannabis indica
gactactgactgtcacaatttataattacaaaataattttatagtcacccattcactaaaaaaaaaaattacttaaggacaacctacttttggtgactttttctggcgatggtgactttcctgtgacttttccggcgacggtaacttttccggtgactttgccggtaccatcaatttttccagtgacttttccgataaaatttattattgtttataaatatgagatttttatttttttaaaaaaaatatggcataaaagagtccatataaaatttaagtaaatatttaaaaacaaatcaattattaaatcatatttacttatttgaataaatatttatacttaattttgttatagatatttaggtttgaattatatatctaataatcggttgagagaatctctcaaccacttagagaagatctctcaactactttgagaaaatatcttaaccaatttcaatatctataaatacttttcaaatttaaatttaaataaatatttatcttttgaactaattaattaacctaaaaataattatgttactcatattttgagcaacaaatatgatcacgacacgtgtaaaaaggcaggaaaacaaaccagctcggatattaaagaattaaatatgttgagtaaccctcctcgaagaatagtaattgcggacgtatttaagtctctccttattcaattaaggacgagtcataaatactgtcatttagtaagacaagcgagaaaaataactaacacaaaagttcatctcaagaagtacaaagtaaagaataagcgagacaagatgatatatgagatagacgaggcagtgtaaagactctctaacctaaggagcacacaagatgtaatttgaaaagcttatcataaatttttataaagattatataaatattttattataagcgtctaacgtgagaaggtcaaagagggcacgtcaacgtcacttcctttacaatgtatactgcaaggtatagaccaagatgtaatactacgtcacaacaaaatttagttagcacaaccgttttagataaagataagggcagtttgtacgtagcagctatttattttatcaatgtgctgtaaatataaaatatggagattgtccatgtttcatgaacaattgtaaaaataagatcaggggaaataaatgccactcccagacacctataaataggagaagaattcccagaccaagggatgaccaatcttgaaagactataaaaagaatattgtctcccccattgtattatgtaaactcatcaaatctcgataataagatgaacttgtgaactatgaagaattaatttcaaaaccacgtaaaaaccttcttgtttattattattaaaactattatcattctgaaatattatttattaagtttaggctcttttattggttaaacaaaaattggcgttaacagtttggtgctttcattaagagtctttgtttttttaaaaagaaaaaaaaaactcagaagacacatccctgaatatcactcgtcttttatttttttaagcatggaaaatactccttataatgacaatgatcaacaaagagagacatctcagtgtcttggaaaagaaccctagggatctcagggagtgaagaccattgagaaccaacactctaggagaagaaatgatgaatggggtttcaaacgaactaataacgagatccctgaaaggtgttgtgaagatgtatacgatcaaatgaaatacgttcctttggtggaattaaaaaatagacaactttagcagagactagcgaaatcgaaccgaagaaatgcttagttggagcgcgaggctgcgacctccataacatcacgtggtgatgcacctcccactcaaccaaacatatacacgaggtagcctcggggaaggctcagaggagtgagaactaagagaaatgaggaagcccttgctggagaaaatgtctggaaaatcccagaaatccccaggatgaccaaccagggagtacaagggatattccagtaaatatggaaaatccacaagatccaagaaacataaatacaagacaaactcgacccgaagatcttgagcattctcgcagtaatatgaattgtaggaatatgtgacctgacaacctaaagttgtctcgtgggaatgcagatgttagataagcgtgacatggcaaccaaggattcactcaaagaaatgcaaggaatccaggggaataaactagatcaggacatcctccacatccacaagtactaaattagaatgaaagagacaacatgtacatctacttaagtaaggaccatgtcgcaaatctctttaaaactactcaagaagattcccaagagacagaatcaagtattggcccaaatgggtcgaggacacatggtcaaagcagatcgaccaggtcatgtattagagaatggcgactagggctgaacatcgggcgggtttaccgggtttcgggttggcgggtttcgggttcacgggtttcgggttcaaaaaattgaaaccgaacccggacccgaatagggcatgggttggcgggttgacgggttggcgggtcacgggttggcgggttttggttggtcgggtttagcgggttggcgggttgacccggtcaactcagtcaactcggtcaactctttaaaaaaaattaattttttattcaaataattatttatattttatttttttatttattaa

SEQ ID NO: 295816 - DNA, 2904 bp, Cannabis indica
tggatataggatatactctttgcagagaatgatcttgtcaaaaacactatgaacaagatacaaatgccatagatttacaaaatatgtggttgtggtctttcgatgacttaggtttagttacatcaaaaagttcttagaatagtgcaagtggtcctataaaacttgggcttgtcccaaattatctttgttgggacataatggtgggccttatatgctaacctggattccacgtgtcccatgccgagaacatggataacatttacccccaagcttctagaatgatacatatggtggaatcttgccccattccattactgtggacatgtggaggattagaagtaatattatataactctatgggtgttggtcaatcatggaaggtgactccatctttggacatgataagtctacgtggcaatcgtctaatggtagaagagtacatttattgaggaatggctttcctagaaagcttttattttgattattgttcactttttgccgtgaaaattaaaattagcatcttcatcattgatctccacatgaattctagagagaattaattgtgttgacatgctttgactgctggagtccccaaccattggatgtaattgtgttttttgagatacgagcgtggaccattccatccttttcatgtggattgccaccttggttataaatacccatagaagactccattcacaacttttttaccctatttctaactttaaccttttagatttcaaattttttttgtaactttgagagttacactaaacctaaagcccaacagcccaaattgatctggatcacaacgttgatctttgcatccaaattctattaaaattgtgattgagagtttcatgccagaagaagactcgactcttgagttcaatgcatagattgatttgtttatcaccctcacttgtcgtctttgtgaattttgtgctcaacttccccaaccaaacccagcgacgattatcttggctcctttgtttctactatcaagtatgtatcgattaacttttttgtattttgattgggttttctaagtttgttgctacacgtcgcatttgatggttctactttgaataaaatttggattttttgattgtgtgatgtaatattgttggtatatttaggcattttcagttattttgcctttaggtttccatgttaggaacttctaggattcgtcattttgcaacaaaagtgctagcaaaattttcccatgcccaaaaactttctggtttttggtattttttttttatttttactccattcctcctctttgttgttcttcactttctatcaagaatgaatgaccccttaaggttattatttctagatggtaggtttaattgggacaacttcaagaagtttatgggggagtacttccctgctccctttctatattaggtaggtttggtagctgactgtttggttatttcttctttttatagaaaccatttctaagaagatccaacaagatgaggttgaaattgaagaggaatttttggagcaagaggaagctccgaaactagttcttaatgaccgtccatgggagatggaccaacatgtgaataagtttaggatatataataatttaaggaagtatgagacctagtgagggattgaaagttttctgagactgtactggaattgactctctgttcacggggagaggccttgtaagagcacggataggggcttcggcatttggagctaggcccgtgtagaaatgatgcacaccttcccttctggtgttactttgctaatttctgtgtcgtagctagagtggcaccattctaattcatccctcaggtataccgtcttttgttaggatggtatgtcctttctgctcaacacaacaaatctgcacaaacactagtggagatcttgtacttctacgagattaaatccaaacccatgaggggtcataaggaaaacatgggtttctacaggctggagtgccattccaagagtgtagcctaccccattagttccacaaagtatacacatgacttctgagactactgaaactacacttctggcttcctactgaagagagtcaccatactcagcatggactttaatactacaagtaagtgtttcttcttttcctggatttcacctctcattttctcctttggttatatactaatgtgcctttcatctttcctaggttgccttccccaatcgcctctgacttcggagctataaaggagaatcaacttctataagtctttaccatctagggaattacatgtagctcaactagtgaccatagagaaccttgaaaaggttggtctcatcgctcctcatcaaaaaattgatcaaatgtcgacgaaggagaccatttaggaatgactctaacgggatcctgacgaggtgaaagaggatattatggccattactactgaagaggccttaaaacttttaaaggtcgatgaacagtggctcgttgattggaagagagaatttctagaagacttgagtgagtttgaagagctcactatccacttcagggagtagtcccaaatgagggtgctctaggagtgagtacttcaggtaatgctgagacaccctttcgtataattagggctctttccatagcaaatttaaagaacactaaccaagggggattttacccatatttagtttagatcaaaataaatatccttgcaacaatttcacagataaagtagattacatagtaaggaggccaaaccatttcattccaccagtgtatcaccacattatagtggacattcttagcaaagtcaatttcccagggttcttcaagcatgagactaatttaggtcgagaggatattgccctttttgctagaagtaaagtatgttggaaattattttactaggatatagatttactaccaagtatgtt

SEQ ID NO: 295817 - DNA, 5597 bp, Cannabis indica
aattcaaaaccgcaaaccgtactacattacgcgatttaacaaaaatgcaaactacagcagtactgcaaaagatttcaaaccccattttttatacggtggcgatttgtgtgatgtgaacagtttgatgaacacttctagtagccttgtcctccttttctttaataataattttaagaaaatataaaaagaaaaaagaagaaaatattaaaagcttttaactgccttaatctttggaaggatgtacttttgagttatataaatagataggtacccctagacatcatttgaaagaatagagaatagagagagacatttgagagtaaaagaatagtgtgtggcatagcaaaaattttctaaaacacaatttcttcttttctctcttcccttgaaattgttgctactctctctctttatctatctttcataacattggtaaagaaaaacttttgaggagttcagaaagatatatatatgtcttgtagtgtttcgatacatatttaaaaacaaacacatacattcaaaaaaacaaaaacagagtttgagataccaaaagggtgttttttcttaattttggttgaggcttttagcttcattttgaaggagaaaggaaaaagatggttgctttcttatcagcttggccttgggacaacttgggaaaatacaaggtaacaaaaaaattgacccaaaaaccaaatctttctctgtttttttttttatgaattttgatacatgattttctgggttttcttaaaacagtatgtggtacttggtcctgtatttgcaaaagctttcttctcaatcatatatgaagattttcagaaagatagctggtgtttccatatagtggccttatatctagctaggtgtttgatttatcaactatgggtttcctacaataacatgcttttcatcacaagaaacagaaaaatccttgaacaaggtgttgatttcaaccagattgacaaagaatgggactggtaaataataataaatagctctgcttaaacaagtcaatttttattatcattattatttttgagctcatcatgttggtgttggacaattggaatttcttgacagggataattcattaatgcttcatactctgatggccttcattggttgttacatcttcccatttcttcaaaatcttcccttgtgggactcaaaaggggttatcacagttctgttgcttcatattggaatatcagagcctttattctattgggtacatagaaattttcacaacaaagattatcttttcactaattaccattctcttcatcattccactccagtacaaacaccctttacaggtaaccaactaaacatattaaataccaacacccttttgttaattatgttaaaaaacttaattaataaatttatttatttatttatttattgcagctgggaatggaagtctacttgagaatatggttttaggtatcatcatagggatacctgtaatgggttcctctcttttgggatatggatcaataaaattggtatatggctatgttttggtatttgattttctgaggtgtttggggcatagcaatgttgaagttgttagtcacaaggtgtttgagaaaatgccatttcttagatacattttatatactccaacgtaagtaatttcactttcccacgccacgtctctttttctcttctctctttaaatgcacacacaattttcattcattgttacattaccccaaattattggagaaattagttaattaatattgttagttaggcaagtatatatataatatataatataatatatatgcaactattttgtggcttaaaataaaccccttttagaagggctaatctcttaaaagtgtcacattatttgcctttagagaatcaagttagtttcattttcttgttgttatatacatttagtccaatattggtattatttttttaactagacaagaatcaagatgcaaagtaagaaagagaaactttaaaaaaaaaaacaatctttatccatataaagaaatcattttagttctcattatacccttgagtatgaaaggtttattgttttccatgatttaataaggtagttggacactggataatttggtaaagttgtcataatattttcatctgaacatgtagtggggttagggggtcctctaatgagccataaagttaaaatcttttagtattggtgtgagtttttatattcataattgactagtccatggggtgtaataaattaacccaaaaatgtgaccaaagaaagaaaaaaaaaaaactctttgactagatgaatagtgattagaagattattaaatttctgaccctgtttttgcagataccacagcttacaccatactgagaaaaaaacaaatttttgcctctttatgcctctatttgatgcactagggaacactttgaaccctagttcatgggaattgcacaagaaaataagttgtaatgcaggtgagttgaatggtcaagttcactgtatggtacacaataaatatttatatatataatgtaaattatattgatgaagagttagcttttgttgttggttgttaatgtatagagaattaaattgcaatgaattggcacacaggtaaaaatagcaaggtaccagattttgtattcctagcccatgtggtggatataacatctgcattacatgtgccctttgtgttccggtcaattgcatcaatgccatactcaataaaactcttctttttaccattatggcctggggttttcgtagtaatgttagcaatgtggcttaaggccaaaccatttctggtttcattctacaagctcaggaataggctgcaccaaacatgggttgtccctagatttggctttcaggtattcgatttcggacacaaatctcgatatgtattttaagtttggtttagcgggtcatgttttattctggagtaatatatagtactattgaagtcaatgacatattactccaaaataaaacaggaccagttttgaaacaggactatgtccgtttcctatatatatcacttaaaaaccaattaaaatgaattgttttgttttgttttgtatttgggacagtatttcataccatatgccactgaaggaatcaacaagcaaatagagaaggccattcttagagctgataagttaggggttaaggttattagccttgctgcattaaataaggttggtaattcttttattattatttcttttcttggttatgattattgatcactattcttcttgtaatttatacacataacactattaagtgtattctgatatgggttgttgtgttgggttaggagggtagttgtattttgcagaaatggtacatacatatattatatatatctatatagctctctcttatgttcttcatttaagtttcaacaataaatggttgaaaggactagttaattattaaaagatgactttgtgacataaatgcatttcacttatggtttaaaatgtggccatgtcatataaataacatatagtctttgtttcttctgtcatcttgttcagcctttataaccattttcagaaacaaaaatacataaatattttatgaacaacacacatggttgcagtaaattctcttccacatatttggtatctataattttttttttcaatttttttttagaaccaaattgctttgatgagttctatgttgtgggccccttaatctactaccctacttagtgtgaatagaaattctatataatcatctatctttggtcatcacatcccaaaagggtaactagtcttgtgatcttttattttacctaagtaaaaataaaatcattaaatttgcataaaaattagtgtacctaactttaacaaactcatttcaccttctttataatctagctaatatatagttatatacaacatagtcttgaataatgccaaaaagaacttcttgcttaaatttctaaagatgattagtgtccccattacattgaatcccttgttggttttagtggggtcatatattaaagttgtttacattggaataacacacaaacacacacaaagattttgagtgatatttacatatttattcatgcattataaaccctcaaaataaattgagtttatggtattttccaaaccatactgaataatttgttttgtcattaaaagtctaagaaaactctttttcattctttcacacgcaatattaaattagttttaatgtgaaaattgattgtggggacaattatgttaaattcttctatcttggttttgtttagttattactaaagaacacaaatttattgacttagtattattatatttattttatttatatatttttacaatgattccaaatgatgaacgtaaaagtaccatcatttattagacaactgtgttgtgatgttatgtatcattgacacaattcatcaagtgttccatataatatgccaacatatactagatctcatatcagtcctctagatttttttttgtgtataaatttattaaatgaaatttaattcttctttgacaattaattgagaacaaaagaggcaatcaaggatggtgataataatgtaaattattgggattgtctcagatgaaattaattgtgtaaatgtatttagacaaaatgtacaagtttaggtatttctttacttacttggttgtacttataaggaccacacaacttatataatttacacatttttatttattattttatatagaatgaagctttgaatggtggtgggacattatttgtaaacaagcacccaaacttaaaagttagagttgttcatggaaacaccttaacagcagcagttattctaaatgagattccaaaagatgtaaaagaggtatttttaactggtgccacttctaagcttggaagagccattgctctctacctttgtcgaagaaaagtccgagttctcgtaagtacaataacaacatattttaatttaattactattattattatgaaatatcgctaactacacgtacaaatttatttttacagatgttgactctatcaacagaaaggtttcaaaatattcagaaggaagctccagctgaatgccagccttaccttgttcaagtcacaaaatacaatgcagcacagaattgcaaggtgatgatgacttttcatttacaataaatattatttgaatgatatatttagagcattgttattaggcaccaatagtacttagtactttctagatgtgttactttgcgattgactagcgatattctctaaaaactactacattaaattatatgggactcgatatttaattgtaccaatagcgatattgatacgtagtagggtgctaaccactggtaccttttagtattttttatatatttgtataatgtgttttgtgaagtgataataataataataataaatggtatagacttggatagttgggaagtggataacaccaagagagcaaggttgggccccaagtgggacacactttcatcaatttgtggttccaccaatattatcatttagaagagactgtacttatggtgaccttgctgccatgaggttgcctcaagatgttcaaggccttggatcttgtgaggtaataaaataa

SEQ ID NO: 295818 - DNA, 2377 bp, Cannabis indica
taccttgggagcagccattggatattcttcgggcaaaaatagttccaacttgaaaactcctcctgtcattgcaaccaaaaatacattttcttgagtcaaaatggatactactgatgataaacgaaaaggcacgttaatctgaataaactatgcaaaataagtaagctaaacaactgattataaacaccaaatttgggtttgcttgtccatgccctagataaaggtatggcatgatggagtagtggaaaacacagtcatcccaccttatctaattgaatgtgctaaagctgaaatacactcaactcaacccaccactctaatgaacaaatagtgttttttaacattattaatatgaaaggcaactatcacatgacagcataagcaataaacagctaagtaacaacaccatattcaatgaggcttctcaagcataacaaatagagtattggtactaatagttttcttcagcactgtcttataacttcccatgttgatcatgtcaatgtcagcttaatactaaagttgtgctattctgactaagaccacgttcaatagtgcttttctgattctgcatttactttttaaaagcattgttgtttttaggatacttaattaaggcttaacacacctttttattatttaatagtttaggtgctgattttgattgtattcagtaataattacacccaaaggcttaagcagctttttattatttaacagtttaggtactcattttgattgcatctcagtaataattatacccaacctgctaatgaaacttccaaatatttcaaagattaatatatacgcatgcattgcttcaaaatttatatatatatatatatatatatataataaaatataatatacaaagatcaatccagaaattttttcacaagcaagcatgtccacaaattaaagctaaagactaaacaattataatgagcaactagttcaagtaaaaagttcccacattaccaagataccatacatacaatttctctttacaacaatataccaggcacaggcattatcaatatacaggcttcttccgaaccccaaaaaatatatataatcgagatacctccaaaattcaagagcactcatacctaactggtcggaccatcaacatcatgtagtcttagccaaacccaaatttctaaaagactctaagacatcatcaaggaaaatcaccaaatgcaacccagctgggacaatcgcttccaccaagcatcacatcacaatgtatcgaaaaaattgcactagtttgatagctactaagtctattacttccctacccaatttaaaccaataatcaagcataccgaaatagatgatagactttgtgctctctttaacacaaagaatcaaacccaacaatagttcagaataagcaaataaaaaaaaagtgagagtaatgaaaatgcaactttaaacattgttcataaatcaagaaaattataaatgaacaaacatggaattgtcattcccaccaaaatagtagaaattcaaaggaatgaaataaaaattgattcatttccattccatttcattaactccaaccaaacgcaaccttacagtacaccgaaaattgaactgaataaactaaccaaaatgggatctgtcacaattctagccacaaccaaccatctaacacatacagaaatagaccaaataccaaaagacaaaagaataaagagttaccttcataaggagattgcgttgggccaaggatcatcacattaaaataacgcatattatcttctgatggggaagcactaattcccggagctgaatccccaaaaaagaaaaatcaatcataacttcaaaaccaccaaattaaaacaaacccaaaacccaatttccccttaaacccaaatcaaaaatttaatcataaaaagtttctctttttcaataacaaatcaatcaaaaacaaaacacagtaagtcatcgaactcaccaggttcactcaaaagacgctgcgtttcctgttacgatcatcaaaccaaaaaacaattacagtgaaaaaaaatcagaatcaaatgagaaagaaacaaaaaccccccaaaattgaataaaaaaaacatcgatcgagtgaaattgaaagagggatcgcgatgaggaaagagagattaaccttgatgatccttcggggaagattactgttcgccataactaggtcgattgcaaactacgccaaccacgaaacgaaacgagggtttttgcagagagagaaagaagagagagaaagctttctcctttcactgaaagagaaagtattctataaaaaggacttctttgaaaatacttttatatttgcattcttatctattatctttaggattattacacaattaccccaatttttttttttttt

SEQ ID NO: 295819 - DNA, 2593 bp, Cannabis indica
gatgtagcatgacatctaagtgaaggtgttgcatatattagagattatatatcacaaggaccgatatgaataaagctatgtttatcaaacttaccattaccataaagacctaattcatatcctaatgatgatcaatagtagatcggcctgaatcctgagtaatcatgaactcttgttcatgttattagtttctttggttcactcgttaaagtttcttagagaagatgattcttacaacttctattttaggaatctaataatatggatggctgggaacatgatctacaattatggaatcctaactttcttgacagatcgaatgttaattcccttcatgtgttaattctgaaactgaaaagttgagcacaaatttagattgggtctaaattataatttcactagtgacttaacgaaactataaaggataaaaaattaattagaagggtaaaatattaatttgaccaaaactaataacgaaccgacactaagagagctaattactgcaattgattatattaatagacactacagtaaaattcagtaaatataattctataattgttacgagttcaattccatatttataatggagtaatcatagaattaataaacaagattatttggttgatgagattcaataaataatatagtttattgaaacttagaattataggtctatgatctttggatcgccaccttgaaacactgtcaaggagtgggataaaagttgtatatggaagctcagaaaaatttattttgattgtcgaaatagtaattatttattttgtaataaataatttatttttcaaataattaaataggaaaaagacaaaagttgtcaagacaaaagacacatctttagtgattgagaaataaaaaagcatatgatagtgaagataattcaactcaccgaagccaacaccaagcttaaatcttgggtgtgatagattttattggaggatgcgcaagccacaaatctcttagcaagaagttggactagatcaactactaaattgttgacaatatcaaaggcaaatggagcgagggaagagccaaggaagttggagaaccataccatcatagggtccaagttcaagttatgcacttgtgtagagtactctcctaggagggctccatctttgttctcatccaaccaccttttcaaggttttagcctccgcactccatttggtttgctcctttataggaaaattatgcctagtgagtcagagttgcgtgtgagcctcgtctgggtggactggagttgaggggatggagtgctcccctgagaaataagtcgcctctaaagggatcctagagctggatgtatcttgggatggcgtcttagaagacctggacctctgggacaaatccaaattattcgaagagtgctccttttgcttacccttttgacctctggatgggactatttcaccctccttgagcatgattatctttgggtcattttgacctattcctgctggacctcttggagtcacaagtacccccgggacttcagcagccaagacaactttgcccctttcaggatcaacatcaaccatgtctaacaatgcaaaagtatcatccacttgatgacctacaaagcaaaagaaaataaaccccataagtatcaaatgaaaaagcaacacaacaccaacaacaagttagtcaagttaaatagatgttattagaaggaaccaattctaccatggcgttctgattcctctttgacaaattgatatataaaattactggagtcatcattccctaagtagctatctgacgagaggaacaaactggagatgatgtaggaagagtctagaggataggaactggaaggcctgatcccatccgagacctacctagaaaatccctaatatacaaaaaatatctctctttttccttatcaccccaccgagaatggggcatccttaacctatactggtcgaatacgagaatattcccggacaaagggtacataagttagggataaaggagacttatgaacacaagatgaactggcactaggagttcctgcattcagcataggaaatgggaagcgaggtcgaggggcttcaagacccttatctgctccctcatttgccttctgtttggtagcactttgagcctaggctatcaggcccttcgcttccttcattctacgaaaggtacaacacctttatcttagacatcgggacaaacaaccttcaagaggttagagtccttaacactataagaagcttttaggagaccaaccctttggtaatttgcggtcgtccatacaaataggtgtactctgcataggcatgccatcacattacaaatccttcgagaggaaactaaagagttggaataattgcaagtcctaaatcacaaaattgtgagtcgagacttggggggtaaaggctataaatatatattttaccaaaatatgtagcaagtgaagaataggtcatttgtctacaggattaacataagcacatggatgttcaatattaacataataagtgtttagtattttcctcaaggcatgagggacatctgagagtgtacgactagttcccaaaagaacattgaagtcaaagtcaaactct

SEQ ID NO: 295820 - DNA, 4947 bp, Cannabis indica
gtatgttttttaacatcctaaatatgaatctctaaaacgatgaaacttaaacacatataaaatatgaaaaatcttacattggttgcagctgaattaaatgacttcttccgctcagatttttaacctttgtattctctttgtcgcagagtataattaagatctgagtccaatactccttcagttgttaataatcaaaatatcagttgctaagtttatcaagattttaaatttttaataatacatattcaagattaataatcaataataattattaacttttaattttttttaataacacgtattcaagattaataaccgataagaattagtaacttttaaactttttaataatatatattcaagatcaataaccaataacgatcaataattttcaaaattttgtaatttttttttgataattccactccgattaattaatacatatacagtatatttagaactgtaaagaaggaataataaatcgacttcgtctctctgagaatataaaattacatgacaaagggtagattgaagtatagatgtgttgagtgcggcaaaaaaaaaatctttgattttataattattattagattttaattttttatttctttttttttaaaagaaaaaactaaatcatttgaaccaatcctagactaacatatttattcgacacaaatattgatgataagattgagtgtagaattacatctagttaaaggccattcttactatttttttattaattaaggttatgtgtgtaataattttaaattttaagagttttgttacaaatatttttaacaatttaagtacaaaaaaattaattgctaaaagatccttatttagtaacaaattgcaaaaaattaattaataattattagtaaattacttttaattaagattttataagaaaataaagtatcacgtttttatcaggttacaagttatttatttatttatgtattttaatttttaaattaatcacaatcattcaatagtgatccaatgactaaaaataaatgtaaccatgatagttacatatttgatgtaaccattctaatctcctcgatatatataaatatttttgctaccaaataattcttttacacttcaagcaaatattctttctcatcttgatatgaaaaaaaaaaaccaacaacaaaaacatctatatataagtcaataaaagtttttagattctttaactatttttcatacaattagaactgatcatttcttaaatatatgaaaaaacttaacataaaatttatttatatgtatagtaaaatattattttgtagccaatataatatatatttttttataaactataaactcaattatattataaaattaattttgaacttatactcagcgacgaactcataaaattctactaacgttgatgtaaaattaaataatatatatgaataaagaaaattttgactattttggtaaaaaattaaatattatatgaatctttaaaaaaataaaaagaaataaataaaatatattaatataattattttattaaaatattaaaataaaaaaaaagaattatttaaatttaataaaaaataaattaaaataaaaaaaaaaaaaaaaaaaaaaaaaaaaactatcagtatttaaccatgacaactcaatattgctaatagaataaaaatttaaggacttatttatcaaaagataaagtttagaaataaatttataaaaatatatataatttaagaataaatatactaaaattaaagttttttgaaggtaaatttactaaaatcaatataatttaaaacccttccgtaaaaccaaacttttgtttttttacttaaaaacttttctatgttaggaggatgagatgattacaatagtcggccccgccttctttttatcactattagaacataatggttccctcgtaatgatctattggccaaaacagcaaaatatcatataaaatagctgttgtattcggaaaattaaaatcctatagctggagattgctttaagatgataacaactatttattttatttttgaaaaaaaaaatacattttccagcaatatatttagaaacatggtgcaagtatgtcacctacttagtgtacttgtaaaaggaaataaagaaaaaggtatattatttgtattttaaaatttgacttaattgcttcttaaaatatcttatctccaaatcttattgaagaacaatcttattaagtcttctagtgcacaaaatctttattagcataatctatatataaatattcttgacagctcttgtggcagtgcccaaacattatattttcgtaaggaaaaatacaatttattaagataaatttaggacaagtattcatctatacacatttttttaaattaataacaaaaattatcagtgcatgagtaacgtcaaatgtaaaatgacactaccagaaccaccacaaatagcagctattaaaaaatgaatgtctaaaagaataaaatgaaaattagcatttgaatgtgaattattaactcaatcaatcaccacagtagaatcactattaataatggagatggtgaacctaattgattcacaaaagtcaagcccattctagtagcaagcaattctgtcacattaacagaatattcccccagacatccaaaccactcacattctgtcccgaatcaccccaccaaacccaaacaaacccctgcccaacaaccactgaagcatcagttgcaagagcaaggagtcggtagggggcagtctccattaagcagctccttatccaattgggttgaacatagacccaatctcttgaaagggttgttatcccgaattaaaaataaaactattggaacaaattatcgaatgaagtttctaactgaattgcggactatgttgctctctttaagacgtttcgctactctacccaaagtgtacacgacaatctataaacaacgacgtccccattataaaaaaacctctgtatactttgatcgtgggtcattagcaattaaaatagatcgcgtttattgcttctatataacgtgtttaaaaaataattaattaataaataaataatatttatttaattaaataatttttttgtaaaaaataaagtgacatcacaaccaacctgccagctcagcacaacacagttggatggatgacgatgatggcgcacgcacatgtgatggtttggtgtgtgagtcctcatccatgcacacaaaacttggtgaccctcagggcccgaacccaagtctcaaggttacactttatatacacttccaaggaagtgttcctatcccatgtgggactcaaagcactatcgtacacttcagttctcatatttttgtaaaattttaactaagttccaacaatctcccacttgaaatttagaaaatattttctcgagcaatatcggaaaataagacagtgcttaaacaatgatatattttgatttgaatctttgcatagtgaatgtaattccaatttttatcctcttgacgtggcatgcttacgtggacaaaattagtgtcacgtgacagtacaactcaccaataagaaggaaaagtaagcacctaagcaaacggagaccccgtcactcaagcattcatcaagtgacagacctgctccctcacaagagctggtcgaccacccctagaactgcaccatggccggctagcctgccctccacaggggcctggccggccaagaggtgctctacagggttttcagtgttcttctacacgtggactatagttcacgggctgcgaattgtgccctaaaagcccaacataatggttgaataatatctagattcaagggaaatttagttttttgtaattatctaacaaactatgcaaatgtctagggttttaaactttaatctagggtttaggcctcctatataaaggccttaaacctagcctagaaacctaagttgaatctaagcctaaaacctgcctccaagctctaagccttagtctgacaatctctctcttcctcattttctctctctctctctctcacctgcctacactagcatcatctcaacactttagttttgttataattaattcatactttgtatgcctaagggtgctataccacctatggtgatgtggatagtattaacactcagtaccaatacaactaaatggggagtaggttgttacccgctatcataagggggccaaacctctataacaaatatgtcgtttattgtttttcaatcttatttgtgaagacacgtggcaagcatccgatctacatgactgcgctgacagttgatcactttttgaggtcaatagttttgtactttcattgagagcgtggatatcgtatctcatcaaacgccacggtgaacacaagaagaactcttgtcgcaccatattcatctctgggtctccctcaagaccacagattgcagatcaaagtacgtattcagtgtaacgccctattccatagggatgcacgtgtgtgattttataaactagactaatactaatatattaattaattattaaaaattgtgagaatattaaaaacttaagtaaaataaaagattgaaaacggatattataacaacagtataaaggtgttccgaaaaagatttacccaaaagaatatagacaataacaattaaaagcaaaattcaaaatacaacagatataaccagtctaaaaccacttctggcaattcggcacacaggccggtggggtcaatatgtacactgctagagaaggtagtcacctcatggcagctctaacttttccttgcccttacctgcaccacatagcacctgtgagtcataaggactcagtaagaaaagcaatgataatgatcatatattttattattcaaatattatcatttatacacaattagaatcaaactattacacatttttcataagataaaattcaaatcactactgacctctgccatgaataagtatcagta

SEQ ID NO: 295821 - DNA, 4605 bp, Cannabis indica
atttattatttattattagtcacctttttaacgacctttaattcacaattattattatatgaaaatcagtaccagctaatagaatgtaaaaaaaagacaatggcccatactaaaaaaagaactctcataattttaggtaacaactcttaatctatagttgatatatttatacgattgtgtataatatataatgcgtgataaaggaatcatattatagaggtgagtgtacttaatcaaacagatcttatcgtttgaaatcttagtaagttaaacatcggattcatttaattgcttaagtaattatatgcatgtccaaatccattcagtgaacaatgatttacgacctatattaatacttggccaattcaaattcttgaacttttgcaattacgtttttgagctgggctattttattatgggcctgaattatgtatgggccacttgaagcccaatattgatctgatgcaaccttgtacaagcccaaagttaagagttcaaggcttactttgatatatccagcccaggcaagcctttgtcagactattgggagctaatgggtgcacattgagttttgacggggttgggtggtagaaattgcaccctatattcttttttttttaacccatttcatttttacattttttttcttctatatatttaatttatacccttttttatttgttatatcctgattatacccttatgtaatgaaattgacttataaaatgagtacatttcaattgaatttaaaataaggctatttttagttaactgatgaaaaaaaaaaggtatatttcaacttatcctgtttgggtgcgtataattggtttaccaaacctacccgtttgtgtgaacgggttttcgagttttgagtgtgggttgggactgggtttgggctgggttgaacttttttttttagaatttttacaaaaatactggattttagttcaaagtttataaatttactgtcgcaacaaccgtaaaataacaaaatagaaacaatagcagaacaactaaaaaataataataaaacaatagtgaaaacttaatacagtatttttgaaaaaatttccaccatacaataaaaaagaaaaaatttgaaatttcagtgtaaaaactttttttttggttcatttggacgaagtttttttttgttttgtttcttatttgggctacgtttgattggttcatttctaatacacagtgtggcgcagtggttgtgcccaactaactagctataagtttgtgagctgaaattcctgtcctcaaaactgttgacaataataatcaagggagtggttcttcttattaacatattaataatcatcctacactaaccaaaccaagggagttagttttatttatataaacttgtaattacattagaattttcatttaatatcgaagtatttttttgcaacagtaaattattcaatatctactaattatagtttactagttattacactaattaatagttaatatctactaattatagtgtactagttattagactaattaagattttttcttgtgaatttttacatgtactaacaattcaatttttttttagttgttaaaattttttgctaaactatactgaaattatttgatttaaagtttttcgcccaattatatgtttaattttactgatgggtgcttaaaataaatagaagattagagtacaatttgatacatattaaatttttggggcaagaatatttaaaaacttgtcaaaattcgtagacatgatcgatttggtacattagtaaaattgagccaaatagaaagaacctgaaaaagtttaaaatgtcaaatttagaagaaaaaatattataattaatcaaaaattaattatgaattagtaaggtatcaaacaaacaaacccaataaaattgtattcaaaagcagtacaattctaactctcataagtactaaacacaaaccaaaattaagaaacacacatacacacatttatatataaaacacttacctagctagctataataatatatatacaagtacaacacctcatacaatatcttccaaataacccaatccatggatcatcatcaaactctggcacacaccaagattatattatattatattgataagctatatgaacatgcatatgtgttcaaactcatcatcatcaactatatatatgtatatatatatatatatatacaaaacctaaaaaagagaaagtagtaccacgtaaaccacagcaattccaaagctcaaaatcccatttccactaagacaaagggcaccacttacagcagaagcatctttaagcaaagcagccaaagcaggagcaatcaacgaagatgttggaaactcatcaggcttaacaaccatacttgatatgggagccggtgccggtgcacccaccgccttttttcgcggttttacacggaaaattctaagaggaagaagtaccttatcgaccttgtaaatagctaactgattatcctcataaattgttgcattaattgttgcattaacaactcctgtggatatgttaacccaactaccttcgaccaaaatattaagagaataatttgcttgtgtccgtacagggtttattagggtttggaaattttggattggtatgaaggaaggaatgatgtggttttgtatgagttggagtttttcttttgtggtgagtgagtttagagtgtttggtttgagattggaaaatgctttgtttgatggggctaagattgtcaagctgtttgagatgtatttgagttgattttcgatttgaatattctctgatgttgttttgaggaggtggacgaagacactgaatcccccgactttttcgaggatctcggtggcgtttgtagggtttgccagggccggcggttggactagtggcgcttcggatggtgttggtgatgtaattggtgcttgggctagggtttgggttggagcttgggttggagattgagctagggctatggagaaaaagatggaaatgaaggaaagggagatgaggccttgttttttcatatttttttttttgttttctttgagattattagctagggttatgatgatgatgatgattcaatacataataattaatatgtttggagggaggaaagggctttatatatatgtaaatatttgctcatataattttgtggtatttttgatgagagaaaaggaattaggtgaaaggttgtagtttttttaatgtatttattggttatatttaaaaacgacgtcgtagttataatgtctcttgtcttcgtaattgtgaaaagagataagtttttatatgatctttttttaaaaagtgacttttggtttgcatgggaaatttaaacgaagttttcatttgaggaacttgggagctaaacttatatatattattataagagaattattaaaagaggtgttgagttattaagtattagatttttaaataatttaaaaaaataaattttaaaaaatatcactaaccaattataaaatatcgcatcaattataacaagtattcggcacgctcaatactattggtacccaatataatgttaatgttataattggagctgtgcaattattatttttctatttttaggtacagagtaaataaattttattttataatataatacatgataattgactgatcatgatctcttttgaaacgataataattgacatcattctaaatgaatattaattaaaattatttcctgtgtgtgcatgtttcactattcattgggactcaaagtacatatagaacatgaatatatgattttttgtgtaatattttggtgcttcataatttgggctactactaaaatttagtgagccattgaaaaaaattatttttggagtattattttgaaaaaaatgtgttatttttcaaaattaataaaaaataatgtataattttaaaagaaaaaaaattaaggtcttaagttagatagaccttaggcacagacctaccctagggccatacttgttcataccatcaacgttgagagttgaacttgtaaggtgctaatttgaaaaaaaaaatattattattttatgcactaatacatatgtctaatatgccttatagatggttagtaatttttaatattaatcataataatttaaaatatatatgtgtcaatgtgtcttaatacttataacttatagtatgatatatatattaaaacaaaataatcaaaataactatagattgaacatatatactaaaaaaaattaaaattgtataactccaaccattggtgcatgcaaatcacttcaaattcaaatatgaagcactaggtgtttttattcaattcaaaactctagtggaaaacaaatttgacaaaaagatcaaaagcatttgtccagactagggtagtaatatcacccattcatagccattgttcaagctcatggcattgagtttcgacactcatgtccacgtactttagctcaaaataattgagttgaacgcaaacataaatatatatagttaagatgggcttaaccttgctaatacccatattacataaggggcgacaaatcaaagtcgcccctaatacccatattattagaggcgacaatatgtcgccccaaatttagtcg

SEQ ID NO: 295822 - DNA, 1929 bp, Cannabis indica
aagaagcacatgaaatattgtctcgtaattgatgttacataaagggcggatgagatcaacatttacatgtttagtactaagttgtactttagttggaagacaccctgagcaagctctccacagaaaatgaagaacctttggcagaacatcaagcttccacagttttttccagcaactatcctcttgaagatgtagccaatttccaaaagcaacttgaaggtacttgtacgcactcttgactgtgtaaaaatctaaagtttctattttccaatgccatgaatccataaccatcgaaccactcagctgaatactcaatattaattgtgcatcccactccccaaacatgtcatcaattacctcaagatctcacaacctttctcccaccatcatcaaattcgagaccaatttgttttcaaggcctagattagcagtaataccatatggattactgtcatgtggtagccaaggatcatgtgggatactaacagtcgagccatttccaatcgatcttcttgcaccctgctgaacaagagattgagcttcccaaatactccgccaaatgaagctaggattttggcctaactcagcattaagaaaagacccatttggataataccgagctttataaatccttcccacaaacgacccttccttagtgagcaatctccacccttattttcccaaaaaagagaaattataatacctaagatccctaaatcccaacacaccatgcttgtgttgacatagacgcctccaactgacccaactaacacccttgctcgaagagctagactgagccttccaccaaaatttcgccatcataccttcaaggcttgcacaaatttctttagttagaagaaatacactcattgcataacatggtaaagcctgagcaacacctctttaccaacttttgatagaaatttaaaagtgaaaatataaaaaatttaccaaaaaaatagtatattatgtaattatccctttaattgggtagttttataagtattttttttttaaaatttcccttggaaaaatcacaagcacatcataaaacccatccaacttcttttcttttttgctaaaaacatcttttacttcttactcgtttatatttctactctctagtctcttgtttctcctaacttcagcttaaaccgcccaaagaaacacaactaaaatttacaatttaaattagttgttattcttcttcttgtttagataactaattagtcacgcacatcataatctctagcacattcccaatttgattcttttcattgctcaacttttactttattggataaaaaaagacatgattgaactgcctgaaattatgcttcgtttacttaattaccttttttccattgggggaggttaaaagtaatgaaagataattaaaaacattgcattttgataattttgattctcttatactggtcatgaaaaggagttatcacatatttggccacacacaacatagcatattcaactttcaatttgatattatttaatggataattatactttattatatatattttcccttgtttcacaagtctagctgagtcatcttatattatcaacctaatccttaaaacatatcatatgctatttatttgcaggctttatattattacttattgtaatgcctatttgattttgtgcgatactcactataaaataaacaagtgtttaattggataaatttattataattaaactaattacttaatatgggaccctatacttggattctaaggacaaaccttcagctttggttcatgaaccttctccttattttaagctcaaaatattgtttcatcgttttaattgagtgttccatcaacttgcttatttattttatacacttgcatatatattatatataccatattatattgacttgtaatagtttttttttaaaaaaaa

SEQ ID NO: 295823 - DNA, 4551 bp, Cannabis indica
tttatttatttttttttttcgagcttatctgattcaactttgtccggagaattgtgttttggcatatcaatttgctacaaataaatggaggtaagaaaaacaacagtgaatttattgagaacatgtaaccctcccttgctcgctgtaaacctctttgagaagacaaaatttagtatgagaaagtacccagctgcttttatatactttttcttagaaatcaatacaaaatttgggaggaaactgccatggagtttgtaagaaggaaaacatcaaataccactttcatcgattgcagttcaaatataaaagagaaaaactacaatcactaagcaggttcccataagagctaagatcattgaaatttattagttaaggttttcaaactgtttaattccagtgtttcaaagaatacatgattgttttcatacaaatatatactgtataaatcacaaaacccacaaagagactgtcgtaggaagtatcgtatcatttcttatgccagcacaacaatctgcagaagatttgtccattagtatcatctcctttcctctcccatctcttgaactttacactactctttatggtcaaggtgactcaagttccaaaaactattgcagcaaaatcatctaacatcaagtcacacaacattcttagcaaagagaaattgacaaccgccggggcatctcatggtttccaaggtgctggaggtggtggtggtgttggaaacattgggggaatagcagagaaaatagtgttcttatcaatcccgccccccttttcgcctgacaatgcaacaagtgcagcaactagacctgcattgcctgcaagagtcggttctgtgtaattgtaattggaacgcacatcacggaaaccatcatgcttatcaggccctgcaaccatagctccattaattacattagggtttgcctttttagagtccctccatttccagcctcctttgcagttatacttgaccttattctttgggatagaagcacctctgtggtgtacacgtttcgggaaatgattaccaaaaccaacaacataactcattttccgaggatttttaccgaggacgtaatcgatctaccaaaacagcaaagttaaaagagttagttactatttttggaaaacacagcttatagtagaaagtagagttggtaggaaaaattaagcctacacacctgggtcttggcaaagtcacgtaaaacatcagtagaatagaaattaggtccacagtaccatccaggtgtatctgcagcatcaagataatcactgaacagggtagctagaaaagctgcattgactacatactgaaggggctgaggtcttccatgattcagctgtatcaaacctcctggaagaaaagaaaaacaaaaaagggcgaaaatattagacaaaagacccatacacaagtcaatgaaataatgaaccacattcggcccttaaaagtcatcatccataaatccattaatgaaccatgaacgcagtacctcttgttctgttaaagctattgaagattggcaggtatgagcacatgattatgctagtctgattgtggaatgtcctcagaatctcttcatatggatacccagggctcaaaaataatctcagacgactcaaaagcacctaaatcaaagtaagaggatcattcagccactgaacatcttttgaaacaatgattccaaaaacaagtagatgatatgcagccattaatatagacaactggagatgcaacttatttcataaagaatagatatgtaacaaaaaattctccattaacatacctgagcaccggtaagcttgttgtcccagctcaacacaccgtaatcaggacctccccagaaggcaccagcatgtttggcaagaccaggagctgtagcaagctgaagatatgagttatttccagtggcatagtataaccaagctccaccccataagaactcatcccagtaaccagtggaattatagaatgtagcagcctctgcactacccgcactgtatcttcccctctgttcccttgaaaacctgaagagcgtcttagcaccgtgaacaagtttctgcgagtatgccttgttgtctttgaaaacaatagaagcagatgctaaagcagcagccatttcagcagcaagatctgagcaactgctacagtcaaccacaggtcgatcataatcaatatcttcaggacgtgtccagcaataatggtcgttgggggtggtacttcctccagaggtatccccagaaccaacctgccaaaattaaaatggaaagacgaaaatacatcagcggcatactccacagatgatccaaggaagaagctctaaaatagtggctgaatacaacttaacaaaaatagataagtacaaaatatcgacaaaatgccctttacaaacagccaattcatttacaattacatgacaagtaaaaaagtaaactaaataaaacaagatcagaaccatttacagccaatcaaattaattgtgaacagtacctgtgcagcaagcctgtcaatttgatcagcggtatgattgaatgtcttcagaaagtaatcagttccccacttgatcacatctttaacgtggttgagctctccagcagcttcatactttccgctatactcaatgacactccaactcaacatggtcatggaaaaagccattgggaagttgaacttgatcgcatctccagcatcataatatccacccgacaaatccttcattatcgaatccccctcttttccatcgtgcgtgcaagagttacccctccacgacacattgttatgtttaggaagcttaccagctacaattgttaaagggatcaaacaaaatcattagtaagacaacctaaacatacaaaagtaaaagtcaaatggaattcttttttataaatctcagtaagtgtaatgagattttgcaatgcaagcaatttgaatcatccaatctattcttagaattattgttatacataattcattcaattatataagtgagagaatccaatccgcaattctatgtataattcagagcccgatatttggcctggaaaattaatcgaaattctataactttttcgagaggaaatgatgatgtagaaactgatatttgtcacttttgacgtttatcacttaaagatcaagtttttgaaggtcagatctaagctacccaagccaattggaccaagctagaaaggaatcatcactaaacgacatcaaataaaatgagtacgagggagtaaaaagacacatacatcgctgggcgttgaagaacataagggccttgtgaagagcgagagtgtagttatcaggaggagcatgggcgtgtttatggcgaggaacagtcttgacgatgagagtgatcaatccagcgagaacagcagagacgagcaaggtcccaaccgtccaaacaaagatcttacggctgacaatgatgcatcccagatccacatacttcttcttcttctgctccccagtgggtcccaaaagccaactctgctgggtctcatccaaaggccgagacgacaacgccgcccgatcaaagtcctggagattccggctccgatcatcgtcggtagccgaatcagcggcattgatctccaatggacccccccatggatcccggccgtacatggtgattgtgttctagctctcgttctagtgtggtttgaagagtagtagtactagtttgggagaggtagagagagaaaaagtgagacccagatctgggttttagagagagagggatagaaatggtagctgaaagtttcttttatggagaaaaatgggagaagaagaagaaagaagaaagtgtcggtcggagtgtgagtgaaggtatggaggagttggatgatgagataaaaatatataatgaaaggactaataagcaaaagatataaatagaaaaggacaaatatgcaaatattaataatatattatattgtcacatttttcttaaaatattataaaatgagaatccaatccagcccaagttgaataattgagtggtcgatggatgggaacagcgccttatgacggtgggtgctttctctctctttctatctctaacctttatttcttttatttattattttaacagttgtcacctattggataaataaaattaaaattcatattattattattactattctaattttgtaagttacgaaaatatatcattaataatatttattcgttttccttttcaaaagaaaaaaagacaataatatgtgtgttcattagttactattcatttaacacatttattattaacagtcctctcgatgatccagcaatgtaatgttggtttaggttgaggataatataagtgtattgtggtaatgatattaattaattgattatgtaaatatattaaaggaatatgattgggatatgggttgttagtattttggtttttgttgattaattaattattagggcttttttttttccctttaattgtgcgtaggaattcggtttgtgacaaagaccaccccctaaccagacaaagacactctgtctaattgtttattattattattatctaatattaaaaa

SEQ ID NO: 295824 - DNA, 744 bp, Cannabis indica
ataactacattgttggtatattgattaatagtgtggacgccaatttaaaacatgtatttttgctaggtgatttgagtcgataatcggattagatttaattaatttgattgtttatatctctctttttatttataatgtatatttcataaaaattgtctctgattaacttatgatacgtgaacagtactaataattcgaaagaggccgagctggaagcttcttgtggctactttgccatgtgagtgtaaaaatatttattagataacacatatccttgtggttgacttttttatatagaaaaagaaatgaaatgttttgaacttgatgtgaaatagtattttagtactaaatgtaggatcaatatatctatctatatatattatacatccaaaatactgataatatatatcactatcatataccgtaacatatatgagaataattacgattaattatttgatatataaatccagttatctcaacgacaatttgttgacggggtccataccaagaagtttagaacatctattgtacctaacacacctgtaagtcaataatgctaatactctcatgcacgtacgtacttttgataattttttattattacttacatatattactcatactaaaagtgttattattagacactagtaatgtttaacactttttataagtagtaatttataattaattgaagatatattttaaaaattattttttaaaattatataagatttttttttt

SEQ ID NO: 295825 - DNA, 2216 bp, Cannabis indica
acgtaagaaatttactacaattctgtttcagtcccaactgagaacctatcacagactaaaacagaatttcaatttctcacagcaattaacaaaacactaatgccaaaactaaatggcattttgtttccactatagagacttaaaagatgttactcttttgaacagttgttatcttcaagttagaggcctttctgtttgccatcatctttttttttttgttctatgacagaatggtcagccagaaccttgattaataatgagtgatgcccagatggagttctaatcaaatccaaccacaacttgatggtatattaaaaacccatgcaatttcaaagtttttgtttgtaatttgtttatatagtttcattgaatgggataggctaaggtgactcttagctaaatttacaatatcatatcaccaaacctaatctttgacctctagagaaaagaaaacaatataatgtgttcatccttttttttcctccacaaagttttgcaagacaaagaataaaggacaaaaacatgctcaatatgttaggagacaagaatgattttgaaagaaagtaaaaagtacattttctctttcattataatataatctatgaatgatatttcgattttacatcaaataaagcagtttctgttaacatagaagtagatgcataagttaaagaactgtgttttaacaaggtatacagaattcaagcacacgaaaattaaaaaaaactgcaaaatattaggcatgtccattcgttaataaacaagttatatcaagtatttatatgaaaataattaagaacatcactctctcataattccctgtaacaatgattgatatatatatatatatatcattcaacttccacacagatgttgaatattaaaaaataactggtaactacctagcgagtagcgacgaccctcaacttctaaatctaatcactttcaaccattggcatattactagtacaattcagcaaagtaattttttcactcttgattctcaaataacctttaaaattctgctaatacatacattgttaaggcttgaaaataatcaaccatatatacctatttgttatgagaaaatagcagatacagaaactacatttgctatcttctcacaccatagaactaaactacagtttttataaacttaatgtaatacataatcaactgtaattgaaagttcatttacatgaaaaaactagcactaaaacaagaaagaaacaatttaatttcaacactattcacagagtcacagactcaacactaatgttcaaatgaacttagttcctattaataaacttagttcattcaattgcataacttttaaaacccatctaaatttagttcattagagcaattggaataaatcaaggtaacaagcactcatagtactccccataacttaattattctcaattctcacaacataaattaaattgaaaagcttaaaacacaataataagaataccttaaaaataccaactttaacaacattgaaaatcactcatcagcctcatctgcatctgccacaaccttaggacctgattcacccaaccaacaaatacaacccacaaatcaaaaattcaatctttgttacattctaggtcatcacaaaaaaaaaaagtgggttttgactataccgtgttgagcgggatgacggccgtccttgccccaaccgattccacgagtagaatcaaggtactgttggacgagatggcgacatttctgaaggtgatttataccttcgacacggtaacaccatttgagcctttctctgagaatctttgccttttcgatatcgatccatttctccctaacgatgtgctctctcatctcaagcatggccactgggtccttgtagggattctcggcatcgaagtcatccggcggcgaatcatcgaacactactcccttctttctccccattttctctttctctctttctctgagtttttctcttctgcaattttctttcgagtgtttttgagtttgagatttgagagtgaatttgggctattcaaaggattatctattgggcttaattgttgaggcccaatatccttatatgaggctatttaggatttttgactttccaataatgaccttacgaagtttttagttaaaaatagtctttcaattagggaaatttgaaattctatgcttaaaatgccattttatttttttcctaaatgtatagttattaaaat

SEQ ID NO: 295826 - DNA, 1134 bp, Cannabis indica
taacctccggttgcttgctgtcctggagccaaaatgtcataacctcatttgttgttaggtaacttaagtaataccctttcaggaaccataaaatgttatgaaaagtttattgaaaatattaacgatactttaaatgaaatttacaaaaaatacttataattgcattattattatttttttacgaatttttcttatatttttaagaattgttgcttctttttttttcttataaaaagcaatgttgttttcacattacaaaaacataaatatcgcagtaatgaaagtaatattttttagaacaatcaaaaaaaaaaatagttcgtatttttctataaaaaaatccataaaataataataataaaaaagttgtaaatgtaaaaaatataatttttttattatttttaagtatttataaaataatcccatattttaattggagaatttgtgtaaaagttctcaatattttcaaattaatgtgcttaaattcctaacaaaatattttgatgacaatagtttttactaggactgaacattttgagcaggttcgacccggacccgggcaacccgctcgcacctgacccgatcaacccgcaattcgcaaaaaaatacatattcaggctagtcgggttcaacccggtacctcatcgggtgggtttgcatgttaggttttaaggaccaccaggtttcgattatatatattgtttatttttttatttacatatattattatttatatattaattaaaaaatattttcagttttcttttctcatttcatttcaccagcaaccagccacacacacagtcactgagtcacacactcagacacccacccgcccaccatctcttctccaggtcgatcgacgatgaccaagggattgacgacgacaacatccatgaccagatcgatgacggcaacacgcctccttggacctccacgactccacacggctccaggctcctccctccacgtacgaccatagcacacgactcctcaatgacgtcgagtcgttgacctcctttgctcgctcaatcattcacgactcacgcagtccttgctcaagtaaggtctccgaatctctgtttcacaattttttttctctatttttctgttaaatatataaaaaatattata

SEQ ID NO: 295827 - DNA, 2702 bp, Cannabis indica
aagaaagaatcgtactctaacagaaatagctagagtaatgttgaatagcaaagagttattttgtgctttccattatattatatatagattgatacaaagagttatttgaattttaaaataataatattaagtgtataaatttaaatgtctcgcgtgtgtaagaatatattcataagcagtgtatggtagctctgataattggataatataccttaaatttactaacagttcagtagtttaaaaaattttacagccaaaacttaaacttggaggattacgtgcaagtaaaacaataattaataaaaattaactacaaaaaaactcaaatacaaattattaccataacaacaataataataataataatgccaattctaataaatgttgcccatgtagttgactaaaaaatagtgggttatatgacaagagagatataaaataaagacaatgaaaagattttatattgagcacaagtactctttcatatttcttattaaaaaaagaaaaattgtgattggctaaaaaataaaagtaggtcaagtggggtatgcttgtaaaacaagcataataccaacaaaactcttattagaccaaaagttgagaaagtaattttgtgacatttttacatgaactaaatgtcattatagaagtaatttttgaaagcttcaaaatgttggagaagaagaccaccattaacaaatacagagtgatcagcatcattattattatccctaagtatcaaaaaaccaccatcaatttcttcataagcaagcccaaaatggatctcatttccccaaccaaaatcaataccctcaaacgacaagttcaaccaactcgtcactatgatgttaggattcccccaatgtcttccacctccgccgttacttgacgtcgattcataactgttttgaaactttgtcaaatctttttcactttttagaaactcagttgctgacattatgtaatcgtttgtaaccatctcaataaccgaacgtactttactaactccgtaacttaacggtttacacaacaactccccagcttcacaactcgccattggctggaaagctccgttaccgaagtaagaaagcggtaacggaggctgaagacgttgacgcaagtcgactgacactagacaagcagttacttgttcctttaagttcttccttgccttaaccgaacacctccaaatatgagccgttaaggcctcgtaacacgtgtaaggtcgagatcgacggtcttgatcgttgttattcgccttgttcttaagtttctggacttgttcttttgtaagttttaacgtgaacaatgtcgtttccatctttttacgctcttcggttgtggtgggagcggcggcgttagactgtttcaacaaaaacggcatcttattacaaaagtcgtttgagtgatcaaaccgctgtgggtttgcaacacaacaatcaccaactccaaaggcttttttgtcgaataatggtgcgttttgtaatggcaagcctcgtgcgattcgggcccactctttcgtgaaactggcggcgcttactccatccaccacgacatgtgacatagtaatccctaggcttaaaccaccacaacttaatttggttagttggacgagaagaagagggcgttcgtggattgggagagactcgtttatgtaaggaataagaaaacgattagactcaggagttggtgtgaagtgatctttctcgaaatgagaaagatctgcgttcagctcggctacaacgaaaaccgccccgtcttcgttgcattcgagctgaaaaccgctgttgtccaagttgcgcaagcgcccagctagtggatagaagtggagtagagtgtggctcaaggaatcgattagggtttgagtaacggtttcgaatggggttgtgtttggcgcataaaaataaataacacttgtgtgagttgtgcatccgatctgatcccataccgacaaggattgatttcctttccaagttggttttgaaggagtcaccataagtttttgcttcatcttcaactccatcttatttttgtctttaaatttggatttggaataataactaatatttgtgaaaatagaggtaaggatactcatatatttatagggagaaatttgatgttgcgtatgctctaataactaagacgagtatttcaatttttccaaggaagatgaattatttattcgttattattattaattatatatattaattaatattttttttccataattgtgtatattggaactatatagggttacatgtaaatttttagaaaattttaaatagtttacatacggaaaaaaaggttcaaatattttattacaggcgtgattatttttttatacgtggtaagtaattgtttgaaatttatttttaggacggtaaattagtcagaattttctaaaaattcactaataattttaaataattataacctatacgccatcattacaaaaattattggactataaaactttgttgaatatcaaaacaaaaaataggtatatatatatgataaaaattattgatatttgacattttcaaatatcaaataccatattaacatgttaatttattattcgttagcggtttctcatataaacataatatttgtatcttttaagttattaatattttgcaccaaatatataaataatataatataaaatatataggggaattatcttatatactgttttt

SEQ ID NO: 295828 - DNA, 3306 bp, Cannabis indica
gcttcttcgcaagtgtagacaaatagaaccttgcacgcatatcatttctaataactttagggcgatacattaagtctttcatgtacttgtaatttacttccaatttcaagtcatactgcactttgtcaacatccagttcttcatacaaaagatcaaccaaacctgagtagcttacattcatatcaatgtcaaatgttaaattttcggcccagttataaacccaatctctaccctcaaactcccaaacaccattatacacaacaaatgcattaacagttgaacctgtcacttacattaaaaaaaatacaattacaattttgaacaaaaatctcaccgaaaagtgatccaaattcttgaagatgcagtaaaactgtaaaccatcgaacccaatcgggcccatatcggaccccatcaaaaataatgtccccaaacttatattggacagctatcggactacccatcgggctcatatcggacccaccataaaaataatgtcccaaacccacattggacacccattgagcccatcgggctcatatcagacctcatataaaaataatgtcccaaacccatattggacacccatcggaccacccatcaggcccatcgggctcatattggaccccatataaaataatgtcccaaaccacccatcgaaccaccccatttggccataattgggcttccatccctatcttgatacttacgttatgtatcgaaccaccatcgggcccacatcggactccatcagaccagatgaaaaaaattgcagactccaagaaaaatgcagtattcacataccgcaagcatttcaacacacaaaacagcaaaataacaacaacaactcacagatcaagcatccaaacaacattctaaactaaatacatcaacaacaaaaaagatttcttaaaaaaagaattacccattgatgtttcgtatatgatgctccgtccaatgagagaaaatattgtagcttttagttgtagtgtagtgaaaagaagagaatgagtgaagagaagaaacatttgtgttgctttgtggtggtaggggagctccccagtaagagaaaaagagagaagaagagagaggggggtgatgtaaatggagaattgagatgtatattttagggataatataaaagttgtcatatgttacaaatattaattattatgagtttagagaaaaaatttaagcacatgtaagcatgaaaaattaaatttccctttggaatttacctttgctcctgtggaagatccgaacttactttggtgggccatcatatgagagagtagaaagaaaattaaaaagttaagaaaatgtttgtttttcaatacacactttgcaattttgattatcagaaggaacatttcagcttctttggtcttttgatttttttttttttattattattcagaagaaactcacagatttgtagttagtgtgccatagcacgaccattcaggttaaaaatcaataggcaaggacttgaagacaaacttgatgaaaaaaaaccttggggtatacccagaaccaaacaacctttttacaaatggtcaactttacaaggcataataatcactaccacaaatacgatgaaagcctaaaaataaacatctatacatatccaagaaaccatgtgaattagaaaaaatatgaccacatgaaaagtcatgaataatatcccaattttgatggagcaaaaccatgctggttctcacatagacttggatgaataatcacgtgaagtatcaacatcgcttgaaaagacactagtgctagtatctttaaaatcaaaatctgtaagataacttggttttgatgttatagcctcaatttccatatctccaagaagcattccaatgacacgtgacattggtggccgcaaccacaatgacgcttgagtacacaaaagagccactcttaccaatcttgtggcttcattttcatcgaattcggttaatgttggatccacaagctccaaagattggttcatttcgtataagttccatgcctgtacatattaatcaagacttgtaactttgatcacatagattgtaacatatgggaaccaaccataactatgatgtaataacaagttttgaaaaaaattcattctctaatttttcactatgtgatgccaatttgttagagtggaagaaacttatgcaaggaaaatttctctacccattcaaggagataaatcttctcattttccaggccattgcagaagtttggtctcccactaaggatctccaaagcaagaacaccaaaagcaaaaacatcagccttttctgtcaggtgcccacgcaaagcatattctggtgctaaatatcctctacaagatcattgaataagattaagtaagatgtcatatattgaaattactagttcaatgtatatgcagttctattcctttgcctgactatattttataacagttttgtgttaagtcatgagaattaggtatcatagtttgctctctgggattttattccttgtgggaacttaccaagaaattcactaagattttctgcgtctaatgattgtagggttcattaaaaggataagtaagaaatataaaaacttgaaatggtatggtgttaaaagatcttacattgttcctgcaactctagtgctaacatgtgttttattgtcatcgtatagctttgccagtccaaagtctgatattttaggacaaagagctgcatcgagcaaaatattactagctttgacgtctcgatgtacaattcttggcatggattcttcatgaagataagcaagtcctcttgctgttcccaagcatatattgaagcgagtaggccagtcaaggtggaactctttcttttctgcaatagtatgtagacaaattttcatatgattaacttcaaaacattctctatttcactttaaaaaaacttgcagcacaggaacaagtcaatgcattttaagttgaaaaaggaaggggaaaaacatgtaaaggaaagtttattcctataaggctaagtgtgctttggagaattcaattattcaacttcaattcaagtattgctttttcaggctgtaaattgtgtttgtctacaagaaaaccatattagacaagaagctttgaatttgcaatctcaaatgtcaaacaaatgaaaaaaaacaaaaaatctagtttttcttacgagtttaactttgttgcagaagaaacaaaatgaaaacactttaagcaataccgtatacccaactaggcttctttaaccaaactaaatagctagatacaaggacttctgtttttgtagtataactcaataaacctaagac

SEQ ID NO: 295829 - DNA, 1923 bp, Cannabis indica
aaaaaaaaaaaaagttaaatataggggcacgactgtagtggtgtcggcccaaagtataccaaaaatgggcaccactttaggtcgtgccctagttggacgtgccaatatcccatttttcttgtagtgatattttaaattctaaatatattaggagatccaaataaataccttttgttgcaatatttatagacctgataaattctcataaaatatattccaggctataatcgaattatgattatattttcttaatatttaaatcttatttcagtcaatatcatgtgtatacaaactttgtatcaaagcaaataaattatctgagctcgcatagtcattattaggcttaagtgtttcgttagttagttatttcagttagagtagttaggctatttgttagttgtaactactctatttttttgtatataaacttctataatatcttttgcataataatatacagaattatctctttctctctcgttctttagcaataaaatagtatcggacgcttaatcgttctttcttccatggcgaacaacaatgaagaattgttgcacacctccataccaggttcatcacaaaacactaatcatcttcccaaaacaaatcttgtttctttctctcatgctttatctatttgtcttgataaaacaaattatcttccctggaaacaacaagtacttgctactatcaaagctagtcgtcttcaatgattccttgatccaaacctcatgcctccacaattcatcactaaaaaagatcgatgaactaacacaatctaccatcagtatgaagattgggagcaacaggacattgtccttgtgtcatggttgttgtcatccatgtcaaaacgtgttttaactcgaatggtcggctgtgattctgctgctcaaattctggctcactcttcgtgaatactacacagatctcaatcgtgctaatgttggccaataaactcttcttcgaaacactaggatgaaagattctctcagtgattgtctccttaagatcaagagcattgttgacactcttgcctctattggtcatcgcacatctcctcaagatcacattgaggcaatctttaatagcctgaccatcgattacaatatgttcataacctttgttaacactcatactgaagcatatactattgaagagatcgaagctcctctaatggctcaagaagtgtttctggacaaatcaactaaagaacttgacatcacaaaaagtgaagtaaatttggctcactgcaaatcctcatatggccgaggatctggcccatcaccctctaacccaacttattcccatcagtcatgtggtcctccccctagtttttcctactccacaccaactctaacatctctagtggtccacctacataattatgcttgttttctatattttcaggtttcctatagctgtgaaagtttgggacttcaaaagtacgataaaagaccaacgcgagccacgataattgaaaaaaatagcatttggttcatctttggccgcggccaaaaattggaagaatggtggaaatttggctagcacagtggccgcggtgagcttacccatggcggcggctagagtggtcctcgccacggcagatttattcatggtcgcggcaagaccctgacagggacatcaacttttatgttcgttatctcgctgtagcgaggcatttcatggctgcaacggggttccgtaaaatttgaggttaattttgtcttttctcgattctttgaagtctaggactaaatctatttaaaattgagtgcgagaaaaagagaaaaggaagcgaattttagacctagaagcagtcaaggaccgtagaaggagcaaaatggcatcccgaattcattccatcatcagttttatgttaaattttgcttttgtgttattatggatatgaatatgaactaaatt

SEQ ID NO: 295830 - DNA, 3116 bp, Cannabis indica
aagtattaggaagaaaatattgttcataattcaatgctcattagatcttattgctaacctcttcagccaattttcttcttttgcaacaactctattgtcaccgagattcgcaccagcagatgcatgaacttttataatgtggcttgcaataatctgatatgaatgaaaactaaatcaagtagctatttccatagttatgctcaaaagtaagataatccataatgaagtgaataaaaaatttaataaactgagtgcatttttcttgattagaagcattgtaataaattaccttatcttgactgtacatcctgatatctttgacaatgaagattaaatcaaatctagaaagaattgttgtctgcaaatcaatgttatcctgtgcagtctggaaagaagtagcttttttaatcagttcacagcagaaagtaactatgcattgaacaaactaatagaagtgttgaatcaggtgaccacagaccttgagatcatcataacgtccagatggggggttagcagctgcaaggacagatgttctagaattaagaacagtcgtattcctgctttagcaatggatatggtttgctgctccatggcttcgtggatggcaaccctatgcaacatcaagtatacacttttttagtctcattacaacgtaaaggttaaacagggcatatttctagcttgaattacctatcttctggcctcattttgtcaaactcatcaatacagacaacacccccatctgccaaaaccatggctcctccttcaagatagaactcacgctggaaaggcagaggttaatgaaatcagaaaactttcaatccaaaatactgatgggaaacttatccattagtatcagtacgacactccaaggctaaaagataagacaaacaagtttctcagatcaagaacgcactgtactactatctctgattacagaagcagtaagaccagcagcagatgaaccttttcctgatgtataaacagccacaggagctgtcttctcaacaaacttgaggaactttacaaacaaagcaataccacattagtgcacaatataaaaccaattgacccatgaacagcataaaacagaccaaacctgtgatttagcagtagatggatctcccaaaagcaacacattgatatccccccttagctttacaccgtctggcaaactctgcttgcagaaatgaattattacgatatgtaaacactatatggaaaagaaatataatatttttagcttccaatataccttccttgatcctccaaacaaaaggcaagccacagccttctttacatcctcatgaccaaatatggagggtgcaatttttgagcatatgtttttgtatacatcctgttctgcggcaaacttcttgaattcttctatctattattttttttatgagaaaaaaactttgttaaaattttaaaactgaaaacaggaaaataatgaaagtatcgaatataatctattgtaacaaacaatgaacatgtatacataaccaacattcactcagccctcatgtgaatcaactggtaaaagtatctttcaaataagttcacataagaatgattccaactattacctcttctgaggtaaaggctgctggaccacgagagttggcatcatttgcttcttcaattcctacaattctgatataaggctgccttacagcaactgctcctttgtgcctgcagcaaccataacaaaatattccatattcagcaatcacaaacagaaaatacctcattatacagtagtctcaaggttttaacattacttacgatgtagaagaatttgcagcttggtagatactgtatattcccataatagttaatctagttccaggtacaattgtttgaacaagatggcggtccacagataaaagcatgtttctaggaagttcaccagtaggtacatccttcaataaccaggaaaaaaaacagttagatatgagagaaatatatttgcttcaattgtttccggtgagtcaatcaccctgcctcaaactttcatcatcaagctaattttcttacctctgggttttcctgtagtttcaaggtttgctgatcaacatacttgctcctatcaggaaccacaacccatggatcaattgggcatggctcttctccagcctacaaaagttacaagtgggctgtaatcaatttccaggccttaggaatttaatggaaaaataaaaaaggaagcttggtagttggtaggaggctaaacctgaggaacatggttacatgagcgagggacaatagctcccccaaggcctggcctacatggaactctctgcacgtttttacaattcttacacatcacagtcacataagtcgctttggctttaaccctcgaagcagctatagtgataccagctattttgacgagttttgatatgtattgagcctgttcataacaacaataaagatctcaaaaacacttaaaacagaacccatattattatcattttacaatgattattatacattaatcaggtagaatatgcgaaattactccccaaaccaaatccatttgcacaaatttttacaaaagaaaaactcaccccaagcgagcgcatcgatactgagtcctccctcgaagtgagcaaaatctggacgtcctccggtactggctcctccagttgcccttcatttccggccaccttcgttttcaaattcgccaaaacctggcccgccgcattctcaaactacagccataaaagtaacacgaaatgatgttcaatcactgaaaatattacaaaattaaagacaatccaacaaacaaaagtaactatgagtaccaatggtaaaaaatcagccggagcagaacgaagcttagcagggagatcagagtcgaaggagtggaggtcttcaagatcaacgagaaggaacttggagttatgaaggaggctttctctgtaaggaaagacgttcttatcggtctcgaagcttcgaatgaattccttgaacttgagaaggactgagtggttactggcgtttccaccggcggcatgatcaccgagtccaccggaaccatcgccgagcgactgcgcctggtcgctgtagtagatcgctccctcgtcccaccccgacatctctctctctct

SEQ ID NO: 295831 - DNA, 1607 bp, Cannabis indica
accatcgagaatactaaatttttcctgacagttttaaatagttacttgatttttttagtgacggtcctcgaaaaaaatcgtttttaggaccgtcgcgaattctaatatttatagtagggcaagtaaataaaaaacttgtgaaaattaaattgtctcggccttatggcccttagataaaataataaaaattatggcaaatgagagaataaaactaagccttcatctcaagagagacttagacgtaatctattcgtcttcgtatccctatgaagacgtcgaggctccctctaagtaaagtaaggcttcgaggaaaaagacgagaaagaagataaaaaacgagtttagatgttgagtttcttgggggattaaaactgctgaaattatcattacacacttggaaaagttacgcttctatccttttcttcttaaaaagtcctttaactcctaaaaatacttttttaggagcaattgttatgttcatattttgagcagtaatatgatcatgacacgtgtataagagttaaaaatcaaccatctcagatatcaaaaaatcaaatacgttatttatatcgcctcaaaaatactagtcacgtatggttataaatttaagtttttaagtgattaaggataagtcaaaataatagctcactaggagactagcgaaatcaagaacaactatctcgggaacaacagagtacaagaaaaataagacaaaggactttgttggtcgaataagatagaataaaggaggtcgacctaagaagcataaatgatacaatttatagagcttacttaaaagtttatataagaattattcaaaatttcatcatgaatgatcaatgcgagaagaatttccaaacatgtatctcgcatgtgtcgtctcgccaccataacaacgcaagacaatataggataaatgcattctaaataagaaatacaaagatatgtgaagacgagactaatcattacaaagaacatgtatactgggaaatagatggagacaaatctgcatataagtttattgcgagcagcactttacaaatggatatctcggtaaaataactgtgtctataggataaggccaaataagcggttatttgatagttatacatattagcaattgaatgaaatctgaaaattattcacgtttcatgaacggttatcaagataagaacaaatagaataactaccattcttgaaactttataaatagtggtaaaaaccactagacaagagaatgaatggcagggaatacaaagatccttatgatcaatacttgtgtgatatttgcactttgtataaacaaaaaccctaaaaataagatggactcgtaaactatgaagatataacttcaaaaccacgtaaaacttcattgtctattacttgcagtcatctttcatgtagggatttttcccaatttgccctacacacatcaaagcaataatcaagttttataaaggttgaaactgaccttttaccccaatcaaacacaagttgaccctcaagagttgagaaccccagacgacagtctctctttcaagactacaagtcgttttgaacctaaaccctaataataatcaaaacattctgtaacgtcctcgcttcaa

SEQ ID NO: 295832 - DNA, 1201 bp, Cannabis indica
taggatgttaatgaaacatacatgttagtaaatctaaatcttggtaaaataattccaacaatagggtgttggtaaatctagcaacaaagataagttggcttcaagagttcttgaaggagatgagatttaagcttcttgttgtgcttgtgatctggtgtgatagtatgaacgccaatgcacttgttgcgtatcccatttaccacgctaggacaaagcatattgagctaaatgtacattctgttcgagataaagttttaggaaagcacctagaaattcgctatgtaccatccaatgatcagattgttgattgtctcacaaaaggtctgtcccatttcaccattctaggacaactacctcagagtgatttcttcaccctttcgcttgtaaatgcaggggcattattgtctatcctgcctccaaagttgttagaattgtaatattaatctcaatgattattccatgcaagttgtcttttatagcgttagcatagatttcattaattatttagcttttagaaaatatctttgctacatgtaagcttcattaattgtattctatactgtaaatcctgattttcaagtataaataaagaagcaaataattcatcagcctcaatttgagctgatttcattcattcaatacactgtattgtagcctattatatatatacacatttaacgttacatttttcataagaatctgttgtattctttgcttcagatatcgcaatcacatatatactgtttcattcccttatttgaaaaactttaatatatatgtactatattattttatttggttgaattgcccatttttcaagtccatgcattattaaacagccagacaataaaacttttcattatccgtagaaattcactaatttaaggcagagagccacttcttggtggtcactagctagatccaaattaaggaacagtaagtacggtacccaagtgtagtgaccactcatgatatataatataaaactatttattacaactcctgtagctgatgatccgatccatggtcaatttttatattaaaacaaaagattttggacagtagaacatttaactccctaaaccgtcttttcatctatgaataagcctttttgtttttgggtatagagtagggtgttcacaaagtatccgatccaatctaatccgcacgatccaatccaatccaatccgcaaaatgcgga

SEQ ID NO: 295833 - DNA, 2437 bp, Cannabis indica
ctagaaatcacacataactagattcgtatacaacaatattaaagaaaatttacaacaaatttccttattatacaatttacatcaaatctaaacaataagaagcaataaacaattattcgtatactgttagctagcctagctagttttatgacattacaattatctggctattactaattatattacacgaaaatcactgtcctattattgtgtgttgtattgtatgtaagttatttactatctcactttgagtttctcggccaaccacccaaacccaactatcccaactatcccaactatctgtgatacaaaaaaccagacataactaagggacccaccccttcctctgttcttgtccccacattaacttttttaggcctcttcttcctttcctcacccaaaaccttaataaaagcttttcttttcttctttataatctctaaaaactcactcatatcggagcagtactgctagtgccttggtgatcatcatcatcatcatcatcatcatcatcaaaaccccacctgacttttcggcttgtatttgtttttcttggtgaaatttaaacacgcttcgttattattatgatggctgttgacctacaccgcggtggggatttattactctcttcttctgatcaattccacctctctgacattaacgacgatggctttagtttctcagaaattttaggattcgacgacccttcaaagccttggcaacataatagtagttttgatgatgagttttcaagtaatgggttttcctcgccggtgagttcttccgccgatcaatcggagactgaacagaaaatcgacgactattgcattgccgagttgactcgtgaccagatgactcgcggtttgtttgatccagatgatgacaaacggtgtcgtttccctggcttaattagtagcccaggaaaacagaacaaggtgtgtactcatattcagttactgcttattaattactctgctttttttttgttcaccaaaagagcaagttattcagaaatttattgttgttttcagacaaaggatttcggaggatggggttcgaattcgagtcgggtcggaacatggtctccgttaggttcgagttatggaagcccagaaaggtcttctcatgagccaacgccgccggccacgccactggtcgaaaaacgacagctcccttgggattacagcagtttcgagataacatcaaagcttgaagatttaaatataataagcaataacgaaggcttcagcaaacactcgactagtaataatcaaaatcagagcttactagctacttcaaatctaaaaacttcaggatttcgccgtaaccaacctcaaactctagatcaaattcaagctattcgtgtaagcaagtacaacccatatattcattgaagattcaataatattatattattataattatgattattctttttttgtgtatatctacagtttcgtaaggtgaagcaagagctgattccaaagcagaaaagcacatcaggaaagagaataatacaaaatcaagaacaaaatctcaaccttccattcgtgaagaaggacagaccaacaccaaaacgtcacccttgggtttccccggtaattaaccagaagccccaacaacagcagcagcaaccattgggttcgggtatgcgagcggtttttcttggcgggtcgggttctgcaagtgggtcaagtgggaccggagtatttttacctggcgtaattggcgaaacatcacagtctcgcaaaaaaaaaggtcactattataccctattccaagttcgaacaaaataatttactttgtcccatcccatattcccaattttggtgtgtcacctatttcttacttatattatgtcacatcatttcaattgttttttttttttttttggagaatggtagaaatatgaattttggcaagaatatatttcgatcccatagtagttatattcttaaaattatagggtatgattttgattttgattttttttaaattagtcgttaaagggggtgattttattacggttcccaagtcgttgggattggttggtctgaaagtggagtatcaccaatcccatctttgatatctgataatcagtactactggtttgtaatgtaatattttttttaattctttttggtgttggtttgtgaccttggatctaatttaaatcgaatgattgtataggtattcgtagctaattatagaaataatattattcctctcaatctctcatttccttaaacctaaacttttggtactaagttactaattaactacattttcctacctatgataatggaatggtgtcactcttgtgtggagtttggtccttttgcaaattgttcagttaaccaactattctttttcttttttttttttaaattaaaattaaaaaaaaagcccgttccaatatatagagaagaaaagggtt

SEQ ID NO: 295834 - DNA, 6714 bp, Cannabis indica
aataataaaagataaatttgtaataaaagtgttattttgtatgtaaattttttctaatttaaaaggttattacaactcgggcgagttgtgaaactgactcggtgttcatccttgtcaatatcaaacgacgaattggagagtatcgcttttcaattctgaacaaaaggggaaaagcccagacaccaaagatgggcgagtcagccaccgaagacgatttgcttctcaagaatttcttcgctgaagtcagcgaagttgagagagacaacgaagtcctcaggtacctatctctctccttctcttcaatttttttgtcatatcaatttacctatagaaacatgtaatatgtatatagatatatgtggtatagactatagagaacattttcacttattttatggcgttcttccatttgaccaactagggttcccaatccgataaagagtttcctttatagaagcagatttttactgaattcgttgataatcttgtggagcagaatctgatgggttggataatctatgaaattaggaattttaaggatcctatatagctattacacagattgaattaggttctgtctaatttccatagttgctgcgtatttgcctactgatacaaaagatggattttgatgaacatagttagacgacatctaattgcagtgacaacatggtatatttttttaagcttggagattgtgtaattgacatttatttggattcactgctgaaaaatagtcgttattgatgatggtatatggattatgatccttaatccttagggtgtaaggggaatgatgcgtttccctgattagtatctaatttttatttcaatgtacgaagattaagcaagacatttcaaaggcccttgctaagatttgttttaggggtgggaggaggtggtttgggttggggcactcgtgaggaagcatgttgattgcttgtgaattattttctgtttttcatcaattgaagttgttcgatgtctattagggtaaaatgtttcttgaaaagccacgataggtggttgttttattgaaatgttaaggatccttttagccaattagctatgtctgtttgggtttgaattataattttgtgcttttcactttaatgttgttttgctcctagtctatatggttgaataattgttattttaaacaaataataaattgtaggatcctttcatgcttcaagttaaatccttttgagtatctaaacatatcatttgattcaaccccagaagatgtgaaaaggcagtatcgtaaggtattttattctttcaatttgaactatagtaaattttattttgattattgtttgcttataattttgtcatttcattgacaattctactcaaaacatctgtagctatcattgctagttcaccctgacaaatgcaagcatcctcaggccaaggaagcatttggaggtgtgtagctctacctttcatgcttttttttttgcgaagggttgggaatatattttattctcgatttgcttgttgtttttgtgcggcttattgttttaggtctaattaaattatacagtacatatttcacgtcgaaacaattataattgcaagttaagagattattttaaattccgaacaggtgttttatttatgtatattcttattttcatcctgtttttaatgctgcccaagtagtcataatgcatgtagaaatacatgggacaagttataagctataactgggataacagaacaaaagaagggttatcgaatttcagttgatttagagcaacatgctgaaaagatatgcactaacttttggaaaatctactagtgggcataacacggatgttatgctcaacctttaaagcagttggttgtgacataagggagttaaaatgaaatttggggtttgaacttttccttgttagtttacacgagagttcacaaccattttccaagatttttattagaaagtcgcaggtgccttgtacttaaacccccttcactattaattttcaaaccacctccaaatcgacaaaatttctaccatgcactcataattgtctctcaaagaattttttcattagcttttcaatctccttaacactgcagtggaagttttcaaaagagagaagtgagtaacatggataatgttgactgaataagagtcaacctttttcctatagacaataatctgtcttttgttccgacaaaccattcagtcgtttagttaaccagacgcacaccacagcaggtttccccctaattgtagaaacaaactttcccttccattaagaagtttgaatgtttttaatatcattgtttccacctcccgaaatgttttatcttgttgatatgtttcatgttttctgctctgtattttttcgcattgctaaatgtatttgatttgttgttcatgtactacagggtattgtttccctctaagcttcatgggtataatagattttgtgtagaactgtcattttactgcttatttctactagctttcatgtgtatattgacataacattttaggtttttatctgtgtaatttgaatgctagtttctgaaagtgtggttaagttaaatttcagaagagttgcgatgattaacaaattaatagacatcaactagttttttttaagttaatttaaatactgagacaaggttgttggtttcttgcagcattagcaaaagctcaacagttattacttgatcaacaagaaagggattatcttgttagtcagattaatgcagcaaaaggtcagtatgatctttatttgtttgatcactgtacgattaaattttaccagatgtaaatcagaatttggttggaatattaaatttgttgacgacgggctagtgatttcgtcaaagtttatgaaaaatacagatcttattcttaggatggccagaggtaattatttattaatttcattttactggaaacaaaagtttcattaaaaaagttgagatatcatctagattgcaacctagagtgagaggatactgaattctaaaccactcaaacaaaagactacacttacatacataagactattgcaaattactgccacaactgccaatcacttataataagcacagaaaaagataaatccttgaagtcattattattgaagatccatacagccacctcatgcttaatcatatccccaatataactcctggattgccagaggtaattctggtaatgagtcgcctggctttttctcaaattgtgttaaatttagtgtctattcctgttgctgtaggcttatccttgtattatgtgttggaaggaccttattttgcctgttatgtgagtttcagaagaacttagagcaaagaggaaaaagcatctgaggaaagatactgcttctaaaatcaagtcattcgtagaagaggtatattcacttacgctttcatctgtgtttatatatttctctgtagatacttctcatcttgagctatttactgcaacaaatttatctgtgttaaaattttgactgtagaattaagaggttcaatgcagcctagtttaaggtcaaataggttttgatcttctggttcaaggattttctgtctacttgtctgtattgttatatttattaataagactattatgtttcttgtaaaacaaaaatatgataacactatttgagttttaaggggttttcatgcctctagatacgggggtgcaaatgtggcttttataccaattttgcatttcactattcagaacttaattcaataaaaaaatggacaatgagttatctctaaaatcttactaaaaaatcccttatgaagatacacattcactgtgaaagtaatcttcattctcagactgttatcctttgcttcctttgttatattctttatttaaattattttaactcattgtttgcttctattttctgcctccactcaagagagatgcaatcctttgttgttgttttttgggatcaccgttacagtcataagtttgggaagagagctacttacatgccttttgacatgatgcaggggaaatatgatcaacagtatgaacagtcagaagaatttaaacaagaactgaagttaaaggttagagaattattaactgaacaagaatggaggagaagaaaaatgcagatgagggtatgttgaagtcttggctatttccattattttggctattgtttttaagcatttaggctttcctgactttgatgttttgtctatttaaatttagatatctgaagaggaaggtaggctgaaaaaggatgaagaagaaaccaaagagatgtggaaaagaaagcgtgaacatgaggagcagtgggaaggaacaagagagaaaagggtttgcttcttaacctcaacatatgtatcttgcaaaaggattatagtcatacctcttatggctgctttagtttcttgaaattatatgttttgcaaagaaaatataaatgaaagttttctgatgagtgtgtatagggtagaattggattgagtcatgtcataatatagaacaagtggagtgagttattaatatatatttttttaaagaaaataatattagaaaaattgatagtattacaaatgtgtctcaccaatgatatatgtagagataggatttgtgttaggatttgtgttaaattattattattattattattaaggttatcaaggatactaaattatcttattttaagtgaattaatgccatgctcatactaattgcatgataaatagacacatcattgtttgcaagtcctcttcagaatctgtatcttgaatttgtgctatgtagtttcttcattctaatctgttatctcctttttcggtcatcaggtttcaagctggagagacttcatgaaaacaggaaagaaggtaaccattttacatttagctttccttttgtatgagcattatttagttaatacttgcaaagaaaaatgtggaaataaaatatgaatctctaatttaattgaatgttaataatgaactttcagggcaagaaaggagaaattcgacctccgaagctcaagacagaagaccctaacaaatcgtatgtccaaaggccagtaaagaaaggttaggttaattgatatggtgaatcagaaaagaaaggtgtagatgtagagagaaatctgtatctgactgtcttaaacatgtttttaacatattctatttggatttgagtgagacatgataaggtggatgtctctgtgtagcttattgaaacccaactccatgtcagcaaatttagattatatttactaaaatttatatactttcagtttgtatgttaagttgacaaaaaggtaaatggggatataacattttagcagcacattgtttgttcagcaaccaatttagtgtttatttatttatttttgaaaggagagatcttcattcaaaaacacaaaggaaaagataagtcacctaattttcatgactagctacaagggggaagatccccatttcagctttcctaggcataaaccattgctcctcacatgctgctgtacatagttggaagcgaaaaaagacttagctaatctattacaatgaaaagtatagttcttaatctcccatcgagtcacatctccaagttggtcctctcctaaccgccatctcaagagccgagagacacgcctcagcctccaattagagggcctcagcctccaattagagggtctgggaatgggaccaacttggctttaggccaaagtagttgtccctggtggtctatcccaacaacactacccattatcaacccctactgccacatcacaatccattggaggcaaggactaaccatcagagcacatttcacaaagcaagcattaacagaattaacaaaatcaacaaacttgttagtttaatagttattgattaaatcatttctagcatactaaatgtatcaacaactatagagacatagaggaaaataacatttgacttcgccccatgcttatctaaattctacaggaatttaacccaattctatataccagtcccactcaatataaggaattagccaccaaggtgaggctctctatacgtgagaggcaaacttccaattaataaacaggtgcaccatggtctcctctccatcaccataaatcaagtatgtgacatcttcaattggaatgcaagcaccaaagatctctcttaacgctattggatctttttgactggatacctctttacgtaagttttgatatactgattagtttttttgcaatctaaggtatatgtaataaatcttttagaacaagtggtttgcgagatagagtaaagagctggttccagtatgagaaattaataaggcgttaccatatccaataatcgatcgctttttaccaccatatggaatgtgttgggtcagctggtttggatccgcagtgacgtggctattggctccactatttacaaaccaatcttcatggtcgataacctcaggtgctgtaacaaaagcatttggattgcctgatctagaatgagtttgagtgtttggtttattatgagggtcactccccatgaatgattcatcatagcgattgtatcatataattgctgaagacttggcaagttgggcggacattgttgttagagtttcttccacttctaccacgaagtcttctaccattttctcaataacctccatgacctatattgtggcagctagaagattgatttggttgttgtttgggtggattctgttgtggttgagggtttttttttttgtttttt

SEQ ID NO: 295835 - DNA, 3092 bp, Cannabis indica
tacatataaattgtctaacaataaaagcaaagacgtagcatccttaggagatggggcattaaaacttggtatcagagcaaccacgacattaaaggtcttgaagactggctggatatgtacatttgatgtgaagacaagctcaactcatggtgtagtaagttttatttgtttacatactatgtgattaattatttatatgatattgttagaaggatgtttggaagagcatgagttgagttattatttgtggtatattatgattatatcctaattgagaaagcttggtagaaaatgtgtatttaattattaagtatagttaggggaaaattcttattagcattgttattacttaagagctatatcgatactattcgatgattggtgaagtactgagcgacacatctaaggtgatttgagagatttgacgaagagtttgacaggttagaaatgatggagaggtgaaaatttggtatcactccagactatgaagtgatgtacgtcaacaaaaagtagattatttggtgagacaaattagagaattgattaagtagtaagttggactaatgatagattgatttttagatatgttatagtgggtcggaggatatgaggggttgtttaaggtggttgtctaagtagaacaaagaatgtacttctttgctttaaaggtgatccagaatcgttgaaggtggagcaacagatggttatgattgctttccattcatggatcaagcgagctaaagatgatgactaagtggattgggccatcttataccacaaaagagacattcatttgatggaaggttgagtttgaagctcatgaaacaaaatctataagttggaatataagattggctaaggagttgtaaaggtatgaatatgaaatcatttataaagttgagacaaaaggatttatttcattcgtttgggatgttacaacgataacgagttatgttattaaatttgataggttggttaatcttatatacaaagtgataatcaaaatctgggaaaaagtaggttcacttgaaaagtggagaagctcactatctgaggtgtaattaacatgcatatatgtttagatggttgagctagatactcttgtgaatcgtgatggatggagtactaaccattaatgaaaaacaatacctaagagatgcttggtagtctctattttggatcaattgaggtacgggttataaccccaataattgaaagagaaaaaaattcagatgctcttttagatgtgggttttagctaaaagtattagaaaagtgaattttatgttagaatggaaataagattagtaaatctacttgtaatgattgaataccttcaaaggaaatagtcggttacccgataaaaatttattgtcttttagtgagtaaggttaaattcatcattgagcatagatagtaggccatataggggtagtattattagatgaccagaattacagagttatttttaagtaacagtaagggtgatagagttattactctataaaccatagtagggtagatatggttgttttactagacatcagaagaggatcagttactatattaaagaacagtgatcactgattatcttattaaataataaagtttggattattttattagacaaaaaattctgtatattgggatataatttgaggtttgaaatgactagttaagtacaagggtagtagtgactacaaggaagaagcagtaacatttgaattagagaatcaaatttcattcatattctggagaagaatacatgaaattttggatcttgatggattagcatcaacagcgggagacttttgacaagttggtgtgatggtctatacgaaggggttgtcagtgggaccgagagtatacatgaggaacatagatttctagatatgtttaggaatttccagggttactgatgcaacgagaaagtgactttagggttgaagtaatgttagggacagagtcagttcctcaaacctataatgagtgctagcagtaagattaaatgtaaggatttagttgtaaatatgtacgatttgtggtataccagaacttgtaattattctcatgtacattagattatttgctaaagggaaaggatgaatcactgagaatagtgttgattaaccaaaatgtgaataagtgctctattagggtaagcatcctttatcaaggatatgtgattagactgatcaactttgggaaagatcattttccttaaagctgatctttgatctaattattatcagtttgggaattaggaagtggacatttctagctctaattttgggtactcggtatgagtattatggtctatatggtatatttggattaattaactctatagcgataagttatggacttgacagattagaaatgttagatttctttggctttaaagattgggtacagattgaagtaatttaaaattgccgtggtatgaaacaactagtgagaacaaaacctcttaaggttagttggatattagggaagaagagtaaaagggttttgtggataaatccttctaaatttgaggtaaagattaattttttgtgcaaattctaagttgtttaaccaattatgagcaatttgtaagttactgtgatattttaaaacaaagttaggctgagttttatagtagtcggaaaagtcattacctatgtgctaaggcaattgaagggataagggttagagcaattcatctgatattggcagagagtatggttagaattgaaaccaagtttagagttgggagaatttgtcaacattactcatgggcaaacttgttggaagaaatgaagatgaaatagtagagagaagattatcgaagaataaagatcgaattcagatacttgagcttactcagtggaataaagagattgaagtgagaaaatacttgacgagtcttatgctacatcatacgtattacatttaagaacaagaacgatatattgtctttcaggtagcccatcatgaccttactctagagttaagtgtacttgacttggagtaatctcagaatggatgacctcctgagaagttttttcggggaacgttgttacgaaaattatgaacaatacgcaagtgcac

SEQ ID NO: 295836 - DNA, 6152 bp, Cannabis indica
aatattaaaacattattacatatttttgttattagtttttctacaagtgtgtttggaactttgtattgtaattatatatataaattatacaaaatgtcttaaataaccataaaaaaattattttaaatacaaaaatagattaaaaggtgcattgtaaaattttcaaaaaatggccaactaaagtcgtatttaattggtaaaaatggattctctcattcttaacaataaatactttactcagtactcactatacataaccttattaacttttaattataactacaagacttaaatattttagttttttcatattcacaagagaaaaagtaataacttctttaatggcttttcttccgtcttcgaaattccaaagttgagattatactccttaatttctttcaagccactaacaatatatcttccttcttcagatttcagaaccgaaaagaaggttcttcagtgtggctgtcaaggaaaaatatagaataaagacatccccactcaagttgtgatgatcaaacaaaagagctcaaaagaacacaagcaagagtaactaattctagtttgtaaatgttagaatgtacggaagtgtgattgagaaagtaaaatagcatgaagtgtataagaagaatgtatgagattttatctcaaaactaattagcgataagtagagttactatgcattttatatatataatgatattaagtctccccacattatcaatatcaacttggattgttcaagttttgcaaaacccttaaacccgattttaaagtaaaccccattttgtaaatagaagttgatatcattacaaataataatatttggccttgtggtgtggtcatagactcatagtggtattgcagagtgaaaatggttccattaaagtcatagagaataaaattgtctaaagtagaagttccactatattatactagtgttatatgaacaataatttggtagaacatctctaacattagtacccatattagaagtttaagactaaaattcagctgaatagaacaacaaatccaacaagcctgtctattagtaaaactccaaaatatttctgagaaacaaatactaaatttgcagatccttttctaaccatcatcttcttctgctgccaccaattttagctcccactattgactcaccaaccccctgtcactgaaatttcatctcatgaataataataaacaacacattacacactaatggtttcaaaaaaaacttcactaagaaaaactaatcaaattcgtagaattgataaatggttaaatactctactgacctccagtccttgacattcaccaagctctcttgcgcttcaattttttcatactcattagcgaaaaagcaacaacttccttaagtgtggcttttcttccttctttaaaattccaaagttcaggaacagtgtatcttccgctcggattatactcgttcatttctttcaaggctgtaacaacggtagcatgtatctcttctccccactcattcttgagatttctaaggttctcatcttcctcatctataatttcctgcatcatatatagtagtactacaatcaattacacagtagaaaccaaaagaagttcttgaagatggctttcaaagaaaaagatacaaatatgaaaccatcacaacctccttcaaccttacgaaagtagtaaagtaaataacaagaccatgcaaagaatcgcaaactacaccgaaacatgaatagttgaaagataaatttagttaaagaaagtacctcaggattcccattactagtcaccaccttgaatggatgccaacttggatttttcagtttttcttgccacaaggagcatagggtggaggcctgcagctgagcttcgtccagagaaaatcgtttcttgcaaatatcaaggaagggcttctggtcgagatctcccattctttttattccaatgttactacgaccacttaataaatcaggcaacccctaagaaaaaagtagtcttattcagcctttgagatatatctccatgtcagacagaggtcattaagaaaaacacatagaaaaacaatgttacacttagaagcatgaacaaagttagccaataaacaactgatcataaaattacctactaatctcctaagaagcatagttttcaattttcactcaagtaagttcatgtagcatcaaaacccattaacgaatctaatgtagtttggctgattataagaatctgccatacctacacttttttttcttcaccacaatgcacccacatactataaacaatggtaaataaataatgatctagtgaatcaactatctaatgcccaaataaatttatattaaaaaccttgtacctcaagaaatgatttgcgagcttcttgtaactcatcattggtctcacgctccttcatcaaaagagtttgattcaaagactccaagtcctccagattttcatgcttttcctgtaattcatctttcatttctttcatcttcttctgaactgactcatcatcttgatttcctagatgcttcaacacctctaacttcccctttaactcttcaatttccattgccaacttctgcttagcatccagctgcttttctaactgaagaattttattcaaggcttcttgtttctccctctgaaagagttaaaatttagctcttgtttgtgacagtacagatatcaaaactctaatgcaattttagggagtatacatacatgcatcataccttttgctcttcaaccagcctatagacattctcatcagcctttttctgctccattgaagctaactcaagtgaactgtttatcatatcattctacaagagagattgaaataaatcagttctgtgcatcgcatctatcatcacaaataacaaaaccattatgttccttttgatgttacattcaatcgggtaatgtatggtgcataaaaaaaaaagacagacttacagctagatggctactgaagtaaaagatttaagaatggtaagcaaaagtgaaatatgtaatatgcaatatgcaaaccttcttcttgtcctcatcaagtttttccctttcgcgttcagttagtgcttcacgtttgtttatctctttgctccaggagtcaagtttctttttcttcatctccaagtcataactcaatttttctttttcttctataatttttttgacattttcacgtgccctccgctgcatcttctttgtttctgatcaagaacaaaaagctcattatttctaactgaagctcaatgaaaccttcaattagaaaaacaattaccacatattgcatatggtcatatagaatgacatgtcaatagctgctgaaaaaggatgctaatatagagcctatatggtgatttgtgaaatagctagatggtattatgcaaatatctcttaatagaaatgatccaaccatgatgtataaaaaaatgcacatttttatctcttaatagaacttagatgattgtaataacattaataacaagatattgtcaatatcacatagtgatcaccattcaggtagacacatgcaagtatacaaaaggggaagaaataaaccttcaataaaagctacatgaagacggtctttctcttcaattatcctgcttaaagacattgttttttattgtacttatattgcaggtcatccaggtccttatttgtcatatcaattttactagccagggttgccacaacattgattctgttctgagctgcttcattgacaatatcagatacagttgtcagcttgccattctgacgaaggtactcccctatttgtccatcggagttataatcaaatgcacgagcacaccagccatagatattcgagccacggcgcatttcaggtgcatttacccaatgctttctgctgaaaccatcgctttcaaacattttttcaaattcagaagcactcatgaaaccattccagttcccatcaaactctacaatggcttctgcagtcgggtcctttccattccaaaatgtttgaactttagaaggtttatatttggcaaactttgccagccaatgatcagaatctggaaaggttagttcacccttactttcgctgacaatgttaaccacaatacaagtccaaggccacacatacagttcaacttcttcattatattgtggaactggtcttgggataataagctgctgagtatgatctggctcctttgctagttcagtatgcaaatagtttgccaaggcaaggtggtttgccttttgttttgcacttctgttggcagaacctttggcaactcctgaagcatgctgcagaaggtctttaaacttgtagtcttgcttcttcttcccagcgcaaaagggacacctaagagcaccattcggacccttgattttatactttcctgccctcaattctgcatatggtttgtcagaataatcgttgatttcagagtcactaatatcagattcttcgtccgagctgtagtccatctgacttagatacaacagagtaaataatgcactcgtatttgtcaacgaacgaaatcaccaaacttctacacgaatacccaaagcaaaattaataacataatacagcaatttcacccaaaggaaatgaattaaaataccaagtagaaaattacataataatccacaatacattctaatcagtatacatacattatcatctccaggaaatggcagcaaacagaaaatctcaaataaaggaatctctccactatggccacattgaattgttcaagtgtcataattcaaactaattcaaaatacatatcattcaaattgtaaaccccaaagttcaggaatcagttttatttttaaactctgcatttactttctgaatgtatatatatataatattggagatcaataaagaatacacacttttgcatgtatctattatggtatcagatattatacggtaaacaccagcaaacagcaacaacacctctcaccatcatcaacaccaatgaaccaaaccaaacactcattagcattaaagttgctgctcaaacccctctcaaactcacctctatgaactatctctcttggaaactacattttcagtcactcttcattggctgtgaccttcttggctacattgatggtaccaagccatgtccaccagccactggtactcaatcaaatactaccacacctaatcccaaatacactctctagattacacaggacccatatataactgtgtgtttttataaatataatctcctaataatcatcgcaggaaattcattgaatatcttggcatttcagagtataactatgatcgaatacctaaaccccaaaaatgtaacacaaattccagacccatttcactaaaccctatgaaattaaaatgagttttatccaagcatgaaattatcagttgatttagggctaaataaaagtctgaacacctaatctaagctatgatattctttaaaattccatcgtttaaatgatcacaactaaaaattcgccgaaaaagaaaatcaagctagcaatggaaatttatacacaaaatataagtacgcataagttcaaaaaactgaaaggatcacaaattacttccatgattaacgcagtatctcttaaattacagaaaaaataaaacttacagtgagtgagagagagagagagtgatgactatgggtgtctctttcagagttgaggaagaaagcggagacggacttttttcatctgtatagtggtttcataagtgggacacgtgtcaatattttattggcaataatttttacgtattttatttaatttcttcaaaagagattatatttttggacaatttctcataaagagaagagattaaacacactatttatgttttataaacctttttttttttaaatatatataaattattataatcaagcatatacaaccatgatttactaaaaccaatttccatgaaacatgagcaacattggttgggtggaagaaaaaaaatctttgtgtttggttagaaagaaaagaggatggaagaaaaaaaaaagagaaatttacaaaagtcatgaaatttggattaactttaaaaatttttaaaaatactgtgtttttataaaatattagtagaacacaaaacataacaactaaaaaataccaatagaataccaatgaaagcttaacacagtatactacaatat

SEQ ID NO: 295837 - DNA, 4240 bp, Cannabis indica
tcgtacgaattggattggatcgactattttatgaacacccctagctagatgcgactattcttgaaaaaagtaagttgtttggttatggttttgtggttcgggattcaaagagagagttgttagtggctattgcttcttgttcgcaaggggtggtgtatccttctttgacataagtgattgggattaatgagtttcttagttggttgaaaacctagagttattctagggtggatagtcttattattattcaagctattcgtaattttttttattatgcttcttgattttcctgatatgtactattgctttaatgtgaggtcatttcgttttataaaaatttgttatgaccatatttctttacgcatcttcaataaatgctctgctaacccatgaaaataacacttcattttctaaaccatcaacatttggtaaagtactaaattgatataaagtagtagtagtataactatatctttatggaaagcacaaaagagatcctaaggtgtgatgtatactacacctttacatatatacaacacggtactcttatttactaaaatggaccaaaattagagatatgtagcatttttgctaaattagagcttcattgtttggtcatgaataaaagtggtcatgactcatggaatgaaacgtagtttgtctggcaaagcttaatcatgcaatcgatagcaaaagaagtttataaaagaaagaaaaggaaataaacttaagaaaatgattttgagtgccttgttgtgtaatccaaccaataaagctaagcaagatctataaatatagtgctcatacaaaagtggggaaattttagaaagaaattttgcatgcaaatttaatattaataacgtggtcaaagttcatgattgtactaacaacaaaaaaaaagatggtaaagacctagtaatggccttatgggacgaatataactaataaatatggtaaaataatctaaataatgagcatgcaatcaattatagcaaaagtttgctttatacaaaatgatattattcaattgaatgatgtaacaaaaatcaaatcatgttggaagctacaagaagccatataaagatacaaactacgaaattatgtgctcacacataattatctatacaatgaatcacaatcatctggaattatttattctatgatttagagcaaagtgaactcggatgttcttggagtctttaatgtttggctgttgagtaaaacatgttaaagagttaaaaaccattatagaagtaaatcatgttgagtgaaaaaccaacaaaattatcttcaattttgaagttaccaaaagcccaaaacagtaaaggagacaataataaattaccttctaaaagttgtcacatccaacaacataactatctttaaacacagtattcaatctgaaaaaacacaatgttgttactatatataccatagtttgctgatctcactacctaaaataaaaaatacatctgtgctcttaattcatggcctagtattatatgtgggtgtgtcacaggcaaccaagccataacaagtctataatgtttagtgtattatcacataatcccatttgttcttcagtatccttcttgtcattccagtaaacggtcactagctacaaaagagttttatccaaaatgtgttataagtttgtgtgcttattatgactacttgaccctttggtataataaatattgaataaattaatatattgtattaattgttacgatcaaaatttttaatacaatgtaaattgtattattaaatacataataaatagtccgtattaacttatattataatatttacaaaagatccgaaatcaattcttatctccgatccgaacccaaacccaaagctggagccgggacccgaacccgaacttagaaccggaccctaacccaaaccgggacccagactcaacccgtagtcgctgtttagatcgagtttattgaaaatatattataactttacacaatatattaatataaatcaataccaaacataatattgtattaaataataccaatacaatacaatccaacacaatagaatacggcgtaccaaataatccattggagaattagtttacagttacatagtgaaattttgtaattaacagacagaaatttccaagtattatggggttggagcttgaaagagctattagaaaaagaaaagagaaaacaagtgcctttttctattgtaaagtttaatcacaaaagatgcgttaaaataaactcaagggttcaatgaattttatttcatcgctactttccaaaacactgagtggtctattatagtcaaaaagataaaaaggtagacaagcgaaacacgaattctagtcaaagaaaaaacagtgatgatggtcaattgaaattcttttatttgtagtattgctttcagtagtggcagaaaccttttgggagcactaatttaaggcgtaggagaaagaaaagtgaaacttgctgtgtcgtcatgcaaagacagtagtgtagaacttataatatgcccatgcaaatgcaactacttagtctttacccaataagcagaatctattctttccacgctgcagctattttcttgtgtacaagctccactccaagccgaggagacaatctaggtaaagttacctgaaagagaaatttctacttcataagagaaggaaacttgaactaagatacagacaattatgtaattattggaacaattgttggagactcaaatagtaacaaaagtaaatagattttcaaacttgtttgcgagcctatgctgcaaaaataaaagtaaataaaaacaaaagctgaggaaacgtaaagcaactaaagtaatgctcctctgagacatcctaataagggaaaaagcaaaagaaagatgagcacagcaggcaatcttaaagtaaatgttggattgaagttgatctttgatttgatactcaatcataccggagaccttacaattagtgtaaattatttaattgataagaatccatctcgaccacactttaatgagaggtccaactgaaaccatatacttgcactcatggaaagcaaaccaactgaaaacagcactaaaaaggtctttgaaatcaagagaagtctgactgaaaagaactaatcttgtcaagagaggtcttgcaaagggaacctgtatctttcagcaggtattcttatcagggattgataaatatgccttgttagagatgatcatttcatatttccatgtaaatattttatgtgccgaatgaatttttaactcaaaatgaataactatttttatttttcacctgcaaagcaccaaccatatttaactctgttaaaaagtaaaactggctggtacatcagatggataatcaactgggtcttaaatagcaaagaatatccatgaaaaaaatatttaaccataaaagtttatgcaagacctgttatttaagaggagggtacaggaaactgagatttgcatttagagcaattgggtattggattaagacttcattagagaaaaggggtatgatccaaaacaaagaatgtgcaggacgatcttaaaattgctaatccctaacagctgatctgcaaaagtaaactattactttatgttagaatattaattgtaaatattaaggtaaattatatttagtagtttcctatttgtatttagtagtttctcatttagtcacctaattttgtatataaatatacaattctatagaatacaacacacaattttattcaccattctttacatggtattagaactaaacttagaattgtgattcgaaattcaaaattcaaaattagaaattagagttcataaaaaaaaaacaattaaaaaataagattagagtttgagtttggggttcctttttcgaaaaccctagttagagtgcgcgttctttctcaccgtccacatagatggattgcccaaccgcggatctgcaaaaccccgaagtccgacacccagtatcaccgcgcgtgggcctcacgccgcccaactccgtcgccccgactcccacagaccggcgcatgagggcgcgtctggcttctgttttggtgacggtcaccgtctgtcaagctcccaccccttccccaacctcattgcatcggtctccagcagtgcttatcattttgtagattgatacttttgccttcttcgagttttggtgttcattctttggtgtttactttcttcctttcactttcacttgtttttgctttcgagattatggcagagataaaat

SEQ ID NO: 295838 - DNA, 1732 bp, Cannabis indica
attattttagattttttgagagataacactatcaaataggactgcttcaaaattgaaacaagaaatacacttgttccttctagtttgttatcaaatatgctcaataatctctttaataattttcaaggattgaaccattcaaatatcgttatgaaatcaaacaccaaattaaaagaatgtattttgatgaacaagaaaattagcagaaaaaaaatacttgaagttcaaagtacacttgctcaactttgctggtgaaagtgaataacaccggcgcctaaattgaggcacttaggctatacttttttgaacttttgaagtcaatgggccgagtatgggcctggtcccaattaatagccaaacaggcccaaattgtcacatttccctacgctttcccttcattttatttctccccttttctttcatattcttctacaatcttatttgtctttattcaatttctaccttcattcaattctttcccggcaagaaactccggtactcccctaagtctatcccggcgtaagatttttttttattattatttatgttcaaattttgcaatgttaacctttattttggtgttgtgacttttgttttagggctaaaactgaaaaagaagaagaaaataaaaaagaaaagagagagtgagctcaaactgattgttgaaaatcctcaaagacagaacactcaatgcagcattgtttggtaaacattagaatttaatctttttagtggttgcttttttccaagtataataattatcatgatgatacaatttaaagttgtggtgttttggtttccctttctagttttggaatgagattgttaccaaacattaccacctttactttttagagctgatttatgatttgtttttgttattataaaacgttgaagttgctcattgaaaaaattggaatatgaatagccattgtgaagttgtggaccattttgaaggtgaagctgtaaacccaaatgaaacaacaattaatgcttttaaaacaagtaagaaaagacaaacatcagttattggagaacattctgacaaaaaagtaaaagaaactcaatgtaagtattgtaaatctctctctcttttgctagtaaaaggcacatggttgaatgcttattcagtaattgtttatctgattattatcaaaagatggttttggttaataatttggcttatgatcctgttgttgttggacagtgttttgctaaatgcatagcaaaaataaatttaccaattaatattagagaaattgtggtgtttgaagagctgattcaaaagcttatcatccagtgttcacaatctaagttaaatttatagaacaactagaattgactttatcaaggcttataaagctatgtgtgcagagttgattggtatactttgaatatgttgaatggttctattacttatacttttgttattttttgtcaagaaatgtgttattagctattagaattaataagctatcaagtataactgaaggagggataccctccaactaaaaacttattttctaaccaaagaacttattaaaatcaactaacattcaaatagaaaagttcaaccaataatgcaagagtttttgtttgaaaaattatatgaaagatcttgaacaagtgtttttctttgaaatgtcaacaagacacctatatcacaaaccaaaataaatacaagcaatttcttaaaatgtaagtttaaaatattatggtgccgtttggtaac

SEQ ID NO: 295839 - DNA, 10730 bp, Cannabis indica
ttggggtttaattagatctgggcagtgggttgttttctgggttgttttctgggcagtggggttattaagttgcagttgttgctgctgtgttctttagagaagaacgaaggaggcctaggatgctaggttttttaggtgtagccgtttgagcttgaaagataaagtaatcatatatatatatgattgatattagggttttctagatatataccgaaacgacctatagtaattggaaagtcgttggttttttttactgaagtcaaataggggctttgactagggtgaaaggtcatatttgaccttggctttttttatttttgttttgctgtgtgtagggacaagcaagaataaaaattcctacagtttttgctacggaccatggaggaaatcttattttcaaatgatcttatttattatttattctaatgtatatttattatttattttggatcttgtcgttgagaattagaagttgatttttttctctctaagaaaagaaatatgaacaaattattgccatgtttttgatagaggttcatattgctagccttggtgtaatttatttatatgattgcttccagactcaaagctttaaatttttgtttgataccttgtttctttattataaacttatgaaatttggtactttttatattcagggacattaatacattgatcattgatattaattttttatttctgtttcatctctctctctctctctccgactgtaagtctctccttgaattctctatctgtattttaatggcgttgatttctgattcagattcattgttgtttacgctgtttcaaggcatgaaactatggtgtttgtatttttaagttgtattgttcgtctttttttcctttttaaatgatcttattttcttaccaagtcataaattaaggccgagactgaaattcgctttcgtatgatcaagtaatttagttgaatattattacagatttttttatttttcttatctttccaaatcgaggcatatctaattatttgaagtaatgaattagggaattaagctctaaataagtaaatatttaatgtttgattaatttaacaagtgttaatttgcacttgttatttttaagcttttgtgtaatttaatttctgaattcgctatgcttttgttttcaattgcaggtggattttgatgtgattgtagtattaaaactgggtttgaatttggtaaacgatgggtgtggagaattaccatgtaattgaacttgtaggtgaaggatcatttgggaaggtatataaaggaagaagaaaattcactggccaggtataaacattatcttggtttccaagtcttggatttttttaatgtctctttgtttgtattttgctttgaaaaggtttatcttggtttttcagactgttgccatgaaatttattatgaaacatgggaaaagtgataaggatgttcataatctcagacaggaaatagaggtaatagactcactttaatttggtattgttgttgttacataggaattttcttgatggtttttgagtatttggtgtttgcatttttttttcgaatgtcagattctacgaaagctgaagcatgaaaatatcattgaaatgcttgattcctttgaaagccctcaagagttttgtgttgtcaccgaatttgcacaggtaataatttcgtattctattagaccagacacttgtaggctgcaaacacagtggataagtatctgaatgataactttttctattacttacttaacagggtgaattatttgagattcttgaagatgacaagtgccttcccgaagagcaagttcaggcgattgcaaagcagttggtatttcatcactagaaatgttgattcatcttaattttattcaaagattttgttattaaaggcattgggttttttttgttcaaaatgttcaagtaaagcttttctctgagagaaaacaaaactgttgaaatttgcaggtgagagcgttgcattacttacattccaaccgcataatccatcgtgacatgaagcctcaaaatattttaatcggaaaagggtcgtattgttaaggttcatcattcagaataatctacattattgttttagttgacatttttttaatgaccaagacaagacaatattaccttgttcctgttgtcatattattaattttcttttctgctctcaataagctttcttttaactagttacttcagattttatgtaacctttgtatactcatttttagatgataacttgtttgctttctaaattgccggcagctttgtgattttgggtttgcacgagctatgtctatgaatactgttgttttgcgatccataaaaggtaaggttatactatcttaaattcctaatgttccttttatgattttattttggtaagtgtcagcaaattgatgatgtaacacacttgttgaccctatggacttctgcctctctttatcaatttcttcttttctattccaggcactcctctgtatatggctccagaactggtacgagaacaaccctacaaccacaccgcagatttgtggtcacttggtgtcatactgtatgtataactccttgtcttcttcatacatgtctagcaatttctgttcattttagcttgtttttttgtaattataagttgaaaagattatatcaaagattttcttgataaaccttttttgagagttttccactcagacccaaattattgattgttccaatatgccaatatcttgatggttatccactcagaccagacacttgtgtaaaaaaaacgaaaaataccaaccaaagttacactctaaaattctaaatgaacactcctaacttagaaaacaattgacaaaaaaaaaatccattataacatattttgcattgcagcaatttggcacatttcttagtctcctttgcaccatcaaaggacctgataaatataaatatctgttgaaaccaattagaattttacatgagtaataagcttaatcattagtatttctgctagctgtgttgtttgtttcctctacccctgattaatttttcttcttctttcaaactataattcatgtaattgacaggtatgaattatttgttggccagcctccattttacacaaattctgtatatgcactcatccggcacattgttaaggttcattctgtcaaacttaaatgactattggtaataagttgctaaagaaccagctaacttgacatgcattgtgccaggatccagttaaataccctgacaacataagtgcagaatttaaaagtttcctcaagggattgctaaataaggttgtcttttatgttaaaaagggttttgatctgacaatagtttcatttatatttttcttctgccaattattttgtactaagtctttgttaataaatgacaggtgccacaaaatcgattgacatggcctactcttcttgaacaccctttcataaaggattcgtcagatgaactagaacccaggcccctcaaggtagttatatttcgaacacgatgatattaagcggacatttggtaaagtaaaaaattcctattcttctatagaaaagagatgggaaaaagaactgcagtattagcttatatgtaaacttttcccaggaaatatgtcctccagaagctagagaggcagcatgtgcaaacggaggaagcacacttcatccatcagctggtttggcttttctagtatttggttgtaagccctctgtttcttcaaatgtttagttctattttaataatttgaatctcatgtcctaggtgaaaaaaactctcctaattcttcagagaaaagtaataggctgaacattcaaaaagaggctcaatttgatgctcctgactctaccatcaacaactcttcacctcgtgaggatttcccaggatttgcaagtcctaatgatgttaaaccaacaggtagatattttccgtggaaaaattaaaataatttaaaatgtagaagagagcaggctagcatctatactccttgacttttcatgctacaagcttttctctgcatgtagcatagggtatgtagtagtagatgaaatgaatgactaaaagtcataaactcttaaatcttatcttcagtacaaggaccggccccgtttgcttattttatgtgacactggtaaattgtagtgaaagtatatattattttcaggctgccagacattagacagattagagaataactctcgcacagtcaaaggggcacaaatgattggtcaagataatgaagcattagtacatgttttacaaccactgaaagtatggtctaagggatctcaaagtccttgcaggtaaatttagttaagcgccttacaaacattagttatttcatggtactttatgcttatttggactgtttatgaagaccatgattcattgacaattcatgcagggatcaagacattcttttgtcaaaccagtcactaagaattctatcaaacgtagttgcagctggtgccttatgtttgaatgaacttcttgatgagataatacatgagcttcttgatttcacacaccatgttgtttgcttgaaatcatctgaacttattgacttaatagcaaaggtatgcgttcatttagaaaaatatggttttcctttgtttctcattggcattaacagatgatgctgggcttatgcaactttaaattaattacagagtttctcgatcatcaaaattttggtaaacaacagaggaagtagcgttacagattcatggttcaggcaatgggtttcattaacagaaacttttgcacaggttttttttttattattattatatatttattgcgtgtttggctgcattgaccagtgatagctggaaacaatacaagtatctttaattggcatcttgttaaatatgtaggttgttgcttacaaggaagatgcatctggaaaagtcttgtatgaatccactgcttgcattactgtgatgttagcttcagttgctgaaggcctaaaagcattctattctggctcaggttctgaggtcaaatcgactgccattgagatactcaaacagattcttggtcatgctaaaacatgtggtttagtggatcttttgtgtctctgtttggctatttcgggcgcaagtttaatctcaggttcttctgataagcttcgtgctgcttgtgaatcatgtcgagctatttggtcacttattgaagcatcagaaattttttacatgaaagagaaggcctatcagtttcccctcagtgctctacaaacctctaggctccaacttgaaaatagcaaccccgatggttcattgtttggtattgaatcagttaagattgttgatgcagttacaaaagtattccttggatcaaaggcagtacaggttgctctttattactgccttcaacaacgtctagaggcttcattatgtgctgccattcaggtctccgtctcccatcctagttacctattgtttagcttcctcgttaaccacttatttgatctttctctttctttgttatgaaacgctttaaatctgaaggaatattaaatcacttctgtgcatatcaagcttgctactgtcagcattaagaataacagtttctatttatgtttcagctcttgttgaggtgttgtctccacagtcccattgttccaggtgctttatgtggcctgcccagttccctacctataacaacagttgtcagtggtggaggagatggcaccattatttcagagatattctctatattggccttttgtacttcatccttcaaaaatgaggtacaaacaaatgaaacaagtaacacgaagtgtaaatttaccaaacctgctgctctagttcaacatgcttgcctcatcgttgcgacaattgctcagtgtataaaggcaactggaagaaactcggccttgttcatgcttacaacttcccaaaagaaacaagttgctagacttgctgtccttgcacactatttctcttttgatgataaaacaaaaatttcgtttctaccttattgtgcttcagctatgttggctcttgcatccattctatcccttgaaactgggtctacagttgaaacctctatctctgaaataggagtgcctttaattcctcgaactgctgtactttgtgaatggctccaagtttcatcaggcaatcaagataaatctgatactcatactacaaatgctgccctctcatactgccatggtcttagggatggatgtgtcggtctgttagactgccggcttaggttggggggacctatagctgttaaagaattgtgtgcaagtggcatacctctgcttctgattgatttgttagctaaatcccctttcaaagcatctcctcaaggtgccgagagcacaaaagatcaagttgggctatctccacttggagtagtatggactgtttcatcaatatgtcattgtcttattggtggagctgtgacttttcgacagattatgaaaatcgaacacatcaagctcatttctggcttactaagcgatatacatctcaagcttataaagcgttcagtcggtcctggtggaggcaaagaaggcataagaataataattaatgctgttattgatctattagcatttcctcttgttgctatccagaatgctcccggcttgccggcagccactgcctctgtgaatagtggtttgcttcttaatatggcttcaccaggtgggagggtatgcatggaagacaaagacatggtaaaagtaatagaggaagacttgggaaagtatagcgaaatcctttcgcaggtttgatcttttatccctatgctttttttaactactttgctatgatctacaacttcatccctgcatttatttcgatgatatattcttcagtttcgtaacaaagactctccacaaagaacagaagatcaaacaagaatgacaagttaaataagaatggagatatcaaaatgaaagtaataaccagaacacaaacttaaatgtaaaagagttgctacaagagtacaacgacattatgtggatcgatcaagatgacattgtgtcccttgtctaagggtagatatctttattgatttgagatgagagaactgcaatctgttgttacaaaagagtaacagttacacattaatggagtctagctccagtacaaacaaactcacatgagagaagtcttctccaaggaagaacaatctttttaacacccctcctgaactctctctttctctctcaatttacaaatctgaattcctcaaatcttggagctaaaagttatcttcaatactatagaactagcataagttttccaactgtcataacagaatgttggttcattctgttatgccttttcacgagatgtccgagtagttatcataggatcttaagtattagctaactacaacattcagtgttttggataagaagttttattgaagtttgaaacattccaactgtcatgtcctagacgaaagaaaacctttatgcttctatgcctaatttcttctttatttttcaggttggagtgccaagtttaattcttcggtgtttggagtatgtggaactaaaagatatgggaaggcccgtcgcctttgttgctaaaatgatacgcaccccgaatctagcacgtgaactagtgaaaaaaggtttactggatccaaataggtggagaagattgcttgattcttcatgcccaaaagaagtcacattagatgctctaatgattgtttcagatttagctcgtatgcacaaggttagatatggcccaaaacagttgttgtatttcagaatctcactataggttctattggaagggcaacaaacaaaacttcaatgctctaagttcagatttttttgtatgtttcagatattctatgagtacatcgacagagcttctgtgttgcagtacttgaaggaatttcttactcatgaagatcccaatgtacgttcaaaaacttgcagtgctctaggcaacatgtgccgaaacagcccctacttctatgaatcatttgtaagtataaacactaaactgttttggctttttctctatgaaagatatatatatatataaatattcttttaaccgaaagtaatgttccaggtaaggtatcaaatcatcaatctccttattgatcgatgctccgatccagacaaacgcacaagaaaatttgcatcctttgctgtaagttcttctgccagtaaagactatttccttcaaacaaaaacatacctacatacgtgcattttctctttgcagataggaaatgccgcgttccataatgacacattatatgaagagctaagaagatccataccttatcttgccaatcttttgctttcaattgaagaggacaaaaccaaatccaatgctgcaggcgcattatgtaacctcgttcgccattccaataagctttgtgaagacattatatccaaaggagccatacaggtttttgtaaacatatcaaaattaaaacatatttttcatttaacaatttgcttaatgagttgttttgctcgcgttttgtgatgctgctgcaggcggtattgaagttagtatcggagtattcatcatcagcagtagcgccaaggccaatccctggtcccggttctctaaacgagtcaccactaaaggtagctcttatcgcactatcgaaaatgtgtgcacactcaccctgcaggcagttcctccgatcatccgagctattaccaatcatcaaacaactccaacaatcccccgaaaaagaaatttccaagtatgcttccgacatcacaaccaaacttttttaatagttaaaagtaaaatttcatcatgtgattttattctttcttacacacatcatcagcaactgccgttgttgctagaagttaggcctaaaagtagtccttttttttttcaatttagtgcataagattctcatcatcatataagtttctcaacccccttttctttttctttctctcttaaaaatctagtcttgtcttgtcttgtcttgtctacttttttctttggatgcctaaaacctacgtaattgactatcacattcacaacactgtgacttgtttggtcaagctcttaaatggcctagtaaaattaaaatctcccatgtgcaatcttgattctttagtgccatttctagggtctaaaatcctatttttttaatttattatttgttggtttcgacagactgcaatcccaaccaaaaattttatggtattgaatcatgtgtcccaaaaaaaaataaaaaaaattagtttattggctcaataagtaaaaagttaatttagtcttcctagtaagtcagaaaataggaccgttataacaacctactagagttagattagacaatcctcacactcacaatcacaatgtgcattatttttctttaaattatttggataatggaatggtataaaataaagttataatattttggtgtaacggtatttatgtaggtgtagagttgtaatcattattcatattcatatatacaaatattacaatgtttttaaaaccaaaccaaataataaattataattacaccaaaccaaacacaacataaattcgttattgaaatgttaaaatgtatttttgtgaaatgtaatatcagtattgatacaatttaatattgagtcttaaatattttattttattgaagggagttatctaatagtggttttagacactttagtatcttatagcaatgatgttattgaattcttacggtgttgttggaacaatggaaggtacttgtaataggtaaatttcccactataaattcaataattgcacttctgacttgacaatgaaaattttaccctattggactggccaatgtactgctctgctgcttgtacattatgtactattatcacctatcggcattcaaagttgggccatcacttagtttttctgagttttcacaattatttgtgaaaatgccaattttgtgtaccagactttgtcatctcttaaaccctctttagttattttcaagagtgattgtctactttttttactattaaaaagtaagaaaaattaatgtttgaaaagtgaaactcaactcagtgccaaaaacttatagtgaaaatagtggggccacactggaagaatcaagaaagaagccaaaccacttggggcacttttgggcttttggggaagagcatgaaattaaaagactcatttgaatgaaaaaattgaatgaaaaattgtgatgattgaaatgtgtgaatcagctttcaattttaatgcaccatgtgtctaattctgtccaaggataaataatttagaggtattatatctggtactaatattaaacatgcctatttagtacgatgaattcaaagtaatttgattatttagaatagtaaaataaaaaatatttagttaaattattgttaattgaattatattatttaattgaacacgataaattattgtgaaaatttttataagttattaaatatattaaatccattgtattaagacaaaaagtaatgtttagaaccataattgtaaatacgtgcgtattgggtcaatctggcccatattttaaaatagagtgcaataatatgggttgtgtcgtgcagactcataaaagaaatatagtttgtgtcgtgccaactttttaaagggtgggcatggcatgacttgtgtttcataaatagatcagtttttttttctatacgggtttgaatttagactctactttttgagatgagttaagaaatattttttttttttgtatctattaatcaaaaatatctttatat

SEQ ID NO: 295840 - DNA, 3890 bp, Cannabis indica
caccatagaacatcacgctttttattattccaccatacacaagcatatatgttttttctctcctaatttcaaacatataattaataaataaaataaaaataaaaaaaaaaaaaaagaaaaagagaagcttgggttgtgactttctcagttgtgtcatgtctagttatgatcatggccagagacacgttccttcacttgaaatccacctccatttggcttccttgtaagagcaaggtgaacccctggatcatggtgagtgcaagaactgttgaacataatggaattgttaatgccttgaacattgctgttcatgaaagcactcattggcagtgaaccattcttggccttgctagctttcaaactcttgtccttcttcgacttcccttcctcgccactactgctgctgctcccgctgctgctgctgcttttgcgctcagactcgccgccatttctcgcgaatttccccgtccccttgtaaatatatctggatttttcacttgattcatgtttactgggagacttgatgagttccatgaaagcccctttgttttcacctgcaatggttataatcctcattcccatagcatcagagtcggaagagtgtttgtcagagcttttttcttttggtttattcaaggagccaaggtgaccgctttggctagtggtgttgccactgctgaaccactgcctaggcttctcaactgtcttttgaacaagaacggttttttgctctgcttcaggctctgcattggtggttctcatagcacgaggcagagtgaaagtaggcggaggctcacgtgccaaggtgctttgagtttgactcgttggctttactgctttgggagactgaacaggactggtcaaacgggcagacggagcaatggtagtactagtggctcttgaaggaggaggagggctactctgttgtgttgtcaaacctctggaagtggtcctaggagaggaaggcacggacgaactggcggtgatgggaattgcgttgttggaagaagctggtggaggtgatcttgacttttgtgctgacagtaaatcagacgaagctgcggcaacaggcactggctgcggtgcaacaacagtgaaagtaggacgcaaaggcgctggagctggagctggggctggagtggcaactggggctggggttactactggacctaatggcctcatcattgtaggcctagctataggtccaggagcaggggcaggggcaggtgctggtgtcattgctgggactggtgcccttacgattgcgggggctggagcgggagcgggagcgggagctggtgctggtgctggtgcgattgcccgtacagttgcaggagctggagctggtattggtgcccgtacggtggctgcggctggagttgtagcaggtgctggtgctggtgttggaggaggggctgctgctggtgttggagcaggtccaggcgcgggtgtgggtgcgggggccgggcgggtgcaggtgcccgtataggttgtgctgctggtggctgagcaggtgcaggtccccgtataggttgtgttgctggtggctgagcaggtgcaggtccccgtataggtgccacctgcgcaggtgcaggtgcaggggcaggtgctggggctggtgctggtgctggtgctggtgctggtgctggtgcaggggcaggggcagccattgggcttgggcggactatagaacctaaacggaaccatggacgagctggtggttgagctgccatgatgacaagttttggtgtgttgggaaagagtagtagtagtagaataagaaaacaaaagaaatcggcacgtagaaaaatggttggtttgtgttgttatttatagtttttacaactataatgtattctgaattaaattaaaagaaacaaaaacatgagatacacgcgaaagaggaatacggaaagcatctgattcatctcatatagtgcaacagccaagcaaaaccatttttctcatttttcttaagattctatttcatcaaatgccttaaacgtcactaaacatactatttcaaactgtaattagattctcactttcacagttaaggattttttgtattgttgttttgtctgtctgagtctgtcttctcactcactttgcttgctgaagcttttgattttgtgatgctctctctctctatatatatatatgcctataatgaccacctttcacttttcttttcttttcttttattatttttttgtttctttcttctcaatcaccctttttcttttacttcataatgcttcaacggttacccttttattataatattaagcttgattgacagcataatttaaattggagatattagctctaatattctaaaactctaacttttgtgctatttcagtactagaaatacagatttttacctagtaataataattttatatttaattcatgtaagatgatattctccaataactaacattacatgcaaactttatgtacaaaaaaatatgatttaattgaattggatcaaattaaaacacgattgagaatgaataaatttattattgagcaacaacaaattatgacaaaacaagcaaccacaaatacatgaagagatagtataaagttatcttgtgtctttaatgggtcaagtgatcttatattgggggtacatgttagtatttagtcagaatttttttttagttagtacaatttggagatatttcttatatagatgggaaaagggaatttgtttttgtttatttgttgttatagtatttaggggtgttcatgaattgctttagtccaatttttttttttttttggaaccaaattaataaagttgattttttatatttaaaattaaaccatgccaattaaatgttcaaactaaaccaacagattaatttggttcgaaatcatcatttgtagtttgtaaatgatctattttttattttatttttttattaaatttcattattttaatgcttataatatgtaaataataataaaaatagatatttttaaaataatattaaaatatttatcaatagtatatttaaaattatccgtaaatatcaattttcaataaaaaaatcacattaaggtacggacactttttattattaaaaaatatttatataatcacctttactagatttatttaattttgtgagagcttctctattattttaaattaaaaaaaaattaaaaggcaatatttttgtagccccacattaacacaagtgggtcagtccctgattaaggtatataaagaattagacggtttgatttagtttgaactacggacaagaattttaaaactaaaatcgaactaaagaattataaacgggccgaattgacgaaatcattgatactaaatttatttagtctagtctcaaatgatttggtcatgaatagtaaggatttgagatcacggattgcatattatataaataaccctaataatacttagagatattttttagttagtcaattaatatctgtagttgatatttattataaatttgaatttatattaaactcaatacatttactctatatatattcaaaagagcttcttgaaaaactttcgtttgggaagaagaacttctaaaaaaaaaactctccaaaatttactcaaacactcctgaatacttttcatgctcaaagtactgtcaaatctaacagaccatcacctcattctacaactcattaggtcatgcaccattcaaaaaaaaattactatatagtatttgcactacaaattagtacaaaacattcattgtatccagtaatattgctcagtaccattggatttgataatagttatcttctctcccaaaaatagaaaaataaaaaagaaaaaaaaaagaacaaatgaaaattgcttgtgcaagaaaagattgatactttaaattgtt

SEQ ID NO: 295841 - DNA, 2095 bp, Cannabis indica
tttttctcttttttttctcatatacgtatacgatttcaactaccttttcttaatgaaagttatacaagagagttgatgtactcttctctttttcttttaaaaagcgtctttatatatacattttttttagagttacgaatgtgggatttgatcccatgaccttatacacgcaccctaaaagggatatctcgatgactcgtatatacatacatatattttatacatatacttaaaatttcttacaattttgttaataaaaatggtgatatcatcagctaattgtttattcttgattgtttggttatttgtagttgtaattctgtatgtttagttatcttaaaacctttggtaacaagatgacatgtacaaaatgcaaagagagctacaaagtgttttttttttcatgaaaagaataaaaagaatgctgaaaattatcaagaatacatagaaattgagaaagtttcccaattttctaaagacccctcaacagtctacatccaattcctcatattctcttattacaatgctgaaaggcatcctaccactatgaagtatcatataaaattaaatattgaatcccacaaaataaatttaatttaataaagcatcacctgataatggtattaagtaccgctagtgcctaatagcaatgctctttatcagcattaaaagaactgtgtacttgtaaaaaaaaaaaaacaaagcaactcacttatttgtacttgggtttcctagtttagtatcgaaattgtatcgaatcccacctcattaaaatagaaatctccaaaaacccaagtaaccatattttccaaaaataagtgtcaattgagcatgaatcataattgtctattttgtgttatgtgtagggacactaaggtagaatttagtgttcttgaaatcatccaaaagcgggttgtatccgtctttggttctcgtcttcgagggcaatccaaactcttccatgaacgaagaggtatcgagctacaaacacataatacaaaacatttaagcaattgattatccaactgcctatgtatgaaaccaaagcaacttttttgttatgaagaaaagattagaactaatgacttgttatcttaccaagtatgcattgcattataaaacaaacaaacaagaaagactgaacttcttcatatcgaaatttaacttactatgattgttcgcctttttttcccttgcttggacgattcacctttgttcggtctctgccatccagaacagtaatgctcgatattttccaaaagcaaaaaatcggtagggaaaaagatatcagcatcaccctgcaattcaaccagaacaaagtttcaaaatggtaaaatattgaaaaaaaaatcacagctttcgggacagtcgtccaaccaaccaatgagctagccccataaagacaatgtgtcgtcgatatcatcaatgattaaccgataatgttatataaacgtcggcagcctacctttgcatctagataactgctataatctgagctactgccatctttctgtagtaaacacaaatgaagaacataaatgttagtcattgttcataatctctgaagcaattcagctcagatatggaggtagtttgagtattttgaagaaaaattattaacaaggtgtatgtatagaactcaactgatgtttgattatgtgaattaaacttttacattaatcaaaatggaactcaaattaaaatcttttcataaccattttaagttttaagatgcacctaaatgtgcttttcatgataaaagcagccttttctataatttcttttggttaaaaccacatattttatttaggggttttctaaattttttttaatggtttatttaaaattttactacctaaaatttttatttataaaaatatgattttctcagtaaaaaataagaaaataaagaggaatcaatttataaaacaacgaaaaaatcaatttcataacaactataaataaacaataaaactaaaaaaaaaaaactaacagtttactaaagtttgtattttgtaaataaaaaagttaaaactgtaaaaatgaacatttttccatgttaacatattttttttgttaattttttttaaatttt

SEQ ID NO: 295842 - DNA, 5056 bp, Cannabis indica
aacacagaatccaaaatagtatttaccctattaattattatgtaataatcaaatgtaatgttacacatgtatatcacaataacaattaaacagatcatacatataattttctatgaaataaacatatatatagttacgtaaatttcaatcattgtcacacaggttttgatcaaatatatataactggaaaattctcatagtacgtacgtggagcttcacaatgtaattaaagttctatctctatatatataccttttacttattctttactctttcaaatagaaatcaacgttgtccacagtgattctttccccactaagttttactttttactttatttgtgttttaattcattatctagatttgataattaagtcatatataattaatactcctatatatatatatatattgttttttgggtggtattttgtttttgtaggatttttagcaacttatattattaacatgtagcctcatgttcttattattcggattcaaaaaaaaaaacttgagaaattaattcttctttagaggcttttttatagcacatctgagaagactctatcactcatttaatgaagttatatcagagttaaaggtatatacagtgggggatatatataagtgtgagagaagccctcatgaaaagtggataaaatatattaaaaggtataacagtaaatttattcctattcagatcgtaacgtaacagtgaataatattttataaataatgatattaatagtaaattttaaaaaaaactttaaaattattaataaatttaaagcatttattatatcatatttttattagtacgattctttaaattttttaaaatttatctgttgttgtgttattgttgtgagtgctcaaataaaagatactctagggatatatgtatatatatttatataaagctgactgagtgaaagactcattaatcatctttcatacacaaaattcaaattacagctaatgaaaccaattaaagtgagaaaaaaagaataaagttattaaatgagaaatgttaaggtttctatatgtcgatattactattggtacaactaaatattaagtcttatataatttaatataatagcttttaagaagtaatgctagccaatcgcaacgcgacatgtcgagaaagtgctaaacactactaatacctaataacaatgctcttgttaaatctattattattaccattctccaatattccaatatatgtcacctcagaatttttacacagataacaatattacacaaacaaaacgacacatacatttctttaattattcccaaacaaaaagacaagaaaaaaaaaaaaaaaaaaaaaaagaacacatgatttcttaccaattaattaataaatagttgactggggtgacaaagttgaccgagagtgttaacaaaggccaataacacactacacttctctactataaatacacaacaatcctagctactctaatatatcctcatcaaaacacaaacacatacatatatatatatatatatatatataatcatgggtgttaagttagtgttattgttttggattgttatgatgatgatgagaataggttcaggtcaactatcatcgactttctactcttcttcatgccctaatgtcctttccaccattagagcagaagtaagaagtgctgtgtctaaggaatctcgtatgggagcttcactacttcgtcttcatttccatgactgttttgttaatgtaagttattattaattaattcatatatatatatatataatcttgtgaagtgttacttataatattaatgtttttactacttgattactatatatatatgttgttaattattttgagttgttatattaagatctaattattatatgttattatttgtgaagagagtatttatatatattatatatataaaatatgtgtatataatgcctggattatatgtatacctgggagctaaaattttagaatattatatatatacattattctataccaactatatatataaattaataaatatataataatctttattattgctttaagttttagtttttctagcatacttttttgcctttgaacttttcttgttcaattacttgctagcggaaaaaagtaataatattaattattattattattattattattattattattagaataatcgtatgttataaaaagagtcatgaaactttgacttgatatataattgggaattttggattacatgcgtgaaatataatacaaggaaaaatctccatcactataaatttattattattattattattattattattatttcttttcagtttgttttggggagtaagtaaaattgaaaagcattatacataatttgactttaagcttcagtctccaatggtaacgcgttacaaataaaggtccttttgtcacaaaaagatgcttatagaaaaggttcctttttaaattaaaatattaaacataataaaaataagaaaaaaaatgaaattactatgagagttgtcacacttttatatattcttttagattaataacaacaattcttaacattgttattaactttcatttctttgtgtataattatattaaataagtatatatactaataagaaattacatgtcgtttgtataattacaacagggatgtgatggttcgatattgttggacgacacatcgagtttcaccggagagaaaaacgcagggccaaatgctaattctgtgaggggatttgatgtcgttgacaacattaagacaaaagtcgaggcttcgtgccctggcgtggtttcttgtgctgacatcttagctgttgctgctagagattctgttgttgcggtaaaaataaatttattatatatttaaataatagatttcattttgtaagaaatatattttgattatctccatgactattagattacgattaggttaatctaacaattatatcaactaccaaatactaaagtacttcaaatcaagcctaaccaatttttgagatattttattagtatagtacgatcttgacctattattaattattaatagtgttgattgtgcccttaattataagataatattttgttttttggactcaaataattgatttgttttaggaaatttatatatttttggattgtgtaattttcaagacatgacattcgaaaacccgaacctcaccacccaaaaacccgatccgtgtgcagctctattgtgtattattattaagcagaggttcctggtaggaaattcattcctgttcctgctccatttaatatttaggataataaataatctccattctcatcccgtttttcatatagacggggaatttctactccattaggagtgggttcccgagcagccatccccataaaaaaagtgtgcatccctacaacattcaccgtgactgtagcctatttataatttataagataataatttttttgagttaagtaattgatttattttaagaaatttatatacttttggagtgcattaatattattaaaatgattcgtgttgaagtgggaagtgtcattcccgtccccacctcgtttaatatttagagataacaaatgacttttatctccatcctattctccatgtagatggagaatctacgcccccattaggaatgagtcccagtcatccccataaacaaaagtgtatccgatattgactttgattgtggctatttataatttataagataataataatatttttatttagagttaaataattgatttattttaggaaatttatatattttgggattgtgtattattagttgggtgggcccagttggacggtggcattgggtagaagagactcaacaacagcaagtcaaagcactgccaactcagacattcctgcccctactttgaatctaacggctcttatttcttctttctctaacaaaggtttatctactaaagatttggtagctctctcaggtacataatcattaattaatctctaaacccaattaagacctttaattatattttggtataattaatcctttttcttttttctacttaggttcccatacaataggtcaagcaaggtgcacaacttttagggcacgactttacaacgaagccaacatagattcatcgttcgctacctcaacaaaagcaaattgccctaattctggcggtgacaatactttgtcaccgctcgatgtcacaacccccaacacttttgacaatgcctattttaagaacttggttgccaataaagggttgcttcactctgatcagcaactctttagtggcgggtcaacgaattcccaagtcaacacttataatagcaacgcggccactttcaaatctgatttcgccgcggctatggtgaagatgggaaatataagccctcttactggctctcaaggtcaaattaggaccaattgtaggaaagtcaactaatgaaagttcctatatatataaatgtgtatttttcttttgagtattgcctttcaaatgtaccaagtatttctactttgattttggctataatgtttgtctcttaatgagttgtaagctcattatagctatagcaattgtattgttttccgtttgggttttaattttataaaaaatttgaattcctgcaattttatttttgtaatttttaaggcacacaagtttataagatatctatatataaggtaactagttatatcataagggttagctagttacaatgaaaaaaataaataaatttgaatataaattattttatatttggaaaatgaattgcaaagaaaaatataaggaaaattcaggaaaaaaaatagaatataagaaaaatataaattttcatgtttggtaattttcataacacgattttttaatttttttttttctatttttcttatctttttctattcttattattctagggttaaagatgcttttccattttcctttggggtaagttgagaaataccatttttattaatcaattaatcaaatttatctctaattttatatttaattgaaacatacctctttttatatgtattgtacccaaaa

SEQ ID NO: 295843 - DNA, 2077 bp, Cannabis indica
ttttatttagggcacaaaccaaacatcttttatttcatacctttcaattagaaaacaagccctttatcaccaaatatcttggtttgccacaatgtatttctcatgctaaatatcatgtttttacctttctcaaagatagagtttcctctatcatctattcttggccccataaatggttctccaaagcaggaaaagaaacccttatcaaggttgtccttcaagccattccttcgtatgctatggcttgttttcgcatgcctactaagatttgcatggaaatcgaatctctcgtctccgaattctggtggggatcctctactgaaacccataaagtccattagaaaaattggaggtctgtctgtcaatcaaaatttgtgggaggtctaggatttcgatctttaacctattttaatcaatccatgctagcaaaacaagcatggcgtatctttaaaagccctgagtctttgcttagtataacccttaaagctagatactttcccaacactttgatcctcaaggatgctcctggccatagtcctttttctaggcagagtattctttggggtcaaaatttgatgaagcatggccttatttggaaggtgggtgatggcaagagcattcaaaccatagaggatcattggctatttgatttcaggttcaaattctattcatcttctcctcctcttgaacccaatctgtccttttttgtttcccatctggtgcctgggagggatcctactaagctccgccagttctttgatgatcatgttgttgatagaattcttcacatgccaattttgagtaatagttgtagggatgagttaatttagggacatgaccaatcaggcctctttaatgtaaaaactgcttaccatcttgcactctaatctagagatctgccttcctcttcttctttttactacaagtaagcaattttggtcagaactttggatgtccactgccccacctgaagtaaagcacttgctgtggcatgtactttcccgttccatccccattgcctcttcgttgttacatcatcccctcacctatatgccccttatgccaactgaaggcagagacagttgaacatgctatcttggaatgttctagtgcaaaaaaaagattggaaacactttgctttttccaccttctatatggagaataaagatcatgatattgatatgtttattgccaaagcgtttgagatgtttgataagcataacttggctatgttattttgtctaatttggatgatttggaatcagcgtaataatctatttcataacaaaagaatcatctctcccttggagctttttgatcatgttgttagttacttgtgtgaatatgttaatcctcatcaatctgagtttaaattatgccctcaaagaacagaaacaagtgaacatgtatcttggctcacttttggcttttggagaatcaacgcagatgctgctctaaataatgtttcaaagaggcatggccttggagtggtggctcgagatggtggtgacaacattaaagctggagtcgtcatcccaattgatggggtgatttctcttaacattgctgaagctaaagctatccttgttgcgattttttggatctaagctgccaagctcctagtttcttttattgaatcagattgtaagagtgtcgtggataaaattataagttgtataaaaaattcattgttgttcggtccgagcctgcatatcacttatgtttcaagatagtataacaatttagctcatctttatgctaaggcaggtttaagattaaataataagtttgtttggaatggttctcaaccttctattatagccttaacctcttgtatcttgttctttttttaaagttcaggttttttttaatcaataataataataataataaaatctatttttatgttcccaactagttatgagtaaatataattttggagttaaaaaaattaaaattttagaaacatttagagtgactttattgagttatgtgatatttgtaaagctcttttaacattaaaatatttaatttaagggatattggcggctaaaccacctgaactttacggtttgta

SEQ ID NO: 295844 - DNA, 5106 bp, Cannabis indica
gtgaaggtgaggcttcaatagttgttgcagatggtgaaagaataggtaactcatgactttgaatacttccctgattcccaagagcaattttatgtttattttttgaaccaataaaatcagaatcattcttaagaataggtggatccatgcccacttttgtcttattttttcctacaacatcagtaacagttggtgtcacagccattctaacatcattatgaaccagagattcagtgttcaaggttgttaaataattagataacatgatcgcctaagaaaaaattgacttgatttatgattttcttttcttcaactatttatgtttttagtgtgagatttatatctctacttgctatttgtatcatacatattttttttaaataatttttttttaatttctacttgatttgattgcaagaaaataaaaaaaattaaattaagattcaattaaacaacttattttttttatcatacattataataataaacataaagtaatgtatagagagaacaagccaagtaactagttattttatactatttcctcatatttttaacttttttttttaaaaaaaaaatttattaaaagaatttttttgaaaaaaaaacaaactttcttgcaaaattgtgctttaaaatccataaaattaaaaattcctccaaaaagttgtgcatttatcaaaaacaaaaaagaacctacattaataatagagataattacatgaaacactattttttgtgaaaaaaatatatttttacgtttaaatatttatttttttacatttttacagttttctataaaaacaacacgaaaacaacaggaaaattacataaaagtaacatgaaaataacatctaaataacatcaaaataaaaacaaaaaataacaaaaaaatcaacaacaaattaacaagagtacaatataaaaagaccgtattttctaaaaataaaatcaaaaaaattgtaaaaatatttaaaattccgtaaaaccgtatatttgtagttattttttttgttgttgttgtttttgtgtatttatgaaataatttaataatagtccaaatgaagcccaatatgctataatagaaaataaaaatatttgaagattcaagtggacaacttattttttttatcaacggaatattatttattatacattataatataataaacataatagcgtacaataaatgtatagagggaacaatctaaggttagggatataaacaggatggggagggggcggggattgctctcccacccccatactcatttcctaaattcaccttcatacccactccaatacccatttaattaaagcagaagcaggacaattattacctagcgggagaatgattctcatcgagtactcattatatttatatatatatattttttaaaaataatgtctcaaatagatttttttccttaaaaaatatcaaagttactaattaaaaaaataaatataagtagaatagtgtgtataataaatgaagttagtaaatataaaattgataatcgaaaataagtagtgaagtgtaattttttttaaagcagtttagtatgattattaatatgcatcactgcaaacattttcatgaaaactgaaatgtctcattaatgtaatcaataaaaaacctaaagtatgaatttcttttttgaatgaaaaatatgaatttattttaattgtaatagttaaaattttaaaatttaaatatatacatatatcatatcggggtaggttcgggacgagtatctattctcccatcccgtcttgaacccgacttgagtatgaacatttaaatccatacctgcccccacccccaaaattcgacctccgcccctgccccatcaggggcgggtaaccacaattatccgtaccagtatgtataattgctatcctaaccaggataactagttatcttatactgtttttatcgtattttcttttttcttaaaagaaaaatctataaaagagctgtttcgaaaaaaagactttcttgtaaaattgtgctttaaaattcataaaaataaaaaaccctccaaaaagttgtgtatttatgaaacaaaaaagaacctatgttcatagtccaaacaaacgaagcccaatatgcagctaggtcttcatttcacggccacactttcagtctttcactctccctctcgccaccaccttctctgcatcgtcctcattccctgatactgagttacactcagagcgatgtggaggtcagttgtggctgcaagagcctctctttctagatgctcagctcgtaagttatctttcactaatacccacacctctaaaaccctactccaatctcctccaccctctcttcctagacccactaaaccccaaaaccctagattcttctcccagctttctcaatcctccaatggcgatgttcctgtttctccagatgcagaggagtctccagagtcttttggcgaaaatgatagtgccctggcgaacgatttgcaagattcagtgagttctgatgaaattagcagtgccctcttgaatggttctgcaaatgatgaattgaatgagcaattttcagtgagtaatgaagaaaatggtgatacccaaatggagattgaagagggagtacgtgagattaatgtggagcagttggaaaatcttttgtctattcttcagagcagctttgatgggtctttagaatcgattcttgaggaaatgaatttggatctaaatgaagagtttgtgttaagagtgcttgaaacccccaatattttgggtgagaatctgattagttttttcaagtgggcttcgaaggaaggatcagagtttaaagtaacttctcgtgctgttgatgcacttgttcaatctgtatgttgcaatctaaggaagaaagatgcatatgcactgtgggatttggttaaggatattggtgagaaggaaaaaaatgtcatcatcactgttgagagtctcaatgaattgattgggttgtgctcaaagttgggtaaagcaaaggctgctatggagatttttaacaagtttgaagatttctattgtgaaccaaatgctgatacgtattacttcacaattgatgcactctgcaggcgctccttctttgattgggctttgtccatttctgagaagatgatcgattcagggaaactcccagatgctgagaaagttggtaagatcatttcctggttttgtaaaggtaaaaaggctaaagatgcttacttgatttatactttggcaaaggaaaaagagctgtaccctcctggctgttccattaattttttgatcagttccctttgccgtgaagatgataacgtgaaattagcactggaaatattagatgatatttctggtaaagaaaggaaatacgctattaagccattttctgttgttattagaggtttgtgtaggactaaagatgttaaggaggccaaaaatttgcttcttaaaatgatagcatctggcccacctcctggaaatgcagttttcaattcagtcattcatggttttgctaaggctggagatatgggagaggcattagacataatgaaactgatgggaaagagaggcttaaagccagatgtctacacttacactgttattattagtgcttatgtcaatggaggtcagatggatgaggcttgtaaaatcttatcacaagccaaaagaaagcattctcaacttagtcctgtgacttaccacactcttatccgcggttattgtaaactggaagagtttgataaggctctaaagttgctggctgagatgaaagatcatggggtacaagctaatactgatgagtacaataagttaatccaatctctttgccttaaagccttagattgggaaacagcagaaaaactattagaggaaatgaaagagaagggcttacatcttaatgggattactagaggcttaataacagcagtcaaggaattagtgattgaggaagttgaggctgctaagactagtagtatagaggcctaattattctctggctgctggaatgggaatggccaagttcaaaactacaattactcttgtgtgtttagtattacatctctcaaatgccaaaaaatgaagtctttaactttctttcatcaatgtgatggctttttttgcttgaactgtatgggaaagctttgtaggtatgtgcccagatgttagtagtgggtggatgtccttgcaaggtgcaatttttttccccctaccttttcttattcattcgtttcttaatcagactaagaaataattgatgaagtgctacaatattatcaaaccttttacacaagatttagtgttttagctgttaaataacttaattgttgattttgttagtgtataacttgcttctgctatatcatgagcagttgttgtataggtatgcattttcgtgggtggatagaatcatggattttctcaacatatattgttttgcggttacttgagaaaaatggtgcttggggatgtaatatgtttatctcaaatggtaaagtgtaagaaaagggttacatgtttcttagaaatgtagattgctctctatgcttataagtcgatagataatagatatacatttaatattattagttaaatcgggttggataagtagtaatactaatcagatcagattatacaatgttattcttgtacttaattttaatttaatggattagcggataattagggttaattatgaattagaatattaattatgaggttatgcatttgtggagatttatttgaatacaaaatgtgctatttatgatatgtgtaaaattttttgtttttcgtatttgtgtctagtaacaatggaatgcgatgttggacctaggggtggacatcatccaatccaattgaaccgaaccgatccaatccaatccaattacaaaaagttggatatccaattacaattggattggattggatgctaaaagttggattctaattggattggatcggttattggatgtcaatctcaaaatccaattaaaaaccgatccaatccaattacatttatatatattaaaaaattatttatataataacaaatattaaaaaatataataaatatttattatatttttattaaattttttttgtatgttgaatttgtaa

SEQ ID NO: 295845 - DNA, 4717 bp, Cannabis indica
gatgttgtttgaccaaaaaagtacggattggatcgaagtacggattggatcgtacagctctattaattataaaataaatatggcatgaagtcttgtgttttattcctattttctaatgtagtactcggcctttccataattgtaagcgtgtagaacaacaatgaccatattcttataattaaaagcaagtgaaacaaagaaaatttgaaaattaatgaattaaataaagaatcatacctaagaacaatgcaaaaagaagttaaattacaaatcaagttctgggtatattaggaatggtatttaaaattaataataatatggcatattatataccatataagagttcaaaaataaaaaaataccataaaatgtgtctaaatttaaaactgccatatttaagtaaaatatttttagaaatcctgtaattttcacattcttcaaaatctgccagatgggcccatcttcacaacccaattctctatgagcaattgagcataaaggcgggcttcaagtcaaacgggtcaaccttggcccaactctcctcctgcctaaactcccaagtccatataatttgggtggttaccttgggaagcgtgtcccctctctagagtttgaaaaagtgttaaaaagaattaacaaaaatgcataaaaaatatagaatttttgtacaaaaacactgaggaaaaatatatatttttgagagaattgattagaataacctataaatttataatccagatatttgcaattagctctggatccttatcgaattagaatagctcattgtttaactgcagaacatattttgcaaagttatagacggcagagaaaaaatattttaaatacgaagttgagtggtaaaattgtagtaaatatatattttttttttttggtaaacatttgttaaacagtcttgtacatacatttccaaatttataaatatttattacaaatatcatatttcggtaataattttttaatatggtatttttggtaattttctccttgggaaaaatggtggtgtaataaaaaagaaagtgatgaggtgggtttgggtttgaattgaaccccatgagatgaagtcattttcattattttagaattttggtccgaggaaatgtttaatcacaaaaagtataagtaagattattatatatatagaaaagtatatgaaatgtcatatgatagcatagtttcatattagaaagaaagatacatataaacatataacagttacgattcaatgtggtgtagttgctttctcgactaagctaacacaacacttgagctttataaattcgaggtggtttcatttaggaatatagcccttgtctttcagtgcctcacacgaaagaaaatatgctctctttctctctctttttttttttttcaacttgaagtactctcccatatcaatattccatttcacatagttaattttaaggatttaattttaatttaataatcaaatgtgagaatggatattatatattacgttcattaagatttttatttaatggtgttcatctaatttaatttaaagtattttatttatagtacattcgattcggacgtggatttcatattttaaatctaattaaatttttataataattcaaattcaatctaatatgcaaaaatataaattagattgattattttgcattaattattttttaatattaaattatttaatatttattaaaaaaatatattatttttacataactaatattatatgtctcaaacaacaaattaaaacaaaaaacaacaaattcaaaaaagaaaaaagaaaaaaactatatgtatttatatataaaaatgttaaattttattttaaaccatatttttaatataaaaataagaatgaaacatatattttatctagtaagtttgaaatatatttgtattatatatatattatgtattaaatttttaaattattatttattattttaaaatagtaattgtatatataattttttttaaaaaaaaacatataaatatgtgtgagttagaataaatcggttacttttatttgtcaaacattcaatccgcacttgtgcagattttaaatttttcaattcaatccaattcacacaagtgcagatatctctacactttgcaaattaaattggattggatcgtgcgtattagattggtatattatgagcactatttatttttgcttttctaactttgacatttaccaaaaattgtgatcctcgaactttttaggccattaaaaattctcgttgaactattgagattgttagatttaagaaattctattaaaatttactaacgtacgtctgacgtggatgaaagttcagaaagcacaattaaacaagtatcaaagttcaagggcatgatttagtacatatcaaagtttgggggcacgatttggtacatggacaatcaccacgttagtaaaattgaaaagaattggacaaaaatctttaaattcaataatcttaataatttagaaaaaaaaaaataagagtctaaaaaattatgtgagtataatttaatacatgttaaaattcacgttaaaaattggaattactaatcatcctatatatgaatgagatgatttactaatcccatatattattgactatgcaaatatgaaagtagttcaagttgatttttttaagttgtaatttggttatagtctttaatttcttatgttcttcatggacccaactttcattatcttgtagtagtaatcagtaaataaatgcagtgccaaagcaaaccatcctctcttgatccacttgtggcttgttccattctctgagtaaatgactctagacatatatatcactatcattctccattgcgatgctataacatgaaatttgcataataggactacttttatttctatcgttaaagacgtttttatttttggcactttaatttttttatatgattgtatatatttaaattaatttataatgtcgaaaaaagagaattcaaatcttcagttgaatacgtgtttgtttatttatttatttttttatactggcacaattaactatcttaaactctattttcattattataagttgaagtttttaaaaactagtaacatgctaactataactattatatagatcgtcatgtaaaaaaaattaaattataaaattttcaaaataacatatattcctaccgatagaaacaaattaatacctatataaagtatttttatctaaatctactagaccgttcttgcaatctttaaacgagaaaatctctttagttctgattgaaacgagttggatgggatcaggaacttgcaaaaaatgcaattttttgcaaattcctgaccgatttcccacaaccacaaagctaggatcataagtttcaatgtagcattgttcttcttctttaaatttcaaccaatgtagaggaagatatttaaaaggacaacttccgaatatttttgcttacttcacatcaagacttgatttaaatcaatcaatttcatttgggtggtatttcattttcaaaaggaattatagaatgaagatgatgatgataatgatgatgaattagtcatatcaacttcatttttattctcattccataacttcttcataacattatgatatgtatatatttggggttcagaaatgggatatgtggcacataatccacatacatattgctattggtgttctttttgattaaaagcaaagagaaagagaagataaatggaatggaatggagggcataagttgatggaactattgggcaatggatttaagacacatggacctaaaataaaaagaggtaaatttacagtacctttaacttttttgtcatatgatataattatttaaaactatttgtaaactttcaggagatttcaagtgatttccactgcaaaaataagatttaaatattttattatatgtgcgattattttctataagtaactgtttgaactttattttcgacattgtaaactattcagaattatataaaaaatttacaggtgattctaaaaaactataacatacgcaattataaaaaaattgaatgatttttttatataaataccaaaagataagaaagtctaccaaaacttttagctttttattagaaaaatgctaaagggtacccatagtgtttagtactattgtgagatgtaatatcgtaattgatagaatttaatattgggtactgcttgttttactttaataaatattataaaaaattattaactaattataaaacgacactttatcgtggtgctaaacacctatagcaatatttttttattatgagcattgctattataatttatacaccagtggtgtctaatacctctaaacatatcgttttgcaattagcaagtgatacttttttaaaagttattatattaaactatatgagacccgatatttaattgaaccaataataatattaacacataaaagaataaaaaatactactaatcccttttagcatttctcttttattatgagatgagagcataataaaacctggagagaatactataataggtagctatgtaagaaggttgtgaaatgaattgtagatcaaaatcaccaccaatcacacaaaacgtgcaacttattattaacacaggttgggcataaagaaaggcaaatggtccccccaccttggcccaaaagcccaaattatttaatttatatatatatgtagaaaaagaaaaaaagaaaaa

SEQ ID NO: 295846 - DNA, 5744 bp, Cannabis indica
atcaaatttcaagttctcaaaatctataaaaataaatacaaactcaaacattagaacccagtaaaatactaaaactcaaatattaaaaacacatacaataaaattcaaactcagaacttaacacacacatcagaataaaaattaaatcataaatgaagatttatgctattatttttcaaatttcgatatttattagtaaatagtaataaacttaatattttaagtatttatgtaacaaattttttaatagtaaaataaaaattttaatataagtttacttaataattattattaattaaagtatacaatttattttttttatatataatttaaaatattttatatattcgccgcaaaacgcgagatgtttactaattgtagatatttcattagaaatgatcttatataacaattcaccctacaaaccaaatgagccttctttgcatcaaccacgtgtcgttacaaatccgagggcccacgttacatatgtacggatgcatacatacaatagtgattgatttattttacaccgtcggatctcattgtttcatatcacgggctaccagaaaacgcgataaaactgcttttaccaaaagccccttgagatgcactacgtggcaagactttttatcttccgtacagggaaaataaaaggcagggccagggccagggccgctaaaatattaaaacatattttaatgttttttggcgtccgatcctccagaaccttcccctgaatttcacctataaaatcaatttcgcctgtcttaagtgtccaattttcgtttaaactggtatttttcgcttcgaggtttgcggagctagggaaatctttctgaattcttcttcaattgtttcttcattgctttgcagtggtgagtttttgtttctaactttgatatcgtaattttattattattacgagtttgatagtttaatttccacactttgttattagatttagatgtatatatttattgaaattcataagcaaaattttcgaatttgccttcccaaacaatagaagattctgtataccgttttgtaattgctattttgttgagtatgatttgtgattggaaaattcgcatattaattactacaattctttcttgttttgcatatgggaacagctataaacattttcaatttttcatattttcgttcagagggcagagtacgttttctaggcaaattcttcttaaggatacttctcttaaccctgaacaactcttctttcttgatcttttcgtttcatccttgaaagatcaattttgataattaatttttaagtagaaaattatgaaatttttcgatataatttgttctagtacacacacgatatttggcgatcgttctctaacaagctttcatatttttggcagatgtcgtactccagaaggtcaaggtgcgttttgtttttgaggaagttttattctgtcgaggtttactggttggtctttcgtttacttatgagtctgtatttaataatatttcaggtattctcgctcgccatctccgatcaagcgatacggtcggtccatctcgaggtctctgtcccgatcaaggtcgagaagtcgatcaaggtaatacccttatctaaatataaactgcttttatacggggctttactttgatgtttcgataattatacctgtttctattgtatattgtttggcaggagtccaatgagtgatgttgagaatccgggtaacaatttgtacgttaccgggttgtcacctaggatcacgaagatagatctcgagaagcattttgcatctgaagggacggtatgaatggttgcttgacttttcttttatcttttttctagttatggaattttgttttataacactattctttcattgttttattgatgttttttttttccaggtggtggatgttcatcttgtggttgatccatggacaagagaatcccgtggctttggatttgtcacaatgtcaaaacttgaagaggctgagcgctgtattaagtacttggaccgttctgtacttgaaggccgtgtaattacggttgagaaggtaaaaacaatttcatgtttaataatttgaccacttgttacttgttgtacaacctaattaaactgttatcccgctcaattacaagttgtgtatcaagagtttcgagaggtttgttatttttttatttgagttgtttgcttgttccacttgaagtgtttgtggcagcaggttagcagctcttcaccaaaatcaaaacctcaactaaacaaacaaatcaaatacaacatcaagtatcagactatggggttgtatgccctgcatttctctccttttttgtttttaattatgtattctgctatttcagtttcattccatagagtagcaatgatataacaggcttttatagtttcaagtttatattgttgtattgtcgttctgttttctttctgagtagctaggcaactctttgtcttattctttatgctgtattcaggctaggagaagaagggggcgtactccaactcctgggcggtatcttggcctaagaacaatacgtggtaagtcattgtcatttgttacatctcaaattacagttggcttaactcaatacttccaagtggtgatctattcattttttgttacaggaaggagacgaactccaagctactctcctcgtcgatctcctagctattctccttacagacggagtctgagtcgctctccaggagcatcacctgacagaagcaggagcagatcttactctcctgattacagacgtagaagatcacacaggctcaggtcatactcaccgtatgataggcgatacagatacagatcctattctcgatcacggtctccttatagcaggtcaccacgccgccatgaccggtcttactctccttatgattcaagggactactctccagatggtcattattacggaagcaggtatcatcggagggactactcgccagatggccgttattatgttggaaggtatcgctccagggactactcaccagattgccattactacgaacggaggcaccgttaccgttctcgttccgtatcatccagtgtgtcaccaagggtgaggaggagaagctcgagaaggagctactcacgaagtccctcacctagacagatttctaggaggagctactcaagaagtccctcacctacacaggtttctaggaggagctactcccgaagcgtttcatcagatcggcgtagtagctcccgaagtatttccccaagccagagtagctttaaaactgggaaaaaacctagctactctagaagcaggagcaggagtcgaagacggagtgcaagtgcaacttccagatcgttttcgaggtctaacactcctaggactactccatcatcttgaggattggagcaggccatgtgatccaattgaaagttttagaatttttatcttagaagcttatgtttgccgttgctcctttctgtctgtgtagtagtgacattattatgagcagcttagtgtggtcgtgtggagtcgatgttactttggagtttggatgatctgatattagttacaatgttggtacatattgagactttaatttcctatcagtgagtgtaaattgtgatttttatgctagtttacgtcgtcgataaataatatattaggaagaaatgctaaattagaacactattagttaccgaccggtttaaaagatacaaaaatgtctattgataaaaatagtactttcaaattaaatacagtttgaattgatggtatctccaatcttgaataagattataaatttaaataagattataaaaatttaaaattgagatatatggttttccttttttatgaaaaggaagaatttttaaacacgacaaaatacaaaagaaggcagctgcaaccgagacagcacctaaacaaattaaccagcaactacaggttacaaacagtgctccaaatgttaataacagtagaatcaattctttgttctagttttgatggctagtttaatagatagactaaccttgactaacaagaaatctcaaaagtacaataatcaaagctttggtaatagaatatattaaattttgccgctgcttgttacaccagaaaatccaatctttcattgtcaaatgccccactgaaaataattgaactaggaagcgatatcagtagccaccatttcaaagttgatatccaaaaatttagtaaggtgatctcgaatcaagagatggttgctaaacaataaaacggtatttcagaacacatattctatgttaaatagcgtcataatacttcatctcaacagcaataagcgagatataaaaaagttcggctttgaaattactcttcaaaacaacattgaacgcaatttctttgtcaataatatctctaagtttcatgagttttcaaaagtaccagttggaatcagtttttaagggagcttgccaaaaatcttctccttgcagataatggataagctgggttcttccagcaaaagagagattcttattagcccagttatgtaatctccactgaattttgtcaagaatctcaccacagtcacctgctctccactttgttggcctcaaatatacccctaaataatttagaggaaatactccatcttccatcttgataatgttcaagagacgagtcttgcaatttgccttaacaccaccaaagtaagcctgtgacttggctttattaattgcaagccatgttgcttcacagaacctattaatagtttgatgaataatctgaacagagtaatgttaccttcgcaaaaaataactaggtcatcagcaaagcaaaaattaacaagcttcacatctttacaaagagggtttcaaagtttttttttctcgaagcttgaaggagtaactgagtcaagtattccataatcaatacaaacaataaaggagaaatgggatcacctcgacgaagtcctttctctcctttaaaagagccatggacctggttgttgatcataatcgaataagaagtacccttcgagcagatgaacacccaattgataaacagggagggggaaaaaatacccttgagcaactctgaaacaaagtgccaatcacagtgtcataggctttacaaagatcaattttcaagaagcatctagccaagacattctttctagtgtaccccttgagcaagtcttaaaaaattaagatgttatgagctaacaaggagttttaaatgaaagctccttggttgttatggatcaagatggggagcacttccaagagacgagaacaaagcattttggaaaagcatttgtagagggtgttgcagcaagctataggtttgtaatccacagtgaggagtgattttttaatcgtaggaataagcgagataacaatttcattgagactttaggaagcacaccatcttggaaaaaaaattaaggacaaccctagcaatctcatcaccaatctcattccataaacctttaaagaaacccgtcccaaaaccaccaggacctgaacttttcaaggaatatataccaaacattgatgcgttaacatcatccttagaaaaagccttatcaagttgacttgttactgaatactcagtttatggacccatcaagacaatccaattcaacatccatgctcgcattactttttttgctcaaaaagtttcgaaagtgatctacataatggccgaaacgatcataatacacaataatctcaccattgcttataaaggtagtaatcctattttcaaccttctttttttttttttt

SEQ ID NO: 295847 - DNA, 3661 bp, Cannabis indica
tgaacatataatcatgattatattccactgtgatgacaacactataatcagaaacaaaaatatatgttctggacctaatagaatttataatcatgaaataaatcatgtgaaccatgaaacataaaatgatttctgatctttattaattagtaaatctgattatattgaaatgagttttatttagggcacaaaacccaacaaagagattgttgatgataaagtggtagaagatggaggggctgcgggagagttagtgttggtctgaggtgcatctccgttatcggagctggagaaggaagtgtctgcactgaatgtcgatgtttccccatttcctcgtgctgacacctcgagatctatgcgtggaaggatttttcgaggtgtaggggtggtggtcaggctcgtaaggtgtagaacctgaaacctgttggggtggcgatggactcagttgccattttgggtgttcattccctttcctcttttctgaacattgaaaagaggcctaaaatgttgccttcttcaaaagaaaatttgaatttaattagtaagggggtagcaaggtcaactctttgactagggtgggagtctagctggattttaatcctattgggtcggtgcacactatggaaagtaataagttaagtgggccttgttttaagactcgtgaagggcttattgggcaaggaaatgggctaaagcttattgaagaaaaaggcttttattgggtgtgttgagaccgtggggaatattgggtgtggtgacaccgggctttatggtaatgaggtgcctcgtgggccgaagccaggggtcatttatgtaacattaatgggccttttccacaagaggagccgtttatctctagtattcaaaaggtgggatcggggctgatcaaccatggttttgaccacttagttaagagggccgtggagaataagggcctctcttgtgatggggaaggtagttcaaagctgtttgtctttggccaggatcattctgaccatttagacgaaatgaggtttctttccaaatttttttaagctcaagagggatatcttcaagaattggctgcttttgctccacaagggccaaataagaggaaatcatgccatgttgatattggggtacaaccgacatcggaaaccaatgaaagaaccaccccagtcaagaagaggagaatagatgtcgagtctcactcgctgaaattagtgcgtaaatggaatatgagaagagtgaaatgtgtggtctgagaatttccccgtggtgttgggctagaggacatgagccgaatttttcttgtgatcatgccagtcctagtgactcggatgagccgtcctcgagtgatgagagtgctcctatgtccataaaccaatactctgctggtggctcccagcacgtggacaaatctatttttgctggccaatccaagcctctcacggcctggaaggatagaactcggatggtcgatattattattccgaagaagtctcaagttcatattgaggacataggctctgctatgggggcctctattgacttggttacccctgtggaggaggtggacaaccctcctccacaagcgtcatgagaggcgttgcttggaactgtagagggttggggcagacctctacagttctggaaattaaagccccggttcggtcttgctcgccagatttcatattcatatccgaactaaaaagcgatcctaatcatttggtatgttctctgaaaaaccttcacttttattttaatattattgttcctgcggttggtggtgcaggtggccttcttttggcttggaaggctgggttcacttttgaaattgtctgtgtctctaagaatcagttatctggtattgtgtattcggaccaggagcatcacccttggttgttgtcctgtgtctatggccccccgtattttcatgagaagaaaagtttctggtcgaggatgatggagactgggcaaaaattggggggccttggttgattctcggagatgttaattttgttctgaattgttcggaaaggaggggttcgaaggggagagaccaattcttatcttttatttcgaatttaatcaatagtgctggtttaattgatctgcctgtcaaaggtgactgccttacttgggataaccatcgcaatggcaatgctcatgttaaattggcacttgacaaggctttggtgaatggggattggcttggtcttttcccgaaggtggtggtcaaatcgtaccatacgtgaaactcggaccacaggcccctttgtattagtactgtgaaccaggatgttaaacattttaggcctttccgatttgaggcctggtggacaagggaccctcggagtgatttgattctgaagaatgcctagggctcggtgtaacatagatgggccccggctaggatttttaagaaagtgggggccacttgtattgcccttagtaagtggagtagaagccaatttggcaaattggataactgtattgcccagctggaagacaacctgaacttcatctagggtctccaaactggggaaagggcttagaccgaagaagtcgaagccagatcggaccttaacaaggctgtaagacgaaaggctctctactggtgccaaaggtcccgaatttcctggattaaggagggggataagtgctcgaagttctttttcaccactgccactatcaaaagtagaagaaatgagattgaggcgatcatgaacagtgatagggtgtggctgagtatcagaagtaaaattggtagggaattctcagagttcctgggaaacatttttagaaactcggccttgggccattagagagcctggaccatctaatctttgaccacctctccctctgggagcagaatgacttggtcatcattcctagctctaatgaaatcaggaatactcttttctccatgggtagtcttaaagccccgggtcctgatggtatgtctgtgcttttctataagaattattggaatttggttggtaaggatttctgtgaagcggtggaagatttcttcctttctggctccatagacagaggcattaatgctaccaatgttatgctaattccaaaggtgaataatctgaagaaagtctctgagtttagttctatctccctatgcaatgtagtgtacaaggtcatctcgaagatcattgcaaatagaattcgttgggtgcttcccagattaatttgccccactcaggcggcctttgttccaggccgtagtatcaatgacaataatgtcttagtctaggagattattcattcgtctaaacacaagaagggtaaagaaggcgtctttgccatcaagattgatctggtgaaagcttatgataaacttagctagaacttcattgaccatgttctcagcagcttcaaagttccagaccgttttcgaaagtgggttacccagtgcattactactgctaccctcaatatccacctgaatgggggtaaggttagtagtcttaccccggagtgtgggttaagaaaaggtgaccccttgtctccgtacctttttatctgggttgccgacattctctcgcggattttggaaaaggccattgaggttggtgatattaaaggtatcaggctgagtagagactgttggaattattttagcaggatctagatttactaacaagtatgtttcattaacatc

SEQ ID NO: 295848 - DNA, 4312 bp, Cannabis indica
tcacaaatctatctgggatctttacgcaagatattgggactgcaactcgacctttttaccctgtggcgacatatccaccaactttaacaccatcttcacttaaacctacttacacctttgttgaacatgttactgccactgctactgttacttctccttcaattgtcactgctgttagtaacaaagaaaatgtcccgcctatgcccgtcattaagagacactgtgacacactcacaatgagacagttcctcaaacgatgtcgtaaccaaaacaattatgcacctacttcattgtctttgggagaaagctcaagccaaaatgtttcctatgatggtatggattcagatggcttcattgacaattttgcggagattgttttgtaatctcgcaatacattatgaaaatcttgagttggaatgcgcagggattggggaacccgtgtgcattcaggcatcttcgattgcttgtcaaacaacaatcgccccatagtttgtttcttatgaaaacaaaacttccaccaaattctatttcacgttttcgacaatccttaaacttcaataatggcctgaaatcacgacggtctggtcttaatggcggtttgatgtttctttggcatcaaagtattgatgttactcttctgaattttggtaaaactttttttgattgtcatgtcaaggctgaaaatgaagctagtttccacctaacagctttttatggtgctctggatgcttagaacaaggctgattcttggcttcttttacaaaggcttgctgatgttttcccttctctaccatagtttgcaattggtgattttaatgagatcctctccaatgaataaatcaggcggctgcctcagaaatggaagacaaatggaagcttttcgtaagccattagatcattgcaagttacatcaaacctcttttgaaggtgacccctatacatggatcaaaaatcgttcaggtgtaagcacagttaggagcgactagattggtgttttgtgaaccatctttaggagaacttatttaatgcacctctagtccatcatctcgattacttttgctcggaccacaaagccatttctgctacatttacacctgtaaacacacggcatcagtaagaaaaacgacgaagtcggttccgctttgaaaaattatggctttatgatgtacaaagtaaagacattatttctgctagctggaacactacatcggttactgatcccattaatgttgtacttgctaatttagaggagtgtgcttccaatttacaaagatagcatatcgataaatctattggcagcaacgctctcaggttgattggttaaattcaggggatcgcaatacgaagttctttcatgctaaggcctcggcaaggaaaataaataacactataaagtttcggcataatgaggctgacattcggttcacttataaaactgaaatggcagctgctattcatgattattttgcctcgatttttattgcttcaactatagatgaggatgctcttgttaccactttaaatgtcattccaacaacgatcactcaagagatgaatactgaacttctcaaaccgtttgaagctgctgaagttgaattagcgttgcactcaatggcatcaaacaagagtcccggtattgatggtatgtctccaatgttctaccaacaaaattgggttgtggttggtaatttaataacagcagtcgtcttaagtgttttaaatgaaggagtcgattctacaagtttaaacaaaacacttattactcttattcccaagatcgaaaaacctcagcgtctgcaagattttcgcccaatcagtctttgtaatgttatctccaagcttatagccaaagtgcttgtcaaccgcttcaaacatgtccttccttatgtcatctcaaaaacacaaagtgccttcttgccaaatctattaatcactgacaatattcctgtagcttttgagttagtcaatgctttcaagaacaaaacttcagggcgaaaaggtgttgcatccttgaaattggacatgagtaaagcttttgaccgcgttgaatggagattcattgaggaagtcatgaggaagatgggtttttctagtgaatggactgcacttattatgagctgcttgcgtactaataacttctcctttcttttgaatggtgaggttacgggatcacttattccatcaagagggctacggcaaggttgtccactctcgccatacttgttcctaatttgttctgagggcttatcaagactggtacaacatgaagaaacaagtggtcatctaaatgggttcaagttaacacgccatgctccatcaatttctcacttgttttttgcaaatgacagcctccttttctatcaagcaaatgagtcttcttgccttgcaattaagagatatttggatgtttatcacagagcctcaggccaagttctcaacccggataagtttgttatgtctttctcacccaacacaacgctttttgcccaggttttcttccaccgacagctatcaatgccaatctgtgaatgtcatgaaagatatttgggtttgccatcttactctgggggagataaaaagcgaatgtttagtgacgttaaggagaaaatatggcgacttatggacacttggagtgagaaaatcttctctgctagcggtcgtgaagtgcttctcaaagcggtagtccaatccattccaacttatgttatgagttgcttccgtctacccgcttacttttgcaaccaacttgagtctatgatggccaatttttggtggggtttaaatgagaatggcaataaggttcattggcgctcttggaaactattatgtaaaaggaaagatagtggtggtatggggtttcgttcttttatgcattttaaccaagcaatgctagctaagcaggcttggaggctactaaagcaacttgactccttacttgcaaagttgttagacaaacaactccttccttcaagctaatctcaatcactctccctcattaacatggcaaggcatccattggggtagaagcctactcactgctggtctaagatggaaaataggagaaggatgcagaattaattgtgctgatgacccatggatcccaagacattctagctttcgtccataccacttttctggaccttctaatatggtcgtttcgaaccttatcaatgatgaaagataatgggatttggctatgcttgatcaatggttttcaccacctgatgtggattgcatcttaacgattcccctgagtttttttgcaatgaagacacccttatttggcatcccagctcctccggtatatactcagttcaaacgcgctaccatttagctgcatcgcttgaagaaattgacagcagctcatgctcttcatctatggcagactggtggaattttttatggttgctgaagttagcccaaaagattaagatctttatttggcgtgtctataacgatgatctccctgttgcaacaactcttgttaagaggaagataatcacagattcaacttgttccatttgtcatcaagcctgggaaaccataggacatgccctcttcggttgcaagtatgctcaatccgtttggcgacattcaaacattaccctcgattggaataatactatgacaatgcacaaaggagattacttggtacatttggctgcaattttcacaaagttggagatagaacaaatttgttgtattctatggatgatttggaatgagagaaaccgtgtagttcatggtcataaagcaaaatcagacaaagatcttgctttctttactatgaattactggcagaattacaaaaatgctcaactaaaatattgtccaacttcaacagcctccaatcagcctactactcctacaatatcctcactgtcgtcttctactgctgctaatccgatactgtggacccctccaccacctggaatgctcaaaatgaatgtcgatgcagcagtcgacaacacctgaacagaaaaataaatagtattggagctttaattcgccactctaatggcacggttgcagcaacgctatcaaagcagttgttggatgttttgaatcccatgaaatggaggcaattgcaatgtttcacagcctaaactgggctcttcaacttcaattgcctgtaacacaaattgaaacgaatgctcttcgggtttttaatgctttatgcaaatcttcatcaacaattttttcttttcaatatttaattgttaatatttctagtcttttattctttttccctaatgtaaatatttctcacgtcaaacgttcagctaatatggctgctggcgacttggctaag

SEQ ID NO: 295849 - DNA, 6359 bp, Cannabis indica
tacaattctcctctcagctctcctaatcaggtttaggtcgcttgcttcttgagctcaagtgtgaatttacgagtgtattccgacaaaaattttgactagtctggtgtgatcaataatttgtccactttttgaatgagggaatcttctattcataggcgggaagaaatactagcttccttctctttttccgtgtttatttgtccacatgcgttaaatatcgtccgctactcatcgcactttctcttttcgcttttggagctctttaagcgcgtcattctcttcctctccaagctctgcttcgcatctctctctatttagagctctactttttccgtctttgagctttttgctttgcttcctttctataatgaaaaagtgtatttctctctataaccttccatattacagtctctttcctcattttaacctcctgaaattacttatttactctcaaaattatttttatctcttacatgttttgatattgtttcaatattttttttgttacttttttgttgttttcatattatttttataggaggacacaataaaattgtaataaaaaacagtaaaattgaaaaaatatataaaaatgttaataaaaaatatttgaccttaaaattattaaaattgtgacaaaaatagtattttgtgtacatttcttgctttcccgtgctagtaataagtttggaattttaccaaggattaaattgtttacataacttcttagatgtttcatgaaattacaatgtgtaatctgattacaatttaattcagtcaaagacagatttagatttttctattataattactcattttttgtttataaaatgaaacatagtatcataatatacaagaatgaaggatgaaactaggaaaagatcaaaaccaaaatgtaaaactttgttcaaagccaaactctttctttacatggtaaaggtttaggaaacattttaatttcaggggagaagagaaaggggtaaggtgataagaaaaaagaaaaagaaaaagaaaagtggaatcaatccataaatattaactaaactcttcttacagatcttacatagtcagctcttattgcccataattgctccccaactaatttcatgtcaggccgatcagttcgaataggcgccgcacactgaatggccaaaccaaaaattttattgaggatatctacatgtacaacctcctccattaaaggatcaaccaattccgcttcacgcctttcgttgtatctatggaaggcctggacatgtagaaaagaataacagatgaaattagacagatcccttcaaagtaaactacaaaaaggaataagacaataaataaattaaatagaaagggtttagctcccaagtggttgtataatttgaaatgaactgtcatagtagaaaatagaagatttggttcaacttattgtgtacttttggttaaacaagtttagtggaagctgacttttgcactatatgaaaattagtcaagaagattgggagcaaagctgaatctataactttggctgacagctttcatgaaacgtacttagattttgagccagctctaaccagcttatcctagtcaaagttgcatccagagtgggaataattagatggataactaatatgaatgcctaacacaaaaaatttaaacttcttagtagttgtagtagtatttagttaatcttaaacttgtttataagctctattggttctagaactgccacctgatcaaaatcttgcaaactttgacagaagatagacttacccatctgagtgttattcgctcttctacaggtttcttcaattccactggtcgacgacctgtcataatctctataagtaaaattccaaatgagtatacatcactcttggcagtgagttgataggtcttcatgtactcggggtctaggtaaccaactgttcctttcactttggttgaaatgtgtgtttcgtctgactccattggaccaagctttgcaaatccaaaatcagcaaccttggctctcatactttctgtcaaaagaatgttggatgatttcacatctcggtggatgatttgcttctctgtttagggggagagcataagattagccaataataatttccacgggcaaaccaacttgtaactgtaagatgtaaaacattaacatgatatacatagtaaaatgagtactactgcaattggaacaaaagaattccctatgaatgggttgtaaaacataagctaatgccgacattgttagtttctctgaagcacaaaatctacatttatggtccaaacaatatttcgatcagctgatatcattccaacaatgccttcaggcttaagctagtatggagttttagggaaagaatattcataaatgaagtttcacattcataaacagaggaagtcaagtgcatccagatagtatcctaggaaggataacataaaaatcaacaagtaacaaggtcaatagcaaaaattttagatttctaaaactgtctatcccttctccgctctccagggaaaatagaataagggaaagggttatgtttcttgtactgttaagaaacaagaaacaagtctaggaagtggagaacattttacctgcatatagatgaagataagttaagccatgagcaacatcaatggcaatttcaagtcgttgattgaaatcaagtattctccctcgttgacctgccaatagtaacagcaaataattagcgcaacttgtattatctacactaatttattaaaattttcttatgcttatataaaagtaaacttaccatccaaatgttctctgagagtaccatttggcacatactctgttataataaggcgctcatttccttggtcaacataaccaagtaactttactaaatttcggtgatcaatttttgccagaagctgaacttcactgctgaactcagtgctgagattttcatattgttcctgcaacaatttttcatgaaatagtcaattacacaagaatccatggcttttattgtttcaatttaaaccccaattagcagaatttatcaacgagaaatcaatgtgaagcaaatctgaagttatcccgtttaatagaatcatctcaaatttttaaagttgattaaaaaagcaatttatttcgagtatttggacaataatcatcactttcagtcaattaataaaatctctggtatctttgacatgaactcctattaaatgccctttggattgcagaacaggttatgaatttttttatagagataagaaatactgcccacaatttattaaataacaaaattgtcacaaagcaaataagtcctctgatgccataatcttatttaaattttagttggtggcaatccataaggatcacaattcttatgttctttgatatgttgcttattttcatataatatttcacaatcaccaaccaaaaacctgttataattcttccctcacataaattctaataggtttgaattctaacttgcaagttttagcattctttgaaatatcgtcactctaattttattaggaggaaatttgtataccccctttccccctctaagtatatttttggtttttcatctttgttcgagttaggtacacacctcattactcattagcatgataaaacttatttgaattcctttgcaaagtctactctaataagcgcacctataaaacatgaggagactattttattaagtatgttggtgatcatatgactatccttaccttctttcctcgcttaatagcaactatatgaccattatctaggtgggctttgtagaccgttccaaaccctccttcgcctatttgaagagatggtgagaaattacgggttgctctggccacctgactcatgttgagatgtaatgatccaagcctactgacttgtggagaaaatctaggactaggaggaacacgatatggactggccgggattttttcaccagaagaacttacttcaaaagaggaaacggaatccactgcaggaacataatcaatttttaaacaatttaagaaagtgatcatactatgaaaccgaggcagcaaaagttcaacagaagtgttgatctcattacgaagtgtacattaaaaaatacagctacttatataggacaaaagtaacacaaagttattaacttttcaaacaacataatggcgagatacaacatataagacagactcacttgtataatgatgatcgttggtaagtgcattggaggaattttcttttcttttcttgtaaaagcaaggacatagaagaacacaacaggctaaaacagatcctgctgctactaatccaattttgctacccatgcttggaatcatttttttgttctccatccaagtttttctgatcagggatagtggattcgtgttttgaatccttttgcaagagtttcctagctttcttagaaataaaatcatctgcagaagcatatcacaatgggaaaatattattgaaaaataagtcctttcataactcatgataatgaaataatgcatcatactagaccatacctgttgaaacatccaactgacagtgatcatttctaaggtatccctctaagttgcagtcatttccattgtaggataagagagcctcacagaataaatctttttccactaaattcccatttatataaaataattcatccccataagaatttgagtaggcaacaagatcattacaaactttagactctactacgaaaccagaggtaaagatagctgataactgaactagcaacaagaggcttaaaatagcaaaatccattcttaatctccacattcgctcactttgcagattgataaaccaaatgataataactacagcatcagctcagaactctcccagtcaacgccaagtacaacccagtcagccaagtaggataaagattttgaagcccattaatcttcgtgtttaggactctaaataccaattttgtataatcaccttgaagttttgatcaaaatctacataccccacttacgaaaaacgaaaacttcgacagataatgagacctttactatgtttccttcacaaatttaacaacgaaataacccttttctcagataaataagctgatttttactgctagtagttcaggacatcaaacttcacctgtctcaaaattgaatcgagtccaatgtctcctactcacttcaaagctccaataaagttttcaagatcaactgtataaaaattgaacagtacccaggcggatttctgtagaaaatttcaattgtctccaaaatcctcttacatatgcaactacaatttcaagccgtgtgtagaaaatccaagcacaatcttccaaacccaatttagaaaactagcaaaataataataacccagatggaatagttgctcagtgattcaagtgtcaaaattttccttcaaaaatttcactacaaaatccaaaaagaaaacaaacccacatctcaaaagaagagctaaaagatcataacccaatactcaaaacatgtagatgaaaatctagatataattgaatgagtcaacctcaacccagaaagacaaaaatgcagcaacataaccaaacctgagtagaggcggctgaggttgttgacacgaaaaccagttctgacttttttctttgtatctttatctttagcttgtgagaaaagaacacacaacaaaagcaaagcaaagcaaagatagaaaggaataaatcgaagaccgaccaacccgaggaggaagaagaagaagaagggaaactatgatggtggtggtggcctttgttgtatcatgtgtgatgtaacccatggccgtctcaccgcattatatataatattattattggcctcaaagttggaactttgaccgttggcacttattcatgtcattgctaggatacctcccctacaagggctttttggtaattcaatcaattttcatcacctttttaatcaacttttttggctgttctgtctgccttgtttataattatactactaaatatggtattattgaaactttgtttactacaaataattagcttacatgataattgaactaaaatataatgagtagtaattattaggtaatatataaaatggaatttttaagttagatgtgtttgtttaattaatattgtaactcattcaaaaaaagaaacaaagaaagaaagaaaaacaaaaatgaaacaaacaaatttttaaggatatttacattatacttgtcataaaaaccataaaccgaagaagtaaaaaagaaattattgttataaatactattttttataaatactattaattatgtggatgtccaaatcttttatttatttccattaatgtaattaacattccctttttcttagttttcttttctcttagtttcttaatatttgact

SEQ ID NO: 295850 - DNA, 5969 bp, Cannabis indica
ctaataatctcaatagttccggaatttaacggttaaaaaaattcaggaagcatgatttggtacatgttaaagtttagggggtaaaaatccaaattagtctataatttctaacaaaagatacacaagggattacatgaatcacgaagtgaaatggaggacaggagagaaaaaaacttacgtggctaactattactattcacaacctaaagcccatttccacttcgaaatatagtttcaaatgcagatgaaatgcacaatttcaacattgaatgtcatctatagatagcaaccagtatacaaaacttagttataaatgatcctaataatctctctttgtctcatatttgccaaactgaatctgggaagtcaggtcaaatacattaacacagtttgctagtcattcaagtacatatacaactccatttcaatattcacaataattttcagttttcacaggagggggagtgatgaagaataaatcacacagccattttgtccacaacagttacagcagttagtgataagatatgctggactacacaaagactctaagctacaaaagttaggcctaatcttttattcaacaaactattccatagatgaacctggacgccgaacaaacgcattctacataattttaaacagctacacaaggaatgaagctatgttttttttgcaagtaaagttagcactgtaaacaaagattattacttattaactctataggaaagaaagaccctagaacaaaagaatagtccacaaaaaatggtttcaaaaggttagttactcccaacttattcttctaaccttggttgcccaccaagtggtacttccatcgtttctatactgactgtcatcataagaaaacattcacatgttacaatttatacaaatgatcctctatacattactcaacaatgaaggcaaacatgctactcattggctgcttcataactataaagtgtgcatattaaaccaggttacagtggaagactgtcccaatataatacatatcatatctcaattaaattctttaagatttatagaaaaagttaagtagttattgtgtgagactattaaactaatcacagttcaaacctacccttgagagtacataatatgaatctaagaacaacaaaaatgcttaactcagtgtataacgaagtggtttcatatttcaatacatgaactagacttaaaacaaatcataatatactgtaatgttaaaagaatctcataactctcattctaatctcaattatttccgtcactataattcaaaccaaaattctgtaaattactaaattctagttcaatctctaaattcagatgcataattcgaacttgagttaaaaacaaaaaaagaaataagcttcaaacaattttaaaataaaacaccaaggtttaacttaaccctaaacctcgcaaacaacttcaagttcttgcctttcgacgaagacgcttccgaagcttcttatacttatgcttgttcatcttcttcttcctcttcttcttgacactatcagcccaaaccgtccgcgagtcctcactatcaaccccgtcgatctggtcgacccccaatggtccagacccagttgagggactagaatttaagcaatacccaaatggaaaactggggaaaataaccgagcatttataaggttcaatctcaaccttgtcatcgcccaaaccgaaaatcggggaaactatgaattcgggtttgggggcggcggagtgggtgtgctgggaagcgagagaatggtctgattttgggaccagatgggtatttacggatgtgaggaatcgtaatgagggtttgcttttggcgaacttttgcatgaggttcgccattttaagacgatcaagaagaggccagagataatgagaggcttaaagagtgatgaggtcacactctcataaatggtggattccgtcggagtcgaggcttttgttttgagatgttccggctagtgcgaaacacagtcgagggttgtcgctatggtctgattattacagagacgatgtcgttttatatgagccgtttgattaaagacgacttcgttgtctcttaaacgccacaatcacaactaggggtgggcatcatccaatataatccaattgaaccgaaccgatctaatccaatccaattataaaaagtttgatatctaattataattggattggatgctaaaagttggattctaattggattggatcggttattggatgtcaatctcaaaatccaattaaaaaccaatccaatccaattacatttatatatattaaaaattatttatataataagaaatatttattatataataaatatttattatatttttattagatttttttttgtatgttaaatttgtaacacttgattgtttagtgtatttattttcatgatgttttgttctattttattacttagaaatgttattgttttatttatttaaatattttagctacaatacacttgtaagaatagtatatttatgaagtattaaacttaaataaaaagtgatacttagttttttacgtatttttctttatattgttaagctaatattgaaatttaagtgtgtaattggatatccaattataaaaccgatccaatccaattagtaattggattggattggattggattttgaggtctaattggattggatcggatgataattttccaaatctaattactaattggattggatcagatgaagaaaaaaaagttggattggatcggatgcccacccctaatcacaaccatagccctctataagtaatcttcttttttctttttaattgaaagtttgctatattatatataatatacatttctttaataaaaaagatgcaatttcattaacacaagttacttaaaagtatattatgtaaattattcggaatcatagaattcgaataggtataattagtatttaattatgaagctttagccactaatgaataatacgataagtcaaaaaaatattattcaaattaaaaaaaaaattagtttgcactcagaaatgcagaacccgaaaataaaaggcatatctaatgaatttcaaaaagcttggattgtgacaaaattgtcctactccaccaccacatcatgtcgccttgtttctttcaactaactcaacacccctttaacctcgctggcttcagcgagaataggatcaaccaccctcattcggcttactgtccaaaccataataagctgaccaaaagaatcccgcaccaaccaaccatacccctatttatttagattactaaagatagttgcatcgattgatcgtattaccaactggtgcaattcaatgctcgtgacgttcgccttcttgtaaagagaacaaagaggaaccaaaagttttatcttgagcacatctccattgatcgaaattgcccttaacagtcttattcttaccattccatatcttgtcattttgcacagaccacaacgcccagcaaagcataacaactctatgtttcatcccaaaatcccaacaccgaaatcaatcataaagccctcccacaaaagagttgtcaccaatctctaccatcgaaatacccgccatccgccagcatgcaaaagcaaacgaacaccccatcaggcaataagaaaaaactctccaactcgcaagcaccttggacacaataacgagggaagaggaacatgtttcacgcctaattagacacgggtaggaagacaattagaagtagccctccaaaccaattgactttaggaggcactctcaaatcccacaactctttccaaagatcgagttaccaactccaattaaatcatccttaagcttttgaagaagccggttcgcactcttgaccaaataaacaccaaaattctcaccattccaatgccatatatcgtcagacattgagaagaacaaaggaatgcttaaaataagctttacattcctctaaataagagactgagtttcatggatacttttccatataaaacttggttttcttcccaactccgcccccaaataggatctacgaggataataacaagctttgaacacacgactaactaaagaatcttgacgagaatgaaaacgccagccctgtttcctaagcaacgcaatattaaaatcatgaagctttcaaaacccaagtcccccatgaacctttggaacacacatatggtccaaactcatccattgaatgtcactttcgttcttacccgacttcttccaccaaaaaaaacacattaatttttttatatcgtcacatacttttttaggcaaaagaaaaacgctcataacatagttggggagagatggcaccaccatcttcaataaaactctttaccaactttagataaaaacttaacaacccacccttcgatccgcttcctcatcttttgcttaagaaagcctaacacggctgacttgttgcgcctcatagtatttaaaagtccaagatacaaataattttcactatcttccaccattcttaggataaagcacacaaagccttcatattaacaacaatactcttgctaaaaaatagaagacttggctaagttttacctgctaagtacgatttactatacactatacttctagtgtgtgattttaatttgaatctcatatgtggataaacatgtaataaaggtgttgtgcataacttgattatacatgactggaccgatatgtaataatatatttcattaacatgtttaccatgaaagaattattcatatcacaacgatgatcattggtagatctgtttgaattcatctttgagcttcatgtgggattagatgatgttgggagagtgttggatgcatcaagctatatgggggtaccccttagggtaatgtctggcaaactgaccctatgatagttagcacccacctactttggggttgcatccccgagacgtctccctcttacttatcatgttgttcttagagcttagtagtatatagtcttgatattgttgcaccttgatacttgtagatgtatgcggtttgagtgatgaccacaagcatacatataacacatgacacgatctttgatacttggaataagtattgcactatctatgtccaaacagaggtaaggtacgataccgaccgtaagagtgtaggggatgaagagttaatcactcagacaaagccacccaccctgagggtggatgacttatcctcggaggggggggggtcgcctattccaccctcggggggtcgaccaacctaccctatatctcaatttggaggtatgtccttcttttattggggttgtatcctcgtgtcaagtgactttatgtatttctcattagtttaatcttgtgtagtctcatgccaagtgtcatcatacatcatgttacccttatcaaaatttgggtaaacaattcccaaaataaaaaagttgaaatacattaaacttttatgtaattaaatcaaaggaaataaagtaccttagaaatcaaaggaaataaagtaaaatacaattaaaatcgaaaatcaaagtaaagtgatatcctatatttggttagctattttttataatgtttataaaagtaaagtagtagttgagatcccgatattaaattacaccaatagttatattacacactacaagagtattagatactatagttgtcctttagcatttctcagattaataataatatatatattttgacgcggtgaacaaagtcacacatgattaataaagcaacaaaccacaaacgacggtggaacctcctcgaaccaagatagcttatcgtttaaccgaagaacattttttgccaaactatgagctgcataaatctaattgcgagtcacatgggacaaaactgctccaggaaatttagacaataaagctataacgtcttcaaacaacacccatcatattaaaaaataccttcctattattaatagctgtcaccagagttaacaaaactgaaaaaacatcacaacaccaaactaaaaa

SEQ ID NO: 295851 - DNA, 4163 bp, Cannabis indica
cccctcaactctcaactcttcaatagaaaatggcacacaaaaggcaattttttgattcacttcctctttgagctcagttctggaaacacattttgtaaggaaggatgacagtagaagaattgaaattaagttttcaaacagaacaatattacaagacatcgaagcagtaaaagtgcaaaggaataaatgatgatacctagaattttgaagtcgaacgatagtgctagaactcgcctcatgggaaggccagttgtgaaaaaccagtactaatggtagtctggactctgagaggaagtgcttgtgggacatcggacatttttgtatttttagagacgataaaactcgatcttagtgggatgtcctcgtatgggttaggatttcaacttataaaaatacaaaacctcttatggggttggagcagactgtctccaggacttgcagaatataaaccatcctttgagcaacttgtatgccatcggtagaagctggaaaagagtgattccaactttaacgcaaaattccacgaagtaagtcctaagtggaagatgagctccgcaagagatatgggaccaactccatggtctaaagccctccacactttgggaagcaaactcccaaaggatggacatacagtgccacgcgagtcccaaaacattttttacacatccatcaataaaatacacttccaaaagactgtaattccataataagttcagcctttggtctatctcccaaatagagttgttaagaacccgagaaactggagaggttatgctagctttgcccttgcctttgctcctacggtgtcattcaggttgaactggtttggaaggcccctcacctggaataagatctctaggattctcctcaataggaggtaattcaatatatgatgcctcaggaacctcgtcaagaatcaccaagaccaaacaaaaatcactgccttcactagacactaaaaaaagcgataataaagtccaaataatcagtaccctacatccaaatgacaaatagggtacctggggaagcctcttccagaattgcttagagaggtccccactagattcgtcaccattaaaatcactaccatacagcagctgcatggtgacaaatcaggaacccaaacgcataatagcaacaaaagggcccagatgttgttttctaaggaaaagcaaaatgaatgtatacaataggccaaagaaaaagtaaataaaactactagaaactctaaaaaatgtcctacaaaaatctcataaccagggaaaattcaaacctcgaacatacatttcagcttcggcctaaaagaaaatacccctttagaaaccctaaaaccaaaaatcctcacctaaggacccatcaagaatttctcataaacaactaaccctattccctagaatcatgttctacgaatgcaaagtgatcgattcctccaaatatgagaattacatttcaatcgagcattgaagaaaacagtctaaatgaggaggaatacttacttgtactgcgaggaaagagttggaggtggtggtaatgcgctaggattccattgtttgcacgatggcaatggtcctcctagctttgattatagaacggttcgaagtgacggtgggtgtcaatggaatacaatggcaaaattgggagaaagaaggttaattgtagggcaaagatgtatgaaagtgttgaggctttctgagcaagaagtcggtgcgaaaaagaaagggttcactttggttagaagattcttgatgaagtaaagaaaatgacttcaatcgtcaaaagccccatttatatgggtggaaacggctggaaggattttgaaatacacggtcttgatcaaaatgattaaaggcaagatcattcaacgattggggatacaaagattgatatttaatgcatctgaaaagagagaataaagcattcattgatcactattttctgacagcatccccaacgcacccgaagacagatgccttttcaaaatcaaccatcattccccttcccaaggaatgcacctaagataaagagtgtgggcctcacagctccgctaaccaagtttcatgctttggcaagtcctctaggatatcaccaagaactggtgtcacgcatgctcccttcagtctccaaataacctatttgcaagacaaagttacgaatgcaacctcttggggaagatagcaagctcccgacactctcaaatccagagagcttgggggtaaatattatcactattaccagattggttctacgtggaagtagcaaaagggtgccacattagatcgtatgagaatgtcccagattcccctttcttttaagataagttgagaaaggcatcaaagtatctaggaaagcgcacccgttgcgaaggaggaattgatccttgatgttgtaacccaatgcttccgatattcggaggcatacacgaagtataggcgttctaggggttcttaggaattggctattctaggaggtcctgagtttcgcttcctagaagtcccctacaacctaacctggagatacactcgatacttgcaccccgtctaacaccaagtcagatcttgtctcttgcgtcagaccgtggttgtgcgtgtacgtgcctatgtagggattattgtccgatgacttgtctaggatatttcttttaaaggagaaacctttaaatgacatgtgtccatgtccacgcgtgaaaactttcattgattacgcaacgtacgatggaagagctaccaaccaaatcaacatttagatggtcttgtagtgttttacagcctcacttatgtactgagtaagaaaccctggctgagtaaaaggtatgtgcatacctacatgtttgcctatgaatatctccattttttatgtaatgggggtgaacaaattttacttatgaaaactctactgaaattcctacttagctttcctcttagagagaaacaaaatgaatacatagattaccattataaacatttttaatactcaaacattttctgaagaaggctaatacttctgactaatggacgaaggttcattaatgccttaaccacaaaaaatttttgattgtctattatataatattttgcatttccttaagctcttattaatcggtttttgaaaatctcggtaaacactatcagtctcttatttctttattaaataaagacgacaacataaacctagcacaaatattatcatcatgccatcggttaaaagctctcctgactacgtaaccacaatattcacgcaatgatatctagggagtttcaacagagactagttgaaatagattttctcattgtaaaagaagctctatttcgattctccattcatatttgaagttaccatcaaattcaattatattataatagaaatatgtgttcatattaaattgttgatctattttatatcatttttagattgaaataaaaaataaataatgcgagaaataagtaataggatataaatacaatataagtaccattaataaaaaataaatatcaagtttagaattaaatatgatgcatgagcatacttagaaaaatacataaaacaatttagaaatttcataataagttatccaaaaattaaagtttcgcctatcgaataatctacaagacttgttcttgtctttagtaattgtcactaaaataactcttattttccttataaaataaagtaacatttgtttggtcaaatcatgttccctagtttcaatgacagggacatgactttgtgagtgtaattcattatttcaaattccatgacttaacttagtagtgtcccctttagggttggtatcgcctaaaatacattactttattctatcctaaaaggaagtccaccttcacaatgtatggttcaacaccttccttagagggacaaaaataaagtcatctcgagaccatccccataccctcggtgttcgactaataatggctaccatgagtttcatattagatgacaatcctctcccactcattttttaaaatatgtttgtcattaattaaaactattttgaacaatgaattttaattattaaattaaccagttgtaatacattaattatattactattatataggcctgaaattaatttaattaatttcatattattatgttatttttaaaaataccttcttttgtaaaaatattagttaattatgtgactaact

SEQ ID NO: 295852 - DNA, 5180 bp, Cannabis indica
ttaaaatgataaaaactgattttgtagaatataaccgtaattggcaaaaagaccaaaatgcccacagggcacacatattatcttatacacataaaaaagggaatcatgacattccactcacacacatatatcacatacatcacataaatcatatttttcctattcaacacataaattctataattaaaccccaaaaataaattttggtccccgaacccggttcagcccaaaatacccaattgtgactatactacttcgacctatcagaaaatacctacagaaagacagaataaacatactatataataatatagtccatgagcacaatataccataaaattacgatttttacccatcttgagttaaatattatagaaatgcccttgatacaccaatgaggtcttaaaatgatataaactagaatagtttcacatattaaattacataataatataatttctcattaatacataattaatctatttagattttctaatctggttaataaaccttaggattttaaaaagcatgtcttccaaagtttgtatggtcccctcagactatccatttgcctatggatgatgggtgatactaaagtgaagctcagttcctatggctcgttgcaaggtcttccaaaaccttgatgtaattcaagggtctctatcagaaaaaaaaaatgcttgaagccactctaggtagtgaaactatattgtccacataaactcaagctagcctggtaagcttgtaatcgttttttattggaataaaatgagcagacttaatcaaatcatcaacaatcaccttaacgacgttatgcttcatgggtggtgatggaagtctagtagcaaagtccattgtgatcttgtcatactttaattctagtatagacaaaggttgaagtaaacatgaaggtgtttgatgttgagcaataacctattgacaaaccacagtcctagcaacaaagctagctatatcctgcttcatacctttctatcagtgttacctctttgagtcctggtgcattagtggactaccacgatgtacaaaaaacttggaactacatgcctcgatcatagtagagtttctaagatcgtaggtatttgtaacaaccaatatttccttgtggtataagtatcttttagcattcattgtctaaccatctaaatattctccaccttgaattaaactcgaaataagtgttagtttctcggctttctgttggcattacttaattggttgaaataatattagtgtagcctccatgctaaagacacaagcgccacctcttttcctccgtaacactgcaagttataatccccataatgattagtgttttctttcttgttgttagtgtcatacatgccaaagtatcataacgcttcctacttagtacatctgttaccacttgaccctttctaggatgataccacaaagtaaaatcataatcatcattatacttaagatatattgttcttatcataaggcttcttacttagtacatctgttaccacttgaccctttctaggatgataccacaaggtaaaatcataatcatcattatactcaagatatatttttctaccttaaattcatgtctcttgagtaaagagatactttaagattttatgattagggtatagttgcaacattgcaccaaacaagtaacatctccaatccacacatgataaagattttgctttaagtatgatattgagcgtgtggtaattttctcacatacttttaatttttgagaagcatagacaacaaccttgtgatttttatgagaacacttcataaacatatacttggaacattagtagataccatgtatggtcccttactattaagcatagagagaacaaatattatggtcaatctttgcttcaattcacataaagcttcttcaccactttcatcccacacaaattttacttccttccatcaccacagtttcaagggcacaaaaatcatagagaaattttctatataaaaataatagtagtatgctaactctacaaaacttgaaacaccatcaacattctttagtattgtccattttagaatagagtctactcctatagaatttaatcttagtcctcctaaagtcactgttctatttcttttcatatgaatgatagttcctaaaggtttataattctattttaagtgctcagtatgatcctcacgtgtcttagatgtttattgagtttcttggaagctaaatatttttattgcttaaaaaagtaattatgacgtgaataatgaaataactaagaagagatttttacgtagttcaggcattaattatccttagtccatgagtctattttattggcctcattggttagagactccttcacaaatgcatatataatggacttttactcctttcttccgtgttccacttgaagaagaggaagctcagtaggaatattttagagttaaaagcagggttacagaaatgtttttttttatgatgataaagattgtcttcgatttgaaggccccccctttttttgttccttctctgaggtatttattggccatctctcttgcatggactgtcttggatgggtcatcgtagggatgaaataccatcgttggattagtaggtggcctatttcctaggtggcttttaagggtgttagattgtactagttgtactgactgagcctgaaacgtgtgttaccttagagtcattcttatttgaattccctttattcctaggtgttggattatttagcttagtacacaagtacacgcatgctttgcacgactgcatgttgtgggggacaacctctaacatcggacatgtaaaatgtctagtcatcgggtatgttgcctagcactcgtgggctgagcctttgagggccaaaggcataccctaaactggtgcatccttgaagtgccttcgctacatggagaagatccacattccttgcaggagcaaataatctgagcctccaggacggaatatgactctggttcatgaatacccttcgcatggtcagcagatagggaaactttcttcacagagacttttcttgcgaggttaatgcctttattctcctggagcgctaagtgaatggcttagatggcttaatgactccttggccttttttagttaacatccacatgtcatgcttacgaatgtgcagataacatttaccccccaagcttctgggacataccattgtccaagagcttgcactatctccttctgaaaaatttggcgcatgtaggacttatgacaggttctttaatgcacgatgtaataagcaaccaatctgaagtgtcattatttgggaggcataagtttttctgtcttcttatcagtattttaaatgctgacttttaggtttttcacgcgtgatgggcgcgtgtttcatgggatgctcaaaacatggacgctaggatttcagttcactttccatttaccgagtgctttctacgatgcatgtaatgatggaacacgattgttgcaaagtgagatatctccggagtttcttatttttcccactgtcaggtgcccttttgacggatctagtcgaaccatttgcctcttgtggaaggtgcctcttctgagtatccattaaatacactcaacagtcattccagtctattcttttttcttcttatcaaaccaaagtttttctcccatcctgcaaaatctctctaatactttcgtggtttgatactagttctaccggaaatgacactgcactagcctcaaatttgtctccacaagtggtaagctttcttctttgtttacatgttgtagagttttgaggaaattgtgtgggtgtgtcaaccttaggaatagtagtcccacatctattgccttcgagaattttggggtcatgtaatgtgctgacctattctactgttgtatcgacttctggcaggtataagattgcaatggaaaacatttactcttttgaagaaacaggtggcaattctacttggaaaaagcagggacgtatggcgtttgtctctgggatgagggtccacccccagtgccacgatcccccacaaaggctgggtcagcctcgatctcatccctctaccttgtcgagaatacccccgatgggattttccttccccattaaggtcattccattcgaccctctcatcatggagaaagagagggaggtgaatcgggccctataggggggcttggaggaagaaaggctgcaagtgcgctggaggatggtcgtgctttcagtggtctgcaaggccaagatcgtagatggcatgtacgcattgcaccctactggggcgaccgtggaggtcgaggacttggagaagaggctgacctacaaagtggggagagaagctgccccttttgctgctgtgcttctagaccaggtggctgggaatgcatttgaactaccaatggttacttgggcctcctgcaccagtgtggatgcttttgcacaggcctatactgctaaacaataggcattaggggtaggtttaactccattcttctttctttttgtttgtttgtttttccccttattctgatatttcagcctctttgacttggcctattcggacaggtggcactactgacaaagaggtctactgtggaagtcggcacgctggtgacaaagctggagcaagtcaaagtgaccaatcgcgacctgcgtgctgccaatgagaccctccaagccgagcttattgacgcaaggtttcaaattaggggtttgcagcaagcaaaccaacaattggaggaggagaatgcccaccaggcccgcttcatacggagcatgaaagctatgcacgatctttacacactgatcgtgggacagatctctaatgcaggttcttcctcctagtcagcggcatccaacattgaacctccaacaggcctctttgaattggttgttttcttctctctcttcttttttttggtttatccccccttttaccatactttttttatcgcagagacaattaaaattcaccctcgctggggggactgtaatagtaataggttccttttttgttgttccttacttagagatttggtgtgatagatgttatcccaatttctgcactctgacgtggcatcactcgatggtgacacgtggaatagactccaggtatcacacgagatttggtgtgcattcgctcagatgaagttctttaaaccgagcagtgggcaatccgcacag

SEQ ID NO: 295853 - DNA, 3627 bp, Cannabis indica
ttttttttttttaatttgcattcatgtaatacaatatagttataacataacattttctatagtgataattattgcttttggactaacagttccaaaattaacagaacttttgtggttaacctgaaatgtcaatcttttattgttgcgacagaagtagatagggagtttgggaaaggtgatttttatgcttttcttttatcattgttattacttattaattagtatttataataattactacaaaacaaaacattggtaactagttatagtaatttttaataatacaaaagctaataagcttcgattttcaacttctttttttgccccggctgtttgggtagaataagccaacaaaagggaagatcctcgtgtcataataaaatctttatgtggggaccggagtagtactaattagttattttattcttctaatttggttatattgaaattactagctatatataaatatatatatagctaattaactatatggtgtggttgaattgatgtatggagatggaacgaaaggagctcggtggttacaccagatgaggaggtgttttacgtggtgggattgttaagatcggcagcatcatcaggctcagccaataatgatagtattaatgatgatattgatgagacacaaagtgtggagtacttgagccaacagaatgatgatatagtgaaatactgtggtgaagctgggatcatggtcaagaaatacctaccccacttcgaaactcaggaggagtggatggaccactacggacaaaagtgggatcactttctcaaactcaagaacaagttcgaccctcgtcgcgtattagccactggccagcgtatattcaccactaatatgaacaagaaaacaaaaaatattaaataactatgctctactcgatctacctagataattaaggccgtagctaattatataaattaaagctaggttagcctaaatatataatttcttgggaattaagggtcttttaattatgtatggtgtgtgcttattaatattattattatggtatgtgtgggtagaaagaactgaaggttaatgtacttttgcatgaagtagccatgagccccaacaggcgacaacccgatctgcttcttcaccggatatcatcttgtccttccaccacctctgatattttgtctgccaccatattaattaattacttattaccaagcaaaatttatcctctttttattgttatgtcttttttttttctttctttttctaatgaagctttttgtttttgtttctagctacgtacgtactcctatatttattcctctattaattttacataatctttcttactactcaatcgttaatttgttaaaccccgcgcaatctttgttagaaattattataaacaatgaaataaaatccaagaaaatacaactctattgcaataaaatgacaaggataccaatatattaagtaaaaaaatattacagcatataagaaaagtaaaaaataaaaagaaatatatattgcaactcaaagtaacaataaaataaagaacacaactaaaaagaagaagaagaaataagaactcttttacccttatcacctcaagtgaaaattagtggggattattaaaatttgaagaaggttttacacttttattcagaatttattttttcttatcatctctaagcactaaattttttttctaagaaataatttttggaataatcaagtctaagaaataattttgttttaagttatgattagtctgtgtgggaagagttaacatgtaggagaatgtaaaactcaagtctcaaaataaattaagattaccatttaaaattcaatgggatccacaaaaaatatgcgcattccaacctaaaaatttgaatcaaacatggggtgaattacacatttctccatatctaatccctacccctacaccaaacacccccttaggacttcaagcaatgtactttcttgatagaaattatatagtcgccacaaaatgaacactttagacctctatttataatgtttaggatgtcactattattcgcatttctggttagagacacgttgattctaaatataagcttaaggccagtgggcccaaatagcaaaaataaggctaagcctaggatcaactctgccttccgagagaacaccaatacaactcacttaggtgaggttccgtgaagatgagttagcatccggaagggtccgcgtatctagaagaggtcctctgtatgaatttggaagcctaatatagttttctatttactatctcacgtagaataaggaatttcttttcaaaatcccaaatagaataagatcttgctaaaaagagaaattggataactggaaattagataatcaatatgtcattaattacgcatgaatataggacataatacgaacaactatcttcgtgataaggcctccatgttagcctacacaaggtgcctcgtgggctgggcttcaccaaataaattcaaagtcaatgtattatttgtaaactccctaagggagtgaaaagggtaactatagtatgacctcaataacactataaatgctcactgaatttttcatacaaaggattggaaaatcttaacatacttgctcaggaaaagaatagagtgtccatacttaatgtaattcccttaagcttttttagtaaaatactaaataatagtgactcgtgaactaaggctcgttaatgctccaattatgtaaaaaactctaagtgtcttcttcatatatgttgactcagaaatctatttgacttttaaaccacactcgctcactagattggcgagaatgaaaaagtaattaagtaatgaaactacgtctactttgagtttttatttctcatgagatggttttataaaaaatactaagtatcaagctctaatttctagagagaagctctgaccttagtagttcactctctgcattgcgacatgaatgaaactacgtctattttgtgtttatttctcacgagatggtattataaaaaacactaagtattagaagctccaatttttagagagaagctctgaccttgtgagtagctttctgaacttaaaaaatgagttgaggtaactctcctttcataggtgaaggaggcccacccaaatagggggaaaatacaaatatcttgggggtgatgactatttttaaaggcccaatgggtcccctacgggtaacctggagcttatttttgtaactcccctggaatgaaatttgacgatgatagcttcaaattacgattaaattgtgagagattacttgatagagcattaaattagctttaaagttcaagttgaatcgcgtcaatcatatcaatatttagtgagttataaatgttttactaaaggcagttcatgacccaacgctcaggtttacatatgacgtcaacttggatgttgggtaagtgtaaaaatatccaagggatgtactttaaaattcctaagtgatattcctaacttggatgctagcaaaattggtcacaagttctcggagatgttattctacagaaacgagagactcaaaactctttatttttgagtgagtttcccatgttggaaatgagaaatgtgaagttgtgaatttgatttctcaaacttcatggatcttagtta

SEQ ID NO: 295854 - DNA, 1223 bp, Cannabis indica
atttttgtgagttaacactaaaaaatatagaataaaaatttaaaaaaggagaaaaaagataatattgaaactaagaagtataacatgccatgtcatcactcctaacaaaaggattatataaatatatagatagagcattgctattaggcactagtggtagcaccttctcgacatgtcacgttgcgattggctagcgatactccctaaaagttatatgggactcgatacttaatttactcataaaagagtgctaggcaccactgatgccctttaacatttctcatagatatatagatagatagagagatttaaaatttcttcttttatttgcatttcgtttattttttaagataatttaaagatatgaccacgatctatgagtaaattgtagtatgaaaagttatttatgtgacttaagctaaataaataaaaaatataatgacctttaaacatttaactctaaaattataagatatatatagttccaaattttatcgttaaattattatctatattattattttttgcttgaactctccaattacaatgtaccaaagtcttctatcaataatttatttataaatatgaatgaaatgtaaccgaaggagaaaatttataattttttacaaaatttgaggggaatttattataaaaaaaaaataatttaaggagcaaaaattctatcatagtttgggaaatcataaaattctgtgattaaaattaaattatcattttttttaatataataactaattttattgctgagagtcaaacaatacattgattattaaacaaggaggaatttcttccaacccaaaaaccttgttttctatctgtagtgcatatcataaacaccatgctacgatattaccatttcgtataacatgttgaagacatacacccgaaaagacagataacaagaacctaaaagatctaacagcagccccactcggagacatcctcaaaaaaagaatggaaaaaaatcacaagaaacaagaaacaaaaacctagcaacgaacaattctagactgcccggaggagatggtctaatcagcatgtaggtgagaaggttgtgctcatgagaattgacttccctgaagaaaaaattttaacagtaaataaataaaagagatttttacacctcatgtcaaaattgacaccttttttacatttttatccatacacggttttttaaactttttaacttttacatttttcaattt

SEQ ID NO: 295855 - DNA, 4071 bp, Cannabis indica
aaaaactggtaaaccagaagaaaaaaatgcagaaaacgagagaggccgtgagagaagatgacggcgaggccttgcgactgaagttctgggtctgtgtgttcgacggtaggggttctaggtcggggttaacgccggagaaagagagagagacatggatgtttggtttttatttgtttaagggtaaaattggatagaaaaatagtggataaattaatatcaaatttcccaaccactttcctataaataatattctcattagatatactcacttttaaagatatactcacttctgtaaataatattctcattagattaagctaatgtaaattatataatagacttaagtagtgaataaaaatatattagacaactcacttataaaagtagtatattttaataaaataaacatatatttttaattaattaatacaaaaaaaatatttatcaacttatcccacataaaaaaatctaaaaatacactatataaaactatttaattctttggccccatttaagcttctttaattctttggccccatcatggtgacccatctgtctttcacgagaaaatatcttgccaaatgaaaccgagtttactttgccaaatatttatcaacttgaaaacttgaccctccaagcaaaacttacttctggaagtttgaaattttgttggaaattgaagaggtggaatcccgccagcttgaaatttggaaacaaaaatctagggagctttggtataaacatggggatcgtaactctaaatttttccatgtggctactattatcaagaggaagagaaattttattagggttgtttctgataattttgtgaattggattgaaggccgccaagcagtgggagattatttcatctctaaattccaggcagtgtattccacattcttccctgtttctccaaatctggttccctatgtccaacaggtgattactaatgagatgaatgtgactctttcaagaatttttctgcttctgaggattcgtgatgtgatttggtctttgccggctcttgcagctccgaggcctgatggtatgcctagaaaattttataaggattactgggatatattgggcaatgatgtggttaacactgttatccaattttttgagacatgtgagtttgtaaagactttgaatcaaactttcgtggtgcttattcctaaaaaactaggggcacatacttttgatgagtttaggtcaataagcttatgcaattttgcgtataaagtcatttcaaaactcttggcaaatcgtttgcggccttttcttggtgatattatttccccattccagtctgcctttgtcctgggagatggattgcggaaaatagtatcattgcccatgagattatggactcttttaagaaaagaaacattttgtgtagctatgttggccttaaacttgacatgtctaaagcctatgataggatcaaaaggaatttcctggagtagtcattgagatcttttggttttcatgagagattcatttctcttattttgaagtatgtctcctcagtttcttactccgttctccttaatggaggccctctcagacaattttgtcctcagagaggattacgtcagggtgatccgttatcatcgtattagtttattatctgtagtgaggttctttctcagatgttgttgaaacaggaagaacaaggatggttgcatggtttaaagatcaattctcgatgcccttctatctctcacttgatgtgtgcagacgatacttttattttctgtagagctgatttgagagaagttgtttgtgttcagaagtgtctagaggattattgcacgtggtctgggcaggttatcaatgtggggaaatttgctattgtcttttcaaagaatgttgaggctcacatgagagtggatatttctaaagcattgggttttcgagctttgaattcgcatgataagtttttagggaacccaatattcttctttaacagcaagaaaaaacatttccaatttgttagggataatcttcgtgctcgcattaagggatgacgctgaaaacttctctctcaggcgggaatgaacactctcattagatcagtggctttgagttctcctctttatactatgtctacctttctccttccaaaaggcctctgtgaaaagttggataggcttgtttgaaaattttgatggatggggagagtagatcgtaatcgctatttggctttggcatcttgggaatccatttatcttccttttgataaaggtggcctaaatttgaaatgctttaaagatattaacttgtcacttatttgcaaattaggctagaaattagctttgggggatcggtcattgtggtgtcgttcctttttggccaagtattgtcataattcctcttctttctagtcgttaaatgaacacggtccgttgtcttttggagctcatggggtgtggctacaagagaggttcttagaaaagaaacttgtctcctagtaggccctggtactgctattgacatttagaagtccccctggattccttggatagcctgggataattatcgagctgcttttaatcctattattgaggtctccccatcttttgttaccccttgtttggttaaggcaaatggtgattgggactcgaacaagcttcgccaatggtttgtgcctatcttggatgagtcaattctttctttgaagaggttgccacctacacaccctaatgaactcatttggaaagatgctcatgatggttgtttctctaccaaactggcttatagagctctgattaagcatcagtgggtccatcgggaccctctgtgggaagaattttaaaagcttaaggtccatgaaaaacttcacctgttcttgtggaagcttggaagagatattcttccttttggtagccgtctccaatgggttttgggtaatagaatgacttgctccatctgtcatgtgggtgaggattcttccaacatctctttttagctgccctgtggctaaaggagcttgattttttagtcaatgtggattgagaactgatgatttattttttgataattcttttatcttattgaactggatcataaatcctgatcttcatcttggcatcccccttgatctcaaggtgcaatttagtattttcacaggatgtttgtgctttgagctgtggaaggcaaggaataaagcttatcatgagggtatttttccatctgtggcgggcttattagctttagctcaaaactctgcaacccagatttcttaggccttgactcctgaattcataagatcttatgtagctcctagtgctaatgacgtgatgtcgatcttcccagcaaacattgtttgtatctttgtggatgttgcttgtagaggctcgtgggctgtgggagctatcattgtgaaggacaatagtggagttgtgttagaagctttgacagtcaagtttgatatctcctctctcctttaaggagaaaccattgttcttcttcatgaaacttctctctgcttcttgcgtggctggcagagttcaattctcctttcggattgtaaagtgttggtggatgatatttttgctaaaaaggctctatactggcaagataagtatttgtttaatcttcttttacattggttggattctttgattgatgctagagtggtgtggattagcaagactattaaccttcatgctcatgctcttgcagcgtgggttgctgctcattcttttttttggctttctgtcctctgaggaggtggaacctcttagatccacttaagactttgtctttttggttggcctttgcctttttaatgaaatgtttttgttaagcaaaaaaaaaatgtacataatatgtatggatttatactacgtaaagaatatattagaaaatatattttaatttcaataatttttattttatttacaattttttcaattaatattcaaacacttataacttcattacaaaaaaaaacaaagttacagaatagtgataactctaggaattagagttattttcacattttttttaactaaaatttgcttagttcttaaatttttaattaatttagtaagcttttaatta

SEQ ID NO: 295856 - DNA, 3152 bp, Cannabis indica
ttacttactcaaataaagtaaaaaaatttattttatttactatttttttgtttttttatttttttttaaatataacagtagctacctcttttgcaaaaataaattcaatgagttttgccaaccaatcgtggctttcactcctcctaaagatgagctgtctccttatgaattttttccaaagaatatctagagaaggagcaaactcctcatagacattcagtgttacaaaagaaactctttccattgcatttaaggagggtagcctttttaactgggacaacccttggtcctgatcaaatgaagacactacagaagacaaaaagagaagaacacaaatttttataaaaagagtagactgtaaaaaaaatgagaaacagatgcaactgtggcagattagatggtgtagacactaatacattttctaagatgagtaaaggagtgtgcatctaaagccttagtaaaaagattagccagttaagcattagtggaaacatgagaaatagttgaaagtttggactcaaccgattgtctgatgaaatgataccgtatatcaatgtgtttggttcgagaatggttcactggatattttgacatgttaatggcacttgtgctatcacagaaaagggaaagagactcttgaggaaagccatagtctgtaagcattttgttcagccaaattagatgagtgcaatagcttcctactgctatatattctacctcagcagtagacaaagatatggagttatgtttcttgcttaaccaggacacaatattatttccaatgtagaaacaacctccagaagtactcttcctatcatccaggctgccagcctagtcagaatcattgtaccccacaagagacatattagtatctcttgaataccacaaaacaaactcaacagttccagataaatatttgaaaatgcattttactgcagtgagatgggactgtttgggagaggcctgatatctagcacacagcccaacattaaaacatatatcaggacgactagttgtgagatacaatagacttccaatcataccactatacaaggttggatctacaagttctccagactcatctttactaagcttagttgacaaactcacgggtgtaggggcatacttagttttatctaacccaaacttgtcaagaattttttttatgtatttagattatgagatgaaaataccctgatcagtttatttaatttgtaacccccccaaaaaaaaattaagatcccctataagactcatttcaaactcacttgtcatgagattaacaaatttgaaaaccttctcatcacttgttgacccaaggacaccattatgttatctgtgattaaccatctaggaataaaggcactctgagtctctgcaacaattttgtccatgagcaatttcattctgtttgacataacctttgtgattactttatacaaaacattacataacgcaattggtctgaggtccgccatacaatttggttgcttcttttttgggattaagaccatgttagcttcattacatttatcctcaaaatcaccagtggagaaaaaacgctgaaccatactcaccacattagagccaacaatagtccaacatttttgacagaaagctggtgacataccaccaggcctgggacttttatccgggtgcatttgaaacactgcattcttcacttcttcttccgaaactggttcttagaggttaaagttcatttcaggagtaactatttgttgtacgctatcaataaaattgaaaattactaaatttccccttacattaaactatggctaaaaaatttattacaaggacataatggtcatttctatattaaatcacacaataccttatttctaacttttcataaaaaaaaaaaaaaaaaaacaatacctttaaaacactaatttataccattgtgatatttttgccaatttgtcgaattcccacttttgccaaacataaatataataaatttcatattatatatatgacacacataatttaataaaatctccataattaaaaaataatatcacattcacctatttctaataataggtcttatgtctaatttgcacatattatttcataatttactataatatactaattaattactaattttttatatctaattatgcagtcattacacaaggactgcaaaactatggtgtcttgaatctggttatagaaagtacttaatcagtagaaatattgtattcaagaaacaagaaatggcaatgaaaaacaaagctattttaggtgttgaaacaaaatgttcaaaaagacaatgtgcgaaaagaccagccatctgattttatgtgttagcccaagatatatttcaaagaggggggatgaattagaaatttaagctaatgtcatgtaaatattcaagtttaatgcaataataaagataatcacaagtataaacaaataacaaactagaaatgtaaagagtttaggaatagaaattgtaaagtctcaatttttacaaggttcggtagaactaagccacctacgtacttggtcttcaaagctatgacctaactttgagtttaactatcgagccaagttaatgggcttgactaacccttacaaccgaggaatttttcactaaagtttttcctaaatctctcacaatagttttcttccaaggactatcaacctcaccgaattgttgaagtgccaatctcaccaaccgagttgtttttccaccggtgctaacttcacctcaaccaatagtttttccaaagaactatcaacctctttggattgttgaagtgccaatctcactctcggattgttgtagtggcaatctcactttttttcaagttgcttacgaaaatcggtgccaacctcacctacaaccgaattattattctatcgatgacaatctcacctctcaatacaatgaatatgtacttttaaaatacagagaaaactctctctaataagatgaaaaataatgtgaagtcctagagagaattgcaagcacactagagaagataagaacaagtttggctcaagtgtgtgtggttggtgtgtttatgaaaagatgataattctttagcttagaacacttagaatgatgttatatgatgaatagaagctcaaccaaccttaatttttgagtgaaaaatgaattt

SEQ ID NO: 295857 - DNA, 5591 bp, Cannabis indica
attgagtctccagggtcgccgaacctgaaatatttttattccacatatagctcatattacattcacacatgctatataaatctccgtaattaataaattacgattatttactcacttatagcaaaatttaaattttatgctgaaataaattagtaggatcataatcccacttattacctgattaatttataatatcaatataaaccctaattatttaccatttaacttatcaggatattacaggacggtcccgtaggaccatccctatagacgacatgtgcatctctagttgtttaaaaaaaaaaaaaaaaaaattaagcgtcttttaagattttgatttagtgaaaaagctgggttgtgtatttggttccgaagtaccaactttcctaatcccatgttaaacactgacaagacaagaaagaccaaatacataacagccgggaacactgacactctctaacgaagcttttaagctactcagtcctttctatcagaactctaatggccagtcgagcattttcaagatcaaaaatttcaatcttggtttcaggattattccgagttatgcacaatacaccgattaaggagaccctattgcccataaaatcgaaagtttcagcatttcaaatcgattctcgggaacccatttcctggtttagactataccatgacggaaggcccaggggacccctttggagaggcaagaagcttattggaaaagaagcgctttttgtgatattgggattgaaaaggttcaaggatgacgaagagaagcttgacaagtttatcaagacccatgtttttaggcttttgaagcttgatttgattgctgttctcactgaacttgagcgccaggaggaggttactttggctaccaaggttcttatctttacttcttcatacatgttcccaatgtgtttgattaaatgcttattagatatgttggacttggacacattttggtagtgcttctcagacattgctttaagcaaagcagttcaactcattacgcttacaatctgtttgattaaatgcttacaagacatttgtgcacttgtaaaagaattattaggatgctgtttagctcactatcaactcaatgattcttttcaggtatttaatgtggttcgaaaacaagattggtacaaggctgatgtttttatgtacaaagacttgattattgcactagcaaggagtaagaaaatggatgaagttatgcagctatgggagagcatgaaaaatgaagaactatttcccgattctcaaacgtattcagaagttattagaggttttctgagcattggttctcctggagatgcaatgaacatatacgaggacatgaagaaatctccagaccctccagaagagttgccctttaggattttattgaagggtctcttgccacaccctcttttgagaaacagagttaagcaagactttgaggagctttttcctgaaaaacatatgtatgatccaccagaagagatatttggcgcacactgaggtttgcatttctctctaaacttattccctctcacatacgagtggtatttctcgtagtttttatttccttttgactaatgctattgcatcatcatgcaatcaaacctggaagaatccatatgaaaccagaagtttggatcatagaatgtagattacataatcatctgttaatctttgtgttattatcatctaaaaatattagaattttttcaggtttttactgtaactgaaaatctaaaaaacaaaatctttgttttacttgtagaaggaaaaagacacgaaaacaggaagttggtcaagacagaaaaccatctacattttttcctcagctaaacaatattaggatattttttctttgcttatcattttagagaggtagaataaggtattagaagtttcatgtagtttttgttctcttcagtcctcatatggtccatagctaattgtatattgaagcttatgaacataatataaacatggaatcaaccgttcttcctttttagaaactattgaagtgaagatcttctagagagtgaaattttgagctgcctaacttttggtgtgaagaaagaggctggtatcatcaccatttttttctttaacttgatgtcaactaacagttcagttcacactaccaacggcaaaatgtcatcagtagagccaaggttgttattgttatagcttctaagacgagaagatagctaaaaagaaatgaagattgttttgatgggtttttaataaaacatagttggagaaaaatgttaatttgaattggaagaatttgaaaagaaagttaaaaggactcagaatggaatgattattcaagaataaacgtctaatggaattgtaattccaaaagaattttcatccatttgttttgaaatgaaaatcatcaaaggaatggttgttcccattaaaacccaacttccccacatatatgttaaaaaagagcaacccatagaatagaacaaaaatggcacttgataaataataattacaaagtgcaatttatcacttcttttagattagttttttggtgtctcatacgtcatacctgtccaacaacaagcatgtagcagcaagagaaaaacagctgagagtgagattcctctccatcctcacacaccagacagtccctagaagtcgagatgccaaattggtgcagcctgtctcccgtaggaagcctgtttttcaaggctagccaactgataaaatgatgtttagctgtgcaaaatctgtcccaaatcacagcaaactgtcatctttccatgaaccaatgctgcattttgtataacaactctcttccaataccaactagcatcattaatagggaccttataccaccacctatcatttcgcttatacacatcacattcaccaattttacccacaattatccatcttagttgagatgacccaaacatgctttccaatggcacaaagattccaaagagccatatcttgaaccccaaaccccttcttttttaggctacacaaatcatcccaagaaacattccccgatccattgaacaaattatttccttttcaaagataagcccaacaaatttgagtttttttatttttttattttattccgaatcactgttttaagtaaaattaccattcgagaccagtaaaaattgatataaaataataccgaattgattagaaccattctctgcacgtaagaaagatttctagaactccaagtgcggatttgacttgtcatattttctaccagtcaaccgcaattaaactttgaaatcctattcgagcatattttcatatcgagatacttaagggcaagatttttacgttagaaaccagagatatctactattcaaatccatgccacagaatccataattgctccatgaattgttaattttgcaatattagatttgagccctaaagtattggaaaacaactagaagcctcgaagtaacaaggtggcagatttgtgttatttcctttgctaaagaataacaaatcatggtcaggatgaaaattaaaatcaacatcctttgcaactcttctattaatcctgactaagtacttattttctttgacaaaaggcggtctaaggcctcttttagaataaaggtacaagtgcaaggccccataatcataaaagaaaaccaaaaccataatgtgatctacaaacttctaagaaaaatttaatgtttcaagtatctctttaagaaaatcccaatcaaaagtttcatacaccttttgtagatcacacaagctaatttggctccttttattatgtcttgacaaattataatattgtacattatgtttttgcctttgacaaaaccactttaattatttgaaataatatccagaagaaaactttttaccctctatttgttcttattattgtttcataattgtcagttttgacaatgaaaaagaaaactaattcaatggttgaagagtaaaataattttcctttttcaaaaaataaaataaaatagaaataatttgtagaggttataatatgaattgagaagcgaaataagaaggatataaattttattcatgacaaactaacctcaagtgggcgtgccggagtggttatcgggcatgactagaaatcatgtgggctttgcccgcgcaggttcgaatcctgccgctcacggcattttcaattttataaaaaaataagattagattgtcatttactcattgtgagaactgattctctagattatcttttttgtcctttattggatagaatgaccgaagaactcttatcactttgctatgctttgcttcaagttcagatttgatcgttcaacttccacttctgtccaaaaacaaaagacaaaaacaccaataaatgtattgatcaggattttatacatagaaaaatcaaggcaactcatcaataactccagttttgatatgaattcaagtagtggctagctagctacaacttattgtgtcctcacattattttcactaaatagaagcattatatataatgatgatgggactttagatattgttaaatagttatgtagggttattttagtcatttatgttagttacttatataagattttttttattagttgtattttttattttttattttgtaatttaaataaaaccctaattttcctgcatctcttttttattagttattgttctcttcataaataattatcatgatattagagcaagttttcgcaggtgtctgtacaattttcatccgtatagttcgacattccaattttcggtatagatttctttttcttgattctcatagaagatttaggtattgatttttgcagtacaattttgaattttcatcagttttgtatttggattttttttgcaatttgttcttttttctacaatggctaccaataaagatgattctcttcaagcgatcagtgtgagattggatggaaagaattatttgtattgaaattgtgttatgaaaaaaatttcaaaagaaaaaaagatgtggggttatatttcttggacaaagaaaaaactagcaaatggtaatacaaatctgttagaaaattgggaagtagacaattcgaaaattctcacctggataaataaccctgtcgaacaatttattggtacccaattagcaaggtatgagacaacaaaagaactttgggaccatcttgcgagattgtatacacagtctaattttacaaagcagtttcagttgaaaaatgatattagagctattgaacagaaagatatgagcatttcaagagttctattctgtaatgatagatctctgggattaattagcactcaccgaattagtagagctacgtgcttttacaccgtatattgctcgtagagaggaacaaagattggttcaatttttaatggttcttcgtagtaattttgagggactttatggttctccacttcttttgattgattcagtagtcagtgtattattagcagatgaaattcgtctcaagtttcagttagagaaaggaattctcttaacccctagttcttctgttttagcagttcctcctactacaccatttcctcaagaagagaacaaacctcacacaaagattggtattgatgagtgtagcttt

SEQ ID NO: 295858 - DNA, 5391 bp, Cannabis indica
  modified_base (972)..(972): a, c, t, g, unknown or other
cgccacatcacaagttagaaagagatgtttcatggtttcctccccccttccacataaaggacattttgtgtcttcaattggaaatctcctacagatgactgctctaaccggcaggacattgtagctatttaaaaccatatctaaattttaaggaaattttaaataatttactgtgttaaaaataatatttttactttaaattctttataccaaaattaatccaatcatagaattataattttgttattttacacaatactttctaatttgacagtgattctcttcttcgaccttcgtccccaagctcgagagtattttaaaaatatatttggcaaaatatcgattggtctagtgtgatcaagcatccgtccatcttttgaatgatgtggtctcatatttataggcagaaatgagtatcgtgtgattccttttttttgctcggattgatccatgtgaattcatccttttagttttctcacgtgctttccctcctgctttgttcatagagctccgctctcatggctttctcgagctcaactcaattcttctgtctttccctttctttaagtaaaacggtatgtttattttgttcccgtcacatcatgtcattagtattgttattattattaaagtgaaattactttttaatcctcaaggttatttttatctcttacaattataacttcagttcatggagaatagaagaaaaagtggtaacatgcatgtatataattaaatgggtaaatagcggcctaagtacccaaagttttaagtttgtaagtggcataatcctaatgtttatttttagtcggcataagtatccaatgttgtaaaacggtaatttttctctaatttcgtccgtacaaactctgtattttctaaactaggctacatataaggtctagattcttgatcattgggtctagacagaaaacatgtagtatcagttacttccaaatatcttttaatatntttaaaacggagtctgtactgacaaaactagagaaaaattacagttttacaaacattaggtacttatgccactaaaaataaacattgggtttatgccacttacaaacttaaaactttgaatatttatgtcgctatttaccctaattaaataaatatatatttatattttagttttaaaaaaatgaaaaaaaagtcggtggagagtaggagtgttcatccaattcaattcatacaataactcaaattcaatccaatctaatcttttacggattgaatcggttatttagatcaatttattttttaatattaaattatttaatatttattaaaaatattttttttcacaaaactaacaacaaaataaaataaatgttgtatgtctccaaataaaaaattaaaataaataaaataacaaatttaaaagaataaaaaaattgtatatagattttttttaattttgttttaatattaaatgttattgttactgcaacttgggtccaaatccacgatttagatttcaaatattggagtgaatgtgttctattcaaaattattggacaaattggtaaacccattatgcttggtgaattcacaaaacaaaaagaatgcctcaattttgctcgggttatgatcgaagtggatttgatacaggagttccccaaggacatttcttttgtcaatgaatgggatgaggaagtggttgttaaagttgtttatgaagggagactgattctctgtaaccactacaaaagtctagggcactcaagagaagattgtcagaagaagaatataggtaaaagcattgtgaaaacaaaatgggtgcctaagaaattggagaaagaacctgtgaaagttggaacaatggaaactgatcaagaaggttttcaaatggttaaaacaggggaaaataaagggtgttgaaactattcctaccaaaattgggtataattttcttgtacttggagaggtttgtgaatgctttaaggagatcgagtttcaagatgatgatattgagcaagacaagagagccagtaccaatggagggggagatcctctatttggtaatggatagaataatgtcgtggaacgttgagggcttaaaaagtctcaaaagcagttagttgtcaagaaattaattgaataaatgagggtgggactttttgggctcttggaaacaagggtaaggcctcataacttaggtgtcttataccttagaatgttctcgtgatggtgtttttcaactaataatgtgtgggatcatggttggcgtattatgataagttagaagcgggatatgttttctgtaaatatccttttttgttcaagtcaaataatgcatctcgaagtttatgttagagatgggaagaagagtttcttagtaacctttgtgtatggatttaatgaagctaaatgtagagatttgttatggaaggagcttagggacttagctaatgaaatatcttgtctttggctagtactaagcgactttaatgacattttgaatctgaaggaaagagtgggcaagaaggtttgattatctttctcaagtgcttttcgagattgtgtagaagattgtaaacatgaagatgctaagtttattgggtccttcttcacttggaataataaacatgaggtggaagacaaatttttttctaaaatagatagagttttagcggaccaagagtggttccaagaatatgaatcaagtgaggttgcctttctttcagagggcctttttgatcatactccagtgggtagaaaaaagcatttcaagttctttcggatgtggaaaaaagcaactggattttaggaagctttaattaaacattagagtactcaagtttcgggtactgctatatttcaggtgttgcaaaaacttaagaagcttaaggtgattttgaagaaaataaatgcaagagactttaagaatattggagtttcgaatatgcttgcttttcaacatatgatagagtgccaatccttattacaaagcaagcctactgattgtatttttctaaatcacgagaccaaggcaaggcaaaaatacaaagaaactcatgatgcttttatgtcactccttaaacagaaggctaaagtacattagttgcaagagggagatgaaaactcctctatttttcatgctagtatgaggcagaggagaatgcaaaataaaatttctcaattaaaaacatgaatggggcctgggtcgatgaagctccggctgttttaaatacatttctgggtttctatcaatctttgcttgacactaagttaaattagaggtgttttgtgctgaaaaaattgtgaagcagggcttaatgatttcacctatacaagcaaaatttcttttagcagcatacacaaaagaggaagtgaaaaggacaatttttgacattcatggcacaaaagctttggggccaaatggttatgagagttatttttatcaagataattgagagatagtgggtgaggaaatgtgtattgttcttcttaactttctgcataaagggatgttgttgatagagcttaataacacaaccatcaccttgatttcaaaaagtaaatgttttaaagtagtgagtgactttcgtcctattgcttgttgcaatgtcctctacatagtggccaccaaaatgatctgtttgagattaagaactatccttccatctctaatcacttccaatcaagagggacttgtgcatgataggttcatagctcataataatgatatgccaagatttaattcattactatggttggaagaaatcaaggcctaattacatgatcaaacttgacctgaggaaagcatatgacacgatagaatggaacttcataaaagaggtgttggaagctttgcattttctggagaattttataaagctcataatggtatgtatccaatctcctaggttttccttgttgcttaatggtattatgcatggttactttgaaggaaaaagaggtttgaggcaaggagatcccatgtcaatgctattttttgttctcgggtggaatatttgtctcgaatattgaagaaaatagggggaaataaggaattcaaattttatgataggtgtaaaagtctagaacttaaccacttatgcttcgtcgatgatgttctcatattttgtcatggtgacttttaagtagaaacatattatgcttctagggttaaagttcttttctgagactttgagattatttcttaaagaagctaaatcactactttattgttgtggcatggataagaatgaagagcaaagagtcctagaatcttcgaggtactcgagaggtaatatgccttttaaatatcttggagtgtcgatttgtgcaaagagactttcaaagatggattgtgagattttgattgagaaaatggttcagtgagtgtgcctatggagttcaaggaacatctcttttgctgttagagccacattgatcaattcagtattgattacaattcacacttattggtctcaaatcatgattctaccaaagaagattcttcaaaaaataaatgttatttgcaggagttttctgtgaaaaagagaagcatagttagttggatcaggaaaggttacttggagtaaactttatactccaaagtcaacatatggtttaggttgcatggacatcattacctggaatattactgcaattggaaaatttgtttgggccttagctttaaagaaagacaatctttggatcaagtggggtcataatgtgtaaaaaaataatgaagaatggtggtcttacaaagctcattcaactagtagttggtattggaagcaaatttgtaagataaaagagagctttaaatttatgttcgaattaagaagttttatttcctctacttataagttggaaatggatatactatgttatgtaatcctttatccaaggttgattgggggaaggaaatgtgggaaaaacttagtcttctaaagcataaatttatcctttggttggctatgctttataaattgcatacgaaagacaatttgtctaaaattggtgttgcattggatagttcatgtgtagtttgtggcaaccatgaggagtccattcaacatctcttttttggttgtacaagcagaaataggagcttgggagttttcaagagttgactgaactggaatacttcaaataatactgtctaagagcttctgaagtggattcggaggagtaaattgtcaaaatataggcaccaatgtataccacaacggtagttggtgttgtgatagtcagtagtcctgggatccataagggaaaatatcgagtaagttgtgcaattccacaccacctggggaaggttgagtgggattattctaagactgtgtaagtatgggactacacagttgaatagggcttaaatggattgattggtactacctatatcaacaaggtgcatcttgtttt

SEQ ID NO: 295859 - DNA, 3026 bp, Cannabis indica
aaaaataaaataaaataataacgaatatgattaactcattaattctttattagtttagttttatcttatttctttaatagtagagcaatttgtggggaaacttcttatattttaatttttatatacttaatcttcttatttttctggcaaaaccctctttaagttttttttttttttaaatttgacacgtcaattaaatattactatatgtaacagtatctcaaagctgatacaatattaatccagttagaatttaacggtaatatctaattgacactttaaacttgcaaagagaaataaattaaagggttttaccaaaaacaataaaaagaaaaagttaagtgtataaaaattaaaatataaaagaattctccacaaattcctcgaaataatattatataaattggtcactcactgccctattcctatacatgaatttcgacatattttggatagttaatacttaataatttgttttctgacactttttttttcatattatgataacttgtcagtagtcatgacatgagtaaaaactttgcctctttcatactgtcagatctaacgatttcataaccaaaagtaggtagtaattatttgtcaaaataaaaattatgttcgttttgattgatttcatgatgacctgccttgaatgctgctgattccattacattattatgcaaaaacactcacttgacttgaagaccatttgtcccacctgcaatgccatcatttcttcactctctctctctctcaccatctgtcttagtctctcaattttggggcacaaaaaagttattaatggggtatattagccagtctgtaatgcaattatcatggagacaaaacaaagaaataacatcttttgcaactcattgaaataacaatgcaacttcttttcataaattttacaacaaaaagggtaaggaaccctattccatagaattctgtcaacttctttggcctatggattttgataattgaccacaccatacaaaagcaaatcataggtattacacaggtccctcaagacacacaatgagagagctaaagacaagttcatgtgtcttgatggtgcaaaaaggcctacaaaataactagtgtaacaacacgtattcttctgctgcattccttctaaaatccaatccaatcccaacccatatcatcaatttgaatttcctttccctctcgatattcaactacccccatatgcttcagtacgaaagcaaactcaattgagaaaaaccctagccaatctcccatgatatcaattaactgtacatgtacacctagcaagagctgctcggctcactcctctttccatatgcggcctgtgacccttaactttagttcttgcctatccccaccagagaaatacagagctaaattcctctgaataatcaggccatcctggctatcacggactttcctgtgactgtcgcggatgctcctgggaattccttgccatattagcttccgaccatttgcaccaacttccaaactgtagctgaatttcttggaatcattgtcatcacccatgaaccgtaagaaggccatgtagactggagccataccaagctgaaaagcttcaaagtgcaaacagaattgtcttccaaaacaattaaatacctgcatgtgagaaaaaaaaatgtcaagagatctcatctaattctcattttcagataaaatgaaattgggtaaagcttaaataaatgaatacagagttcctgatttgagttagaacatgaagtgcatgaccttcaaataaaggtaatatacaaaataacaggctcccttaaaagagatttttattgtaatacgtatttaatttaatccacaatgcaattataacaggaaatatatactattagaaagatgtatgtactgcacattacaccctcctttctaagtgtttagttatcatggcatatgcttaactgaatcggtatatgtctcccttcattcatcaatcaacatacctgtaaggtcccagtaagcacagaagcgaaaagaaacaatccaatacatagatttaaaagcctgataaaaactatttctttattactaatgaaaaaaggcctgaaaaatcgctcttcagaccattatcactgatccccaatcaagaatggaagaaaaaaaatatacatctgtatagtttctctaaggaggaaaaaaaggcctaccgtcagcatccacgttgcattttcaacttcatgtggatttgatttgacatatcgatgattaaaagtacaaccatcatgcatatcaaccttgtgatcatcctttagatgcgcaacaagagttgggatgtcaccggtgattgagcactcagatccagcataagggcaattgtatggacggaatcgacaatgttgttcatgcttgagcttgctatagtatggaaaaatatcatggcaaccaaaactctggtaggtgcagggaagttctaaagattcagcaactttttccaaagccaaacaccttatatttccaagatcatagcggcatgttgggcagcaattatgcactctaaccttgcagtttgagcataaagtgtgaccgtttggacactgcaagagcggttttagacaaaaataaccagaatcataagtacaagcatggaaggaaatcccattactttatcatgaacagaggagagaagtcgtatacgtttcttcccagttttcaataagtttaagctaagcattaaagaaaaaacatacaagcaatgattggtcgtttactcagcaatgctaactagtgcagtgtccatatatcaacattccacaattctagtcagtatttcattactttagtattaacaaagaagtgaagcggtgacagtcaggatttgactccagtttttaataaggttaaatcagttggaaaaaaatatacacactaattgattgtctacatggatatgttaagcaacatctatatatcatcattccatatcttcaaaattcctattagagcattctttctctgcaaattaaaaaatatatatacatatatatctatat

SEQ ID NO: 295860 - DNA, 3405 bp, Cannabis indica
ttaggacacaaaacccaacactatctaggatggatgttgcagaggcacaacaagtgcctgccaggggagaagctggtcgggccttcctttactggaggattgctggcttatgctggctataaggttggccagaggagttcaaccaaaccccttaaggtggccaatttgttgtctctttgtcccgcttaagtatttgaactccccgtcaattgatatgtcatgtgcgatgacttggtcttctcattgacaagttgaattccaagtggcattaatcttgcccacgtggacatgccacgtcacgtgggaaaaattaggataacatttctccccccaagtccctgtgcaaacgtcatttgccctttttgacttagcctctaagtccgcctacaacttttctatagtgggcatgtcagccaacgatattcaataactgtcgttgtgccaatcgaggaccaaatttcaagacgaggcattaaatgccccattactgaagagacactcaaattttcactttttcattcagtcgtattggatcaaaaatggtacacgtactgaacacgtgtcacccatccgacaagcttagtgatagaataagtccacgttcgagcaaagagttcccacgcatacttaaagggcaaatgttatcccaaaatttgcacagagtgacataacatccatctgaattacacatgaagaacatttcatgacctagatggtcaatacgctccatgatgtaccatccaacttaagaccaacaaagctctcctgcccctaaagctttttaaaagaatccaaaattttgtaatggagaaactagtggggcaagataaatttgggagaaaagaaaagaacacattctcccccatttctatatgaaatgtcatcccctctcttaacttatttttcttttgtaatttctttcctaacttattttattttagtttaatattattaattaaaaaataaaaagacaaatacatccttaaaaagcaataaataataaataattacatctcaatttaatcaaattaaagcattcacaattatactttctaatatgtaaacaaaataaattgattctaacttcctttacggttaatttagtaaaccacataataaattattgtttgccattaattgattgttttgtttcgatcacaaattcacaatttaataagcgtgtactttcagtgcacaaagggtaaaattaagctacgagctttccttttgttacttgagtgaacataaaaccaatacctttgtgacattagcagattgtgttgaccctaaaaggtttagttagtatacttcgtcctaactcttgagttaaacacatgttagtcttaatcaaggaggggtgttatttgaacacattttacatttttctttcaattcaatacaaggtttgcataattgtggttattgatcttgtttatttacacatttttggccattattactctttagctaaacacatatatgtttcattcctagaagcatgtttatctaagtacgagattgatgctgcagcattcagtgctgctcctattgaaagagccttctcatcaacaaaaaagtaaggagaatgcaagtacttatcagattttaagcacttattccctatcccaatcacaaaaaatgcagcagacattctttgtgagaagaaactaaaatcttcagatcccatattcaagggaaaaacatgtacattatcttccccaacaagtgcttctccaacttgtttcacatgttcatacaatctttcgtcgttaaccatcaccggatgatgaggcaccgattgatcttccatgaagtccatcacggccgtacaatgatgcatcaatgcttcttgctctgtaatctgcatggtgatgatcgtaaaattgtcaatgcatttaatttaatgctttgtatgagttcattcatgttgtacctctttgattcttttttggaggaacaagagaccttcagggctcaagcttctaaaagttcctccaaatgttacagactctgggatcacatttcttgcttctcctccctttatgaatccgactgtcacaacctatatatgattcaatataatggatttaaacttgtgagttttagatgaaaattattagaaagttttgttttctaaatagttctagtgataattgtttagaagcaagtggtggattatttatatatgagctaatattctaaatctaagctaaataagtctaattaaatgagctctataaacaccttataccagtatgagcttaacataggcggcttttggttggaggaaatggaatggaatagaaaggaaacaacttttattctattcatttgttaagttttatttttaagtattgaaatgtcatcacctaatggggtgtttgttttgtgagtttgagttggagacaatagaattggagggagtagacttggagggaatatgaaaccatgcgtttgaggagattaacattaccactattttaattaaaaaataagacctacttagaaacacaaaccccttgtcattcaaatttaatttaaatatttaaattttacattctcattctaatcaagtctaaacctcataccaaatgacccatataagatttggtcactaaggctaatctctaaccaatcttttccttcattcccgtcaattaagaaagaacccatgattaatttgttgaagaccatagagcataatcccttctcatattaaacatcatagaatcagatatattctccatcttatagtaatttaagattcatgtatgtatttagaactagccctatcaccaagttgcaattgaaatgtttaaaagctatatcaagctaaggcaataatgaatatagagctcaagtactgaaacaaattaacatgaaataaaattttaaaaataagaaaaggaacactaaaaacattacattgccttcaagcggattggtttcgcgagatacaatttgttggagagaaagaattgcagaggccgctacaataatggggtctctggtgtgatgaggagtagatccatgaccacccaatccttgtatagtggctgagaactgacctgcaccagcaaggattggaccaggccttgatgctatgacaccagatggtagtgatggaaaaacatgtatactcaaaatggcatcaatgttatccaaaatactgtcttttaacatgtggtaagcaccagcataaccttcttctcctggctgaaaaactagctttactgttccctgatgatatgttataggaattaaataagtaaataagagtagttaagacattataattggacataaatatagatgccctttggtaacacttttggttttttattttttaatcacaaaatgaaagtaaaatttttgtttttaaaaattttgcttttgaaaacaaaa

SEQ ID NO: 295861 - DNA, 2548 bp, Cannabis indica
gcccaatagcaatgctcaaaatataaacatggagaaggataaccatgtcaccacccacaccaaagcgccttgagccattcaagagcacacaaatgatccaataggagaaacgatcttaacacttctccataaacaatattaaaccctgttatgaaattaatagccattacaagaaaactcacttttcttcgcgcaaatttacaccagcaaaggtgcactataagcacacgaaaattttgacgatgaaaaacttcggcagcacaagtttccggcaaagtgtagtcaacaaagactcttttagtgtttaatgtttcgtcggcaaaggtggttttcattgacgcgttagtgcactaggaaaaactatgcaccgatgtgtgctcgtgagacatggcttggttggaaacttttgcctacgtaaaaatgcacgaacaaaattttcctgcaaacataataattatgaaagaaatttttacccgtgcatgtaaagtcattattaatatctttctttaattttgcattttcttcaatgtagatcattacgccgataaatgtgtttttgaattttttttaatacatttcaattttaattaaaattttgaaattgaatataattataatttaaaagtaacttaaagccagaaattaaaattcaataaatcctaattaaaattcaatacctttatcacataataaaattcagtaccctcgtcacataataaaattcaacataatcctaagtcataatggctcaatacaattatatatacaccatacaacaattactaaagataaatgtcatcatcatcattgccttaggtcggtagggcagcttgagacgaagatccagagtcaagaacatggagcggtggaggtggggtcacttgagccattgagagctaggaaaaagggtgacaaatacctaaactgatcctggattattgtgaggtactgattctttgactacatgtactgtgtatgcatatcattgtattctcgctactgttgtacctctcgcttcaatgtcttatactcctcgatgctgatagtaggttgcccggaggtggaacctggccttgtagacacccttttccccctaactgctcttagtctaagcaaatggacaaggcctcttaagtggtctaactgctcatcaagtacttatgtcataacagagaagtcttggagacagtgggtgggatctacatcaccaacactaggctgattactcgacgtaggtttagattcgaacctttcaaccatctggcctacacagaacaaaaaaaaattgtcaaaatgtaatagaagtcaaatacataaaggtatgaataaattaataagtaacaattaaaacttacacaaatttgttgcatgtattcattgcgccaagtgttattttgtcatggacgtggaacctcacaaaagtatcaacgacactatgaagttctctcgtcttgggattagcttatttaatacaaagtttcaatactaaaaataaatattttccaaccattttaaatagtaaggtaaatttttatcgatgggtcgtaaaatctacgcctatacaactgacgcaaaactgagtggaataggtgctagttagaaatagtcggtaaagagcaataccaacccttcaaaaccaacaacaaaagggtagattatagtcgtcagttatacatagatgggaaaacctttcccgtcggttctgaacggtcgcctatcagtaagagactatttggaatcgatgcctatttctttgaatagcatcgattctagttcaatgatgtgttgttggattgaaaatataaattttttctgctatttattctcctacattaatttgattttttacaatttcatatatacaactacaacaatttatctagcaatgtggttgagttaatataaaaaaattccagatattaagaaactaactttataatcatgccaatgtatttatgaaactacttaggtggtgtttggttgactgaaatgtaattgtaatggtaataggaatagtaataaaatgtaatggtaatagtacatgtttggtttattttgtaatgaacattgtaatcaattttttttttaatttggttttgtataaaaaaaattgaataattaatatattgaccaaaatgttctcattttatttattgtcaactacatttgataaagtggtaagagagagaagggcagaaaagtctttttgtaatgtattggtaattgtaatcctcattcatgagtcatactcatgtaatgataattcatgcaaattgcaagtggtgtaatactcattacaatgtaaaaggattacaaaaattaaaaggcccaattccaaacattataattgtaatctccatttcactccaattttgattacaccaaagtaaacatgtccttacttaatccaaacaaagcatctaagctaaccaaaaaaatacatgaatgattatatattcataattttcattgccacataaacacattgtaaagtcttttttttggtcaagttagttgacaaaataatttttccatttatggtaagatt

SEQ ID NO: 295862 - DNA, 1224 bp, Cannabis indica
gacttagtatttatctgctactcggcgtaaaacttaggtatatatgccgacaaattactcttaaattttttgaaaaagaacaaaaataaatatcattgccgaacattaatttttattttggttcaaattttcatttaattaaattaaaaaattaattaattgtggcataactctcaaaacttttattttatttatacttaacttctaaaatttaaatttatcggtaaaactcaaaaattagaaaatcgttaacaatttaaaattttcatccattttaggtgttaagtgtcatgttggactgtctacatgtacatttatatagactcagtgtacacataacataattttattggtccacataaaaaatatataaaattaataaaaattataaattacaaaaaaaaaaaactaaatttttttccttttcttcttctcctttttttttttttctagttatccacttttacgtatattatcaccaccataacccaccaccatcctccacaacccattcaccattagcgcaacaaacgccaccacttcaccctactgtttgtatccaaatcacacatagaaaaaaattaaatagaactcaaattaaatttaaacaaaattagatcaaacaaacaaacacacacacacacacacttatatacataacaattttagatctataactttgaaccaaatatgagatttctactgtcattgtaaaacccaacctcgactaaccacttacgagatatccacacgaacccacgaacccatccctcctcgtcgaaccaagaatacaattcccatcatcgaacaatgaacccacaaacccatactgtctccgtcgaaccacgaacccacgaacctgtccccatcccgttcgagccacgaaccccatcgtcatcctcgtcaaaccttcacaaaaaaaaacagagagagggagagagaaacatagagagaaagagagaggcgaaacaaaagggacgagtttggggggacctaagttttgggagtgtagatctcaatttcgtggtccaaatgcattgccagagtgcatctccaccaccaacgacgacttctttatgagtgcatctgtaccaaaaaatgagagagaggggcgtatatagaagttttgggggatgaagattttgattttgtggtttgtttcaacaattggtcgtcggagttttgggtttgctctaggcacatccgagagagagagagagagag

SEQ ID NO: 295863 - DNA, 5874 bp, Cannabis indica
aaaaaataaatttaggcttttttttatgctaaagaatgttcttcagaatttgcatttgagaaatgtcaattttatttcataaacccatgtggaattaaatcttttcctttctttcttttttctaaaaaaataaaataaataaattttagttttgaattaattgaccatatacaagttactaaactaaaaatataaaaagatatttgcgataaaactccaataactataattgttacacatatgactaattaaaaaggtggtggcaaaagtattttattttacgattttattgtagtcatatcattttttggctcttgtcaattaagctcgttaagtgccaactcaaaaatacgtggcgacagatttttcagcttatttaatatgtgctctaattatatgtcaccaagtatttttgaattcaatgaccaaaaaataatacgactgcaacaaaatcgtaaaataatgtacttttgctatcactttttttaattaaaatgatgtgtgtaacaattataaaatattaatgtaatcaataagataccaataataccaatttggcgttaagactaattaggtgcttaactggtataatttctttagtactattttgatatcttgtatatggtaaaacaatttaagattggccccttgtgcatattttggtgaatattttgttttatataaaaatatttaaaaacatgttctaaatctatatattataaattaaagaatgtaaaacatatttattaactttgtattgaaaaaataataaccatctttatttataacacaacttctcaaacttaccaacagtcaatattttcattacaaaaccaagagttgatcatcaaacttaaaagactttgtaactattgggattctacttcataaatcatctttggaatcagtcttattttccgctatactttggttttcgcttctcagcgaaagctgcaagaccttccaaccgatcttgcgtatccaagagttgttcatagcagtcatgttctactgccaaacccgaaaccatgtttacctctaaaccctcatcgatcgccttttttgccattcttatagccaatggaccctgcattatttaagaacaaggaacaacaattaactatgaatttgttgttaagagaatatcaatagagaagttaaaagttgaagagtacaagcaaggccaagaggaataggaccatctaggcaatgcatcagctctaacaaaagaaacatcaagtaccttctcatttatttcccgagcgatttcaagtgctttcacatgagcttcaccagcagaaacacagtgattaacaagacctgcagcaaaatataatatagttctgccactaagaaacaaatgaacaaaaataaaaacacaaactggattctaaatgaatgcacctatagacattgcagcagcgccactaatttttctcccggtgaatataagttccttagctattgctcttccgaccaatctaggcagtcgctgtgtcccaccagctctgtgaaaggaaggtttgtgaagcagcaagcattgatatgagtatgtagaaagaaaagaatacaagccaaacatattagtattatcattccttaattgagatgcttcatctgttaggaaacaaaacttagcaactgcttcaaaaagatattgagagaaaaatggaagcgggtaacacccccccaatatatgagatgctgttctacaatttatgatgttaacaagtaaagcttagaaaacgaataatgaggttggaatctaaaacatacccaggaataatggcaagtcctgtttctggcaagcctagtactgcattttctcctgagcatttgaggtgtgaatgatcagtttgatagctaaaactcagctaacaaccaactttcactcattacaataagttaaatacaatttttctttttaaatggaactaccacatatccgaagatcacatgatagagccatttcaagtccaccacccagtgcagttccttcaatgacagcaatagaaggaacacgaagtgtctgtaacaaaaatttaagctattcaagtaaatgttcaacaagaacggtgtagagctgtgccgagttgaaattttcagcaatataggagattcctacatactgggttgaattttctttttttcaatgatgtattgtaagatattttccctttctattgattcatagagattggatcaaaaacaaaaattatctcttgtttttttaatataaaaaccaagttccaaacgaacgattagcaaatggaaactgcataagcttgctgtcttgaagtatttttttttttgtttgtttgtttgttcttatccaataatgccatgctttgagcagatcactcattcaagtcagaaaaatattcactaaaaattgaataggcgaacgacgagaactgacctctatgaaagtgaatgtggatcgtaatgattcaacaaaagaattgacctcagattgagtcatcatcttgcgctcctgccaattcatttaacagacaggaactacaataattacctccactagaacaaacatcataatgatgagaatatacagcatggtaattgaacctcaatcactaagaaattctctaagggtccatcctaagtaccaaacttttcaatttaaatgtactaatttcacaagttatttgagtttacttgttaagaatacaaattatgactcaagtcaagattctcctcttaagggatgggatacaatcatacaaagactcactatggttctttctcatcaattgggattggatcataataaaactctaaacaaaatctagtaccaacacagaacacaaagccatggaaattatttgggaaagaataaagtagaattatcatatattaatcctattataaaattacagagatgagtggtttatttgggtcaccttcaaatcagcaccagcacagaacaccttaggaactaaactacgaatcaaaacaactttggcagagtcatctgtacttatatcttcaagggtttgttgcaaccctctcagaaaatccttcccaatggcattttttctgtcgggtctgttcaaattaatctcaacaatccctgtcaccaatcaaaacccaattgggatctttacatagatacaattaaacaaagcagcattaaaaagataaagtttttcttttataccagaatcggagtcggagagtctgtgaaggttgacgaactgagaggaagttggctccaagatgagggtccgacgagtttggtaaacccatttagggagatgatgattctcggcaggagcagaaagaatggaaaatgtttgataaattgtgtgtttcttcaagctaagcgaccttcctgccaatcctttcagtgcttgcatttcttttgttttagagaaactcaaaaggttaaagcttgaaaatcaataaccagagaaaattgtgtttggaaggccaactcactcaaaataaaaataagaataaaaaggaggaaaattctactctgcagagtatcgatcctttttttttttttcataattatacatgttttaattatttaaaatatcttgaaattctaaaaaatttaacacttaaaggttcaaaaaatcagttgtacatatgattttttttattttatatgtgcgttaaataaattgtttgaatattaaaatctatattgtaaattattttgaatttcttataattttataaaatgttttcaataattatacaaccgactataaaaaaaaaatagactacaaaattcttctacatgtcgaatccattaaggattgcacaagtacattcattttagttaattgcattataaaaacaccctaaaaaaatactttttgtcaaacaaattttcatataaatctatctgtttatcaagggtgacatggcgagtataataacacataaacacaagagtacttaagactaaatttatgaaaaatatgtaaagtcacttgataaaagaatacaattctaaagaaaagaaggatagagccttgatttgagctatgtaggggggaagtaaagctaatacaatctcaaggtgtgtaaactgtaaagtgactaccctcacggggtatgttgagtaactacctttgtaggatgaatgactacccctagagatatgttgagtgactaggcataccctcacgggtggcttctgattaccctcaaaagtatgttgagtgactatcttggaggtatgttaagtgactcccccgtgggtgggttgagtgactactcttggaagtatgttgaatgggggtattaagtgactaacaccagaggtatattaagcgactactctgtgagggtatgttgagtgactacccccttggagtatgttaagtgactacccctcgagagcatattaagtgaccacctccaaggtgggttaagtgactaccccaggttgcttatttcaggtgactaactctttagtctttacctctacactcttatagtcctagtatcacacctacctacgtatgaatatggatagtgcaatacttactctaagtatcaagattatacaatattaggctctaaagacaacatgagaaacaaggaggagacgtcccgaggatacgaccccggagtaggtgctacccaccataaagatagtcagccagactatacctcgagggtacccccatatagcccgacgcatccaacactttcccagcatcattcaatcccgcatgaaactcaaaggtggttacaaacctacaaaaatagtaggatattacaacaagaattgaacttcaactaccccaaaaatcaagggaatggttgagatattttagcactaaggtcgcgtctcctaaagtgagatgcacaaactcttcccctatataagggtcacacgactcacacctgacctaggaaggggatccaaaattttactcacaagcaaaaactcttccattttttctttgcatttaagagtttgttcttgattttacaatccagattaataatacaaaaggagagtgggttattactaatatttgggatcgaacccttttaaattttagtattctttattagcatttattataattttagtttattttctcatttattatcactctacggcattatttaactaacttaagctagttagagtactacgaataatgttgggtgtgatggaagctactatcaagcatgtttagtaaaagatagttcgctttgacttctaactcaagttatttcaatttgagacaagaaaaagagatgggaaaaagatgagacaaggatttgagatggagactgtagaaatgagagaagaaccaagttttgagttgagtatcttgtgatttttatgtgagttgagtgttttttttaagaaaattgagtatttctccatgtcagcctcttccagatagtttagtatatcttcatgtgattttcactattagagtttgtgtgtttctccagcagccagtttttataaaaacttttttaatcataaatatattgaacagaaaaataaatgaatatatttagaaagaaaggaaaggacctgaatttgcgtatcttccaggtgaactgtaacaactgttactgttcgaacttctttttttagagttattaattgttccaagtaaagaatttctgggttttaaaatttaagtactttagctcattgagattgttggatttaaatactttctaatttcattcaatcttactatttaagtgattgtttatgtactaaaccatgctccttagactttgatatctaccaaatcatgcccctcgaactttgacatgcatgtactaaatcatgtcttctgaactttcatcaattttagacttttttactaaaattggacaaaagtctttaaatccaacaat

SEQ ID NO: 295864 - DNA, 4996 bp, Cannabis indica
aattttttctaattttatagtaaaaaaaaaatctaacatggataaaaagtttaagagacttgatttagtacatgtcaaatttcaaggagcatgatttagtagataacaaagtgtagaaattatgattccgcacatggacaatcacagaattagtaaaattgaatgaaatggacaaacatccttaaatttaataatctcaataattcatgagaaatttttaacagttaaaaaagttcaaagaacataatttagtacatgttaaaataaaattctaattagcttagaaaaaataatccttaaaaacaaaaatgaaaaaagaaatggtgaatggcaattttgtaatattaatgaaaaagaaagggtaaataatcacaaagctcaataaggtaagaaagaagagatgagagcgggactgagtcccaatcccatttgtccgttgagtttttgaatttcaaacatagaaacccaataaattttacaaacaaaacaaaaaagacttctcttttattattattgctatcaatttccattggttcagttcagtaaaaccaactctttctttctctctctctctctctctcccacattcccacacttcccactaaagacactcacccactctctctatatctcttaaaaaacacacatttttactttaaagtttcgatctttgagtctatttcccttttacaaacaaaacccttttgaattttcattcctcctctactgttgagcaaaaaatgggagcttcaggaaaatgggttaaagcttttataggtttgaagaagccagagaaagaagaacatgtaaagcttttttaaggttttgaaatgaatgtgtttagaaacatgtttttgatttttttaataatgttctctatgtgtttgtgtttaggacaaggttgttgttaagagcaaaaaatggagactttggaagagttcttcaggggatatggggtctgcttggaaaagctttaaagggattcaaagagctggttccgaaggctctgcttctcctcgtttggctaataatcataatgctttttctgctgccatggctactgttgttagagctcctcctagagattttagggttgttagacaagaatgggctgccattaggattcaaactgcttttcgtggatttttggtaagttaaacaaaaaggttcaatctttgttctcttagtgttctgtttgtgaaacttttctcaactttgtttggtgattggtaatgattcactcagtttgatctcttttgtgacaatgttgttaatcttaaactttgtttggtcattggtacttggattttttgtaaactgagcttaacatgttcttaatcttgacatgtttttaagtaacatatttaataatcataatcactaaggtaaagttagtaactgcctcttttgtgattgtggatagtgattctgaagtagtaattactaattagtgctattaagtgtaccatctttagatggaagaatacgtctaagttgttcttgtaatttctttaagatatctcgtagttttaatactgttgctcataacattgcgaaaagggctttgagcttggatatcactggtctaactttctttaatatatcagttagtttatggattttgagcatttggttaagtatcatatgttctgtttgtggaaattttcttagctttgtttggtattggtaatgatttcctcagtttgagtgagcagccttggtttagtataatgtgatttgtttagtgaaaatgttcttaatcttaactgtgtttggtaattggatttttaggcaagaagggctttgagggccttaaaaggaatagtaaggcttcaagcattagttcgaggccgacaagtgaggaagcaagctgctgtgacactgaggtgtatgcaggcccttgttagagttcaagctcgtgttagagctcgtcgtgtgaggatgtctatggaaggccaagctgtgcagcaaatactcgacgagcatcgcagcaaggctgaccttctcaaacaagctgaggtttgtttctccaccattcatttccttactggtttagtgaattgctaatttgcccttttcgagtcctaatcgaagtttgtttttgttttttttaggaaggttggtgtgatagcaagggaacattagatgatgttaaaaccaagttacatatgaggcaagaaggagcttttaagagggagagagccattgcatactcactagctcaaaaggtatgaaaaaaaattgaacttgttacaatttttgttgtgtttagttttttagggaattggtgagatttttgttgtcatggattttcagcaatggagatcaatccaagactcgaattctcgatcaacttgctcgggctattctttaaggaatcaagagtttgacaagagtagctggggatggagttggttagagcgttggatggcggcgaaaccatgggagaccagactaatggaacagtctcaacccattgacccttctgagatcactcctactacaaagaattgtttagattccaaacgattgaaatcttttgaaccatcttcggttaaagttagaaggaacaatgtgacaacaaggatttcggctaaacctcctactcatcatcatcaaatggggcaagctactcgctcatcctcgagtcctagttctgaatttcggtatgatgagagctcagcttcctcctcattctgcacatctacaactcctatttcggggaacacaacaatgttggcttcggatagaacagatgacagcagttgcagcagaccgagttacatgaacttaaccgagtctactaaagcgaaacaaaggctgtataaccaacaacaacaacagcagcaacagcagccaactcatagaattaggcaatcaatggatgagtttcagtttatgaagaaatcgggtgttttctctaatggtgattcgaaaagcattgctggttctgaacattcctctaagccactccatttatcagctcagttggataggaacaacatgaaacttaggtgaaagaaagatcacttggcttcaagatcaacaacttgttgtttctttttaatcttttgtttttgattgtgtatttaagtatttttgtggaagttgttttcccaaaaaacagatgagagtcttccttaggataatgtctttaattatagtttgtagtttgtacaatagttcatttatgatcatgattaaatattgtctaccattctttttttttttttttttttattgagtattactaaaaagtattattggtggttagcatttttttttcactgtcatactgttattaatgtaattaagtatcgagtcttatatataatttgaaaaaataatttttagagaatatagttaactaatcgtggagtgccacttatagaagaaggtattagatactgctcaataacaatactctcatttttattctagcaagtatatttacatgatttttaattggattaatgaataggattcatctaatttaaatattaagaatctttgttgaatagaaaatatttggttggtcacctaaggtgtcaatcaaaattatgcaaaaaaatcattaaaaaaattagtcatatgcctagtatatcagcttagagcaacttcaatagtgaaatttaaatttggtgttaaaccaccattaatgatactatttcaatactatgttttttaatttcaatcacaacactataaattacataaaatttaattaaaaactaaaaaaataaaaagtaattttagtgcggtttacaatttcccactaataatagtgagataccgcaaacaatcctatatataaggtagcttttagtatttgattggattaattttagtgagaaacaacactaaatttgagtttttactgtcccgttagagatgaccttataaaattgaagtatgaattgctaaacaaataaacttgtacaaaagagttgttttcgtaagtttaaacaatagacctaaccaagcatatcccactaattaagaacgagcgtccaaaaatttaaacaataaaactataaaaaaatcgaaaaactaaacttttacttaataggtttaactaaatttcagtaaatagtaacattagggaacattactattcaaaaatttgatttttatttatagcattatatgattgattacatgcttagaattagagagacatgtctcttaatttctcttaatgactctaagcttgacaccatgcttgaagtttagaacaatgccaaactcaagctctagaggggtttccatattgggagagtgtctaaacaaatactttcgatacaaatgaataattgtgagctttatttcttggattgagaatttttggccaatgcatgaacgaggccctattccaaatggtataaaggcataagggtgccttcctttctcttcctctccattcggatcgaatctttctggcttgaacttctccggctcggggaagttcttagggtcttttgacaaaactccgggtgctaaccaaacccatgttccctattcatccaccaaaaacaattatatcaaactattaaactaatatttcaaacaaaaatttgtttacaatatttcatagataatgtttaaatgagcaaagagctaaagggtttagagatatcccaactttattgtaataaaattaattgtgtaagtttattttgagagtaaaacatctaatgaattcaaaaaataaatatatgtaccttaagttgtgaaatattttttacaatatcgtttaaagcattactattaaagtactttagttttcaaatactatactgatatattactctataaatgattagtgatttactattttacttataaagctaaaatgtgtgagcttccatattaaattacaataatattgatataacattttttataatttataatggtggtagacattttaaggtgtggtttaaaaaagttattggcaacgactattttacgttttgattttatacacttaactcca

SEQ ID NO: 295865 - DNA, 3155 bp, Cannabis indica
tgccaaaccaaagtcagaaattttggggttcatctcctcatctaatagaacattgcttgttttcaagtctctatggataattcttaatcttgaatcttggtggaggtaaacaagccctctagctattcccagtatgatatcaaagcgtaactcccagttcaagaacatgcttagtgtcccacctagcaacatttatatttcaagtgtgcattttaataatatatagagtatagaatttgattgaataattcacattgacaacttaccaaatatgaacgagtccaagctcttgttaggcatatattcatagagtaacaatttttcttctccttcaacacaatagcccaaaagtctgacaaggttccgatgctgaagtttggcaatcaaggtaacttcattcttaaattcctcaaagccttgtcttgaacctctagagagtctctttatagcaatttcttgacctcctggaaattttccctgtcagagttcaaagcaaagataaataaattaatccaattcaaatttatggagatagttggaaaattagacttaagtgatagtactaggatgattgataattttgaacattaattaccttataaacagggccaaaaccaccttctccaagtttgtttgcatctgaaaaattatctgtagccactactataatttctaaagcaacaaagggtacatctatactttctctttcatcttctctaaactgccctgactttataaagtttgcaatctgtttctcagtataatacaagtggactgcctgttttccccaagttatcattttgtcacctatatatatttttaaccaatactttaagttagttacactagcatgacttggtaccaaatgcattctagtaatcagtattaccttttcttttgctctgttttcttctttgataatatccataacaagcaatacttgagatgagaacaatagccgctataattccaagaataacatagagtatcttagacttcaaaaccatcctaccttctgtaataaatatataaacagacaaaaaagatcagcattaatagcacaacatttgtgtggtgatataaatcctaaaaagatccagcaaagttggacatgcttactgttattacgatcctcaaactcagaagctgaaagtcgaatatagagagatttactattgctgtcattagcagtgagttgcttcacatttaagagatcttctgtccaaaataaacaaccactgttgttgtgggcataagcgatgcatgaacacatacctaaacatgtggaagcacagtcttggatggcccctgttcttaaagattcattatcttttggcaagttaacataaggtatttcaagaaatctatctcccccaacattatccaaactgtcattaccacactgcaattccctttctctgatacatccattggaatattcctttaaatcccattcactctgaaactttggtgtgaaccctgttaagcagcggcagaagggtaagtaattgtgatcgcagaggctatttgctccacaaaaggcataaacttcacagtgttgtcccggatgggacccactgagttcccatttcttagaggcgaaaagccagttgaatagctttagttgcccagaaacatctaggaatacttgagatatcatcgttgtatttcttacagaatatgtaaagtagctttcatatccatttgattcgtacattaaattgtaggagatttcaagtgtggaacggactgaccgaaaattatgtccgctccatggtccactactccaatatgttatggacctattccatattaggatatacgagttgtctgtttcgtttagatgaaaactgtaaaggccgggtaaagggtctttggaattcttccatgaagtgagaaccctgtgagttttggttactttgttgtatccaatttgattacctggtagaaaggtgtgggaagggtaatcaaaacttttccataaagtttttgtgggattggaacaattaattaagatgaggttcccatcatcttcaagtactgcctgtacacaggagctgctggagttcacatttgtggaccaaattggaacttcatcttcattgaaaagaactaaattgccatctgagattcttaggtgtgagtagaaggagactggtttttctctgtttgctatccaaactacactccgagaaggatccacttggtaccatatgcctacatagtagttttcattgttacctgggctaaagaatccaagcacaaacaccccacctgcagagacaatggttgaaaacccattcagggtttggtttgaagagattgtatcacctcctgttcttactgaaaaattggttttgacaaacagacataagaactgaatcactaagataaagattcggttggacttggaaatcaacatggtataactatcaattgaagacccagaagacgtgatctgtagaagaagtagaagagaagttatattatatgtgatctgattcaatcaattgttgcactacttaccccaaataaactgtttattgtttctctgcactgcacttggaaaagtcttccttataaaagattatcatcttgaattctaagtgtgaaataagttaaaacttaccttttaattatttcatcactctcgaacttttatcacaagctgatgtgggtgtttgttttgattgccacataatccagtcatccaattattcaaatgtgaacatcaactcttctctatatatttttgaggaagtcgtaaatatcgtcaatataaaataaaagttataagtcaatactaaccttaccgagtacagagcacttgtggaggccctcaaagaagtgttaattttcttctcaactgttttcctatcccacattagtagaaaaataatacagctgctcacaacgtaactcaaacttatattaagttagttaacactaggtattagtctgacagtgaccttttccttaacctaacaggtcactctcctctcaaaaaattgtttaatttgtgaagagaagtgctaccgtcaatttcctgttacaatttcttagtcaatctttacgttcaaaaatacatgtcggtatattctttttcaatttgtttttcacaggagtgttcgttatgcttacaacatcattcctgt

SEQ ID NO: 295866 - DNA, 3766 bp, Cannabis indica
tgggtgtaagggcccaatggagacttgaagcggggacgttataggtgctaggaccaaactgggaaggtccatatgaaattcaagataaattatgtgatggaacttatcacctaaagaggctggatagatcacaaatcccaagggcatggaacactgaccacctacaaattgggggcagcaaacttccttccttttattttatttttattttatgtctaatttccacttacgccttagggtaggaataatctaaaataaaagtagggatattcatctcattctcaatttattgaatttttgtaagtactataataactgatcaagaatctagactcttaatcacttaaggggtaacacatgttatacctcttacaaaataattacgtaaaattaaaaataagtataagagtaggaagtattgcttaaactggagcttcagggagctgaaaataagcaacgaccttaccatatttaaagttaatcaagtttgataattaaaattaactcaggttaatcaaaaaaaaaagaaaagctcaggctttgaaatctaggaagtaagtaacacttaataattattttctaaaacaagtcgttaaaattacgaggtttaggccattagaaccctgttccaaggaattcacaaaaataatttgttaaaaagaaaagaaatgtctaaagcatttagtcgaagtctaaaggtttaaaccttctaaaccagaacctcaaggaactggaaacaagaataaacatagaaaaatcaagattcattggatatactttaagtatctagtgaatataaagtacgaaaattataaatatgcaaaaataattccataaagccctacagtaaaggcgtaaataatgcctttgcattaataaaagggtgaaaagttagttcataaaagtggattacaacttggatggatcatttggttgctgaactaagtctgatgggtttctaactaaacccttaataactgaaacatcactagtgggaatctggcttgaagctgaaacttcgttagctagaatgatctctgcagatggaagggaggatccttttggattctcataactgattgagaaacttcaccgtctgcttggtagcctgctcagcagtgttaagagccaagattttaggaagaagttgctctctgtcatcttcatctaaaaaactcaccacttccttgttcaataaccataattggaacaaatctactatcaaagacttcttcagatcttcttgatgttcctcttccatagtggcacgattctattcaagactctcaacgtaggcttccacctttatggttaaagctttgggcttttccattttttctcaagaacgctcctcagccctttaagcttggctgagaagtcaatctcagagttcttaagcttttctaaagccgcttgtttagaagtttcagccttttgctggagttcttaatgatgcctcagcttcttctccaagttggcagcttctacaatctttttattcagggcctccgtctgaatgttatagtctcaggaggcggaggtcaattgttgctccagatccttaattttctcctgtgcattagatactttatcctcaagtataaaaaacatgcgaatgagcttaattctaagattccttatatctttcagtccacttctttcccgccttggcagagttttgtagttggacacaacagcattaagagaatctttgaccctttgtttgatcaccatctcagcgcaagacttagcattgttcaaagctttaataacttcttctttgtgttgcataacttggtcacgttcagccttgaaagttttaatttcatacgctagcttgttaacaaaggaagagcatctctccgccatcaaactcacctggaaaagaagataaataaaattagatatatttcaaaaatggaaaaagagatttaatttaatcataagttaatgagcttacagcaacaacttggttcttgagactaacaactatgaagactggttcctcacttgccgttgtgtcaaacttaacggaaccttgtctactacatgtaattacattcaggtccaataagtttgctacaaacagaacaagatcagagcctactctaggttggaggctctcaatagccacttggaaattaaagatagcaggaagcagctcgttgaactttgtagcattagcaaattcagggccctgcctagtcgagagaaaggttgccttgttcttcatttcttcatattcaaagttgattcttatattgaaaagtttatcaacaagctccagttgagcacaaacctcctttgagaatgaagaagaacgaattggaaaataaatgtttcaatgaggaagtgaaggcaaacttgtgttttcactaggtagttggataaaagaattcggaactagtggagctgacagaggtcaagtgctaacaatggctttgttggaatatgcattccgcctagtcagctttccccttccaggaatatttgaacccctccctccatgggcttctaaactttgctccattgaagcagccagttgctaaagtttatccttatctttaacccttgatctttttctatctccaccgagttcggagccaccctcttccttagggcaaagacatatctttttccatcatcttctccatcaccttctctgtcatcttcctcatcaccatcaatttcaataggttttagttggggaagaactatatccaaaggagtctcatcttctttcctcgcgaagtagaggctaccacagtaaaagtggctggagcatatgcaacaacatctaaaactgaagccttttgaatagcttccaagagtttaatcaaaagtgttggcttcttagctccatcatcagagggctataaaaccttccccttgtcacgaccacttttggctaggtctctgactttgtttgaacattgatggatggagccaagaaatttgtctacaaaacccatttgaaaagtgagtggttgctcggtaaaaaataaagcaagttcagataatgagcatggaagcatcataataaaatgaataatgacaacatacaattaagatccatgccgtttattttagcatagttgggattttcgctagcaaattaggttatgtcctctctatttaagagacttccatattgaaagaacctttggtacaacatcttcctaagataatctacccagacctcatgagttggtggaatgaagtggtttggattcctaatgatgtcatctaccatatccatataattattgtctggatacctatgatgatctaagtgcaaaaagcaagggtcgaatctgaatttgtcaaaatagtctaaatttcccaaagatggagccttaactacacggaacggtgtcttaccactcctaaaagtactcgctccacgagcaccctcattccagaaaacatccttgaaacgaacaacatgctcttcggcctcgctcaccgtctctaaaaattgacagggctcatctaccaagcattttcctccaatttagtagcttttaaagcttattcagaagaaataacaataatagcttctttaatgtcagcaagactgacatgaaaaagatctctgactagattctttatcgttagattataaatactttgatgaggagctaacaggccagcctctttaaggtttttagtggttacaagtgttgggttttgtgccctaaataaaacccatttcagtataatcagatttacttattaataaagatcagaaataacattttatgtt

SEQ ID NO: 295867 - DNA, 2313 bp, Cannabis indica
aatttatgatataattatattataagtacataagaatttaaaattttgaaataatttaataaaattaaatatttattaaatgaactaagcattacacactttctttttcttattttaaaaagaaacaaataaaataacacttacataatttaattttctgaattattatcgtgttccaacatatgatcaaatattaatacattttgacggacatatagtgagcatccgtatttttaatttgtctatgtcggccaaaaaaatattcaattattttgatattcttcaaagctaaaattatcgagtaatcaatttatatgttaaaatattattattttacttaatatttatttttacttaaggtaatttttttagttttataacttagtgctacattgtttttatgttatttaatattagtactttagttattattgttttgtatttttcaatatattagttttatattgttttgtatcgagataaatttttatttgatgactaaaaatgcaagattattttttaaaaaattaaaataagggttagaatgcaaattaaaagttctatactaaattggtataaaatccaactattaatgatgtagaatttggtatacactaattttgtagacaatttagtgtgtcattagagtgaaataaaatagtgtaaaagttttacactaattttgtgaaatagtgtactattggagttgctctaatagtgtagaatttagtgtacgctaatttaatttataatttgatgtgttattagagtgaaatagtgtaaagattccacactaatatgatgaaatggtgtatcattggagttgttcttataatggtgtggaatttagtgcacactaatttaatttataatttaaagaattgctaaaaggtaccactggtgcctagcacccaccttgatatcttgctgttattggtgtaattaagtatctggtcccgcatatcttaaaaatataatttttagggaatattgctaattaattatgggacgccacatatagaaagtgaggagcactgctagtgctctatatttaatgtgctattgaagtaaataatgtaaaaatttcatactaatttaatgaaacggtgcaccaagaaactcttagtaagtatatataagagtaatttgcggcataaatacttaagtttaactctcagttgcaaataaatgcccaatttaatttttggcggtaataatacctaagttatatttctggaactctgtaggtacctaatcattaaatgttaaaccattatatccatgtgtcatatccttattggtatatttgaactattttttttttaaataataaaaatttaaagacttgaaccaatcagagattgccatgtggtaatttatttaactaggtatctacagaagttccaaaattataacttaggtaatattatcgccaaaaattaaacttaaatatttatttacaactggaagttaaacttaagtatttataacgcaaattactctatatataataaccaattcaaattgttatatttttagattgaaaaaatgtgcattccttggaacttgttaagtatcacagaaactttagactactatctcaaagacaatatgtaccaataaatattaaataatactttttttttgttgcttaataatacaataaaatattacaattagaggaagtattgttaaataattaatttaaagaagggcttgtgttgtgaccaagttattaggttcttattagttaaatatcaactaaaagttggaagccacaatttcaagatcaatatcatggtattagcttttaattcacgaaagtatgaatgaaaaacatagtattatatacatataaaatttcattattcttataatttttttttttcttttcaaattattaattaatcagattccctcaaccattatattagaagtctaatgctttaaaatgatttaggctaatatttaagcggataataatatgtaaatatattaagttgtattttggttgtgcatgaaaatattgaattgaattatatgatcatatgatatctaaaaaaaatttattgtaaaaaattaatttactaacttgataattgtctatactaaattatgcccccaaactttgacatgtactcaattatgtcttataaacttccatctatatgctcggattccgttagtaaaattaaacaaaatttcttgaatccaacagtcaataattcaagaataatttgatacatgttaaagtttgagaaacaaaaatcttaattaactaaaaattaatacgtttctttttttttttttttt

SEQ ID NO: 295868 - DNA, 3529 bp, Cannabis indica
aaattaaataaataattacattaataatagaaataataaatcttatgatttcaaaatggagtatattataagaaaatttacaactaagtacattaatttgattaaatttacaaaaaagtgatgggttcttttttatactaaaactatattgttttagtataccgttcccaatttaattcatttttatttttttaaaaagaaaaaaagctgtctgagacgtgtttcgtagttgatgacgtcactccatcacgtcgatcacgtcctcgacaactcccaggctgaaactgatcacacgcccattttttgcctccttttttcaaattttgagtcggtaattaagtatgagaaatgatttatttttcgtatttttcttattttctacaagaaaatataaaacaaataggtcatattagggtggttttaggagtttgtttataaatatggaaattttccttataaataatgaatacctaattgagatatatatattttttacatttaatttacaataataatattacaacgtgccatattagttaaatctgacatttttttttattttcttgtatttttaaagtaactttttagttactaatagtgttgataagaaatcaattagttattttacataaaatacttcatttttatatcatataatttgagatacattttggttacctctaaaattgatttgtatacatcttagtaattaattagttaaatttaggctataatatggtagcttataatttaaaatatatttaggtaatctcctaatgaggggttatttcagaacgatcgtacggtctgattaggtaatagaaacttgctacatggtggatcgctcaaataattgtagtttgctatgaaactatgttgttgaacttactcgatcattctggatcaagacctaccgacgcaatatacagtaaatatcggatgcctctcctaataagggggtatttcaaaataatcctatgatccagttaggtaagagaaaaatgctacaagttggatccctcaaataactgtagttcgctatgacactatgctgtcgaacttactcgatcattctagatcaagacctaccagtacaatgtgcagtaaatcttggatgcctctcctaattagggggtattttgaaacaatcttacggtccgattaggtaacagaaattttctactcggtggatcgctcaaataactgtaattcactatgaaactatgttgttaagcttactcaattgttccggatcatgacctacaggcgcaatgggcagtaaatcttgggcacctcccctaactaggggtatttcagaatgatcctacagtccgattacgtaacagaaactttctgctcagtggatcgttcaaagaattgtagttcgctatgaaactattttgtcaaacttactcgatcattggtgtggatcaagacctactagtgcaatatgcagtaaatcttagacgcctctcctaattatagggtatttcagattaatcctatggtctgattaggtaacgaaaacttactactcggtgaatcgctaaaataaaactgtagttctctatgaaactatattgtcgaacttactcgatcattctggatcaagacctaccgtcgtaatgtgcagtaaatcataaatgtctctcctaattaggggatattttagaatgatcctatggtcgattaggtaacagaaactggctacaagttggatcgctctaacaactgtagtgcactatgaaactatgttgtcgaacttactcgatcgttctagattaagtcctatcggtgcaatatgcagtaaatcttggatgactctcctaattagggggtattttaaaacgatcctacgatctgattaggtaacagaaacttgctacaagatggatcgctcaaataattgtagttttctatgacactttactatcgcgcttactcaatcgttcaagacctaccgatgcaatgtgtagtaaatcttaggcacctcccctaactaggggttatttgatcctacgattcgattacgtaatagaaactttctactccgtggatcgctcaaataactgtgttcgatatgaaattatgctgtcaaacttactcgatcgttggagtggatcaagacctaccagcgcaatgtgtagtaaatcttggacgcctctcctaattaggggttattttgcaacgatcctacggttcgattaggtaacagaaacctactactcggtcgctcaaataattgtagttcgctatgaaatatgttgtcgaacttacttgatcattttggatcacagcacaatgtgtagtaaatctttgacgcctctcctaattacaggttatttcaaaatgatcctacacggtcaaacgtactcgatcgttctggatcaagatctataggtacaatgtgtagtaaatcttatgtgcctcccctaatagggagtatttcagaacgatcccacgatccaattaggtaccataaactttctacatggtggatcactcaaataattgtatttaattcgctaagacactatgctatcaatcttactcggtcgttcttgattaagacatatcgacgtaatgtgtagtaaatcttgtaaacctctcctaattatggggtattctggaatgatcatacattctgattatgtaaacgaaaacttgctacatggtggatcgctcaaataactgtagttcgctaagacactatgcggtcaaacttacttgagcattctgaatcgacctattggcgcaatgtattgtaaaaaatcttgtacatctctcctaattatgggatatttcaaaataatcctgcagtctgattaggttccaagaacttgctacatggtggatcgcttaaataactatagttcgttaaaacattatgcgatcaaacttactcaatcatcgttctaaatcatgacctatcaacacaatttgtaataaatcttatactctagttctatgagggtgtgaatcaaatcgtaagcgacaaaataagatcagtggttaatattcaaactaatcattacatgcaatatctatcaaggggtgatcttatttgcactaaatctttcaactaacatcactaacatgcttgtgacctcatagagaattgaacctttctgatgtacaaccaaatacgacaaattgcctataaaattttagctagaaaatcaaccaacagaactctatcgtcttatagttttcattattaattcaagtccaaatatattagtattaaaatatgagcatttaaccttcacatctaattatgattttttgtatttttttaagaaataaaagtataattgcatttcacaaaatttgttgtgagtcacaaaaattggtttttaaataatcaatcaagtatgtgaaaagaaaaaatcaatgtgcattcacaggtaattaatgtgcaccatatgttttaagttgtaagtattacattaaggtgacgtttgattggaggtaatgaaatggaatagaatggaaaggaaacaatttttattccattcttttgtttggt

SEQ ID NO: 295869 - DNA, 2140 bp, Cannabis indica
ataataaagaggggattgattcatattctcaaataattggtgagaacccctactttaaaaaaaaaaaaaaagaagaagatagaaaaaactgtgaaacaaatgaagaagagggtgtatactagtactgtattttatttcaacaatttctttttttggtacccttaatttggccttttccaaaaatcaattttgttttcaattatttattggggaaaatcaaagtatgagactagagttttgtgtatcgatgttggaaagtcatcaatttttttgttcttttgcatgcaagattcttaatgctcaaatagattgatcagaagggtacaagaatgaatagtatattctcatctcatgcagtgaaatgccacttttttatttttgtcttgaaaggtgtgaagtatcatttttatgttaatttatatttgttttggggaagtggctaatggacattgtaaatgataatcttataatccaatagataatggttgtgcgggaacccaggggtactgagtgcatatggtacaaccattagtcaagaaattaatcctatcaacactagtattttggagtattgagtgcatatggtatagttgttggtttcgcatagtcaagaacgttcgagactcacagaagttggacattggttagacgcgtgattaggtgtatgggcacgtaagttacaagtcaaattatatgtttatgttgtatgtttttctaactgaatatgttgactcacaaatatgtatttcctgtataggtaaagacaaggtaaaaattaaataatggtgagtctagagtttaatgaagatcgtacatatctagacagttagacctaaaatgtttagctcttcgggacatcatgagctcaattttgttagttgttgggtgacaacttttgattgtttgtattttgtaaacttatgtatatatgtttagtaaagtttataattattttaaaaaaatatatatttaatcatacttttcattaaaccctttgattagcaaaggttaacacaatattaattaagaaaaacattgtagcgcacttaaactaatagggcgttacataatatgtcaactaaaaagtagtggtgctctaggcttttgtggcttatagaatgtgaatagagcatttctatcaaaacttgcatggatgattgtctctaactctgagaaaccatgggttaaaatattggtggtgcataagtattgtattagaggatctttctggtagggaaagcctcagattctaatccttggaaaagtattcttggtgtgagaaatgtgatgaagagatagtgttgtttcctggtgggttcagggtctaacaccaacttattatcccaaccttaggtccctgattatgatggcactctagagtgttattttcataagttagtttctaatgattctgatttggggaattcaatcaattcttcatattagaatccttccccctggctgtgaggacctgtgtgtgaaaagaggcagctaatggttctaataatgctttagggatattctctggcggatagccagtgatattctttctactatggacaaattgctttaggcctctattttgcttcaggaaaacttgtgtgtttcttgtctccttgaagaagaaagtgccctacatctattcatgaattgttcaatagctcgtgctattttgttctagtcaaaatggggcatcagaagctgaattttcaatctccttaatttccagtttattgactggatttttactgttgttacccctccaaagagagatgaatttgtgagctttacatcggctttgtgcgactctatctggtacgtgagaaaccaaaagatccttgaatcaaaaagtactgatatgcactttatttcattataatcagccagtaaaattagttctaccagttgcaatctccctagagcctcatgacgattctttttcttgctcttcgggcaatgagtttatttcccttcttgtttgtggatcatttaaagatggagagtgttgagaatcatagtggagtagctcatgttcttatatatagcgcaattctctaccatttattccatgtgggacattgtccacaatattccccctcaagatgatggctattttttgctcatcaatcttgaaccgtat

SEQ ID NO: 295870 - DNA, 4397 bp, Cannabis indica
aaaaataattttaaaaaaaacaaaaaataattttttaattatgatgtcaaacatacacttagttttgctgaaaacccgattgtagcacgaaaactatcaaaggcagcttcaaacaatttcaagggatttaaagccttccattgtttttcccctcacattctcacttcatttttttcaccttgatttttctctccttaaacaaaaaatgaaaaacaaattacaaataaaagttgctaaacatacattcaaaaatttaaaattaaaattttataccaagcccaccacttttttcaaaaaaaaaaaaaactcaaccttcaacaacagattctactcaaaaaagcacaaatgattaaaactgattaatacataagttacaattgtactaaatttgcccatattttacagactactttcattaaatgacgaaggaaatcaagtgagcatgagatcaaaaacatttccatctagtccataaaatcaaagctaagaagctatttcctttctgaatgaacaaaaccatgagaagtgttactcgtaaactccccggcttcaagaatgattattgaagataataaagagatgatgaaaaacacattagagacaaacgaacgaaacaatgccttcattggagaatttgactgccgtagtcactgttgaacttctcgtagcggtgagcatggagatgagcagacggcctcgtgtttttgagtgccgcttctatatcttcatgagtgattggtccaaccttaggcagttctgcagcaacccgaaaattgatcaacattagctctatgtatgcagtagaaatgaaatgtgcttttgaaagaaacttgaattgaaacacgaagcacttaccatcctcgggcactacttcgagtttatcttcaagttgtgccatcaaccgtcttaatggttgcatggccgcctctttgcacaataaccggatatcagaaccggagaaaccctctgtcttttctaccaaagtgtcgtaaggaagattctcttcgctaggctttgatggaaggagctcctcgaccatagctcttcttgcttctggttccggaagaggcactaagatctttttattgtggttaattgaaacagatacagtggaaaaagaataaacgtaaaaaagataagagagttagacattgcttgtatgtaaagttacccaataatgaactaactaataaaaaggatacacgcttctcaagacgacggagcatggctgcatccaattcccagggaagatttgttgcagccaacacaaaaacaagttcatctgtccgcgtcaaaccatccatctaaaatcaaaaccaagttagtcaaacctcttataaaagtctgttgataccgatataacagaacaacaacaaatcaagaaaagtagagaacataaattgtgaataaaaagagaaatgatatcacctgtatgagaagttcagttttcaaacgcctacttgcttcatgttcactgcgtgcttcaccacgttgactaataattgcatcaatttcatcgatgaatatggtcgatggagcatggtgccttgctacctcaaataacaccttcactaacttctcagaatcacctgccattgtaaatgcatcgcatatgaagatatattttttattcgttcgtgcattgtgatattaacagtaactacgaccaagggaattgcttcgctattacataccacgccatttactgacaacggatgatgctgaaatgttgaaaaaagtagtattacactctgttgcgacagccttggcaagcatggtctgcaatatagaagttgcaatcactttattgtctaaaatcgataggtaagaaagattaagaagttacattgtaacaaattaacaatgttcctgcttgaacaaattatcctctaatgaaacatagtgaaaaagacctagttgtggaatggaaaaacataataattatcaagcaaagaatgcacaaacctttcctgttccaggaggaccgaaaaggagaatacctttccatggtgataaaagaccagtaaaatacctatataaggaaaaaagggcaaatcaggttaattgtggaatgatcaatacatgtgcaagacatttagcaatcaaattggaagctagaaataagtgtttgggggtccacatatctattgtgatatatagatagattttaattgagtgatgtttgatggtccagataattattttgacagatttgaaaatcatgtacacgcaaacacaaagtcaacaagcaaggtccactaacaattaagttgcaacaatgatatccagcaaagaagtcatgtaaacaaaaatttccaaacaaagaaacacagcagtagtagatatgaaaatcaatttgaaggtactgattatgacatgtttacattttatattaagaaatcctagtttacagttcagagggtgctcagtgacaagacctacttgggatatttaattggcatgactaccgcttctttaagtaaacgtttggcattctctagacctttgatactatcccatgtaacatcttgagtcccacgaacaatgtccctgcacagcatatagtaaactttttgaaaacatataaatgactatgcaaggtttttacatcattgataaccgaaaagaaatgcaattgttgtagaaatttaccacttgaaagacctcggttacttacctacagatactctctgctagagaacgtgtttctgcagattcaaaagctgggagcagagatttttgcctgcaaatatgagaatagtatcagtaatttcgctatagaaaaagattaaaagaaaagatatcagcataacctgaaaaccaaagtttacttctaatactcgttcaaggtttgtacatgtttcttgaaggtctataatactacactataccataacaaaattaattcatgttttcacttaatgtttaacataaaactgcccagtggcttctcatattaatagcttggtctctgtagtgattcttgcttgaaaatcaagtcattatcctaggttggaaactaaacaacagttgtttcaatagggtttttcacagaccatcagcaaaaaagctaatacttcaagggaatagctgaagtatgaaaacaaatatcttagcctcagctaagaaggtctaaccaacaacatggaaagtggattctttgggatatgtgtaaaaagatgaggaaatgagttcaatttggttctctagttccatctctactaataatgtaaagagaggtttcaaaagtgatattaagatcactactttaataccaaaatcatagttaattctttccacaattcactaagtagagttcaattctgcttttctcttcctaatactaaatataataaaacagtacttagtcagagtcagcatcaaaattcaagaaaaaactttaataataattcaaacttccaaccaacaaaagaaattttcgaaatttcaatcaaaatcacaatgaacatgttcttttccaaggtttcagcagattaaacaagtgaaaaaatcacaaaaatcttacggaatttggccatttccatttgcaaaaacaccattctgttgattagatccccttccctacaaacaaaccacacaaaatcccaatcagcttctcaatcaaagctagtaaaacaataccaaatcaactacattactaagaaaatggatacctgattttgaaactgctcatagatagccaagtcagatgagttggtggttccattattagtgacattggattgatcattctgcgaatcagtgggtggcagtggtaccctctttctaccaaacttggcatcataaaacattttaaaatcctaaaaataaacattaaataataataaatccacaaaattgttaaacccaatcaatctactaatctactctccattacattacaaatcactattcattcattcccaaatctcaaaaagttaaataattcactaaaagaaacacagatagtacagcaatgtgaatcactcacgccaaatctaaacaaaagacaatactaagcttaaagtttgtggattttgagagtgaagaaagagagagagttaccatgaaggaccagcgagtgattgatggttcgtcgtcggccattgatttgggataaatctagagagagagaaagagagagagagatttgtgaaatttgttctctcttctttctttctttctctcttcagtttggtgtttggagttggaatctacaaaatacttacaaagaatcaaataatcaaataataattttataattttgtatgaaataaaaaataattaataatatatatgtatttagtaagagaacacgtgggagattattaattaatgggattctttcacaaatatataaaaaaataaataaataaataaataaataaaaaatacaa
